United States Patent Application Publication US 2007/0161031 A1 - sequence listing, part 28

SEQ ID NO: 35304 - DNA, 2300 bp, Homo sapien
atgcctgtaatctcagcactttgggtggtcaaggcaagaggatcacttgagttcaggagttcgagaccaacctagactgtatagtgagatcccgtctctactaaaaataccaaaattagccaggtgtggtagtgtgcacttgtagtcccagctacttggaaggctgaggtgggaagatcacttgagcctgggaggcagaggttgcagtgagccatgatggcaccactgcactcaagcctgggtgacaaagtgagaccctgttaagaaaaagagaaagaaagaaggaaagagagaaagaaaagaaagaaagaagagagagagaaaggaagagaaaaagaaacaaagaaagaaagaaagggagggagggagaaggaagaaggaaagaaaaagagaagagaagagagaccgtaagctttaccagccagccaaaggggtcatgccctaaaaatgttaagaatctctgtctccacttatggctctcatagcccaaacaggccagcttcccacagagggtttaaccaagagatacacaatagcagaatctttccatttttacaattaaaatacaactgataaatcagtcaaatgtggatatcatcattttatttgtaaataaaatatcaaaataggacaaaatataaaaataaaatgcacagaggcacaacaaaatgttccattaatccaataatcttccattgttttcactgtattctttataaataggtcacattaccaaggaaagatttgtctaaatattgagttcatttggaaactctcgatatgccttggagtatctgaatcatttaccaggaaacacattttggtatgtgtatgtgttcaaagatatcaaatagttgaatatattctgttcctgtaaggaatagatctgggtttgcccaagatagaggggtttcctgagacatgggacttcccctgcaaaaactgggaagtcctgggcaaacagggaagagctgggccaaatttctcaacttcgtgtatgaacatggttgtgctgcggccggagttttggtagaaaccaccatgactcatagtcccccagaggagatctcaggagcactttggccttgtgaaggccaaattccagcccggctctgcctcagcaccctcccagaaccaggcacctcacgtaatcttctgagcctgtttcctcatctgtgaaacatggagacgccggtgggtgccctgcccctcccagggctcctggaggattccaatgagataagtgttgtgaaagcactttgtaaactgcaagtgtgccgcagaaatgcaaaatacagaacaattctttaatctcacgtggcagcagcaaaatatgtgtgcatccatggcacacttttgtattataagaaggatgttagcccatccctttagtcctttctttcatggacactcaaaccccagatcccctatcattaagagcgcagcaaggctgtggggaagtaggcctgggtgtccctgggcttttgtctgccacctccttcccctcaaggtgccccagcgccctcatcctgcctcctccccggccaaactctccttcttgtatcccacctagagcctgcaagcatggtctgtccttcaaaacatgcccgctgtatgccattcctactggacaggagtcctcgctgtcagctgcatgttagagccactggggaagctttcactgtccccatgctgggacttccactgatgattgcatcagaatctctgggggagggcttcagacaccccaggtattatattgtatagcttggattgaaaacacaacttgagtgttgcctggaggttaattagaaaaaggactccccattcatctgttagcgagcgatgttgttaccccacccacagagccctttgcttgaatccaggcaacctaccaggctcctgaacagtcttctcaaagaagtgtttcttgaaggtctccagtgcacctcaccctgggctccaccggccctcattacgctgccatggatgacgttagcctcatcttcagttgagaaagctgagactcagcaagtttccttgtaactagggaggggcagggcagtggtttaaaataaagccatgcacacctccttccccagagcatccagtgccttgctgatggaaaagccaccgctgctgagaaaggcagctgtgcctgggccccgcaggtcacactggagtcctcacctccatctctgcattctggtgcatttggaagaggatttctagaggtgggagaggagatgtaacttcccccacctccttcgcatcttctaacagttgcagcctcctctgct

SEQ ID NO: 35305 - DNA, 2300 bp, Homo sapien
tgtcacggttcttagagattatttgcattgctactgagacataagaaaacctcaaggagcttttaaaggccgtgtctgtgagatgaatggtctggtgtcctcacccagccccccttgttccagcattcgtgtgacactgccgggcagctgccttggcatgagccttctctgtccaagaacagactgccaggcctgaacacggagaggaggaacagcctctggggtattccctgactttggggaggcacgatgaccaggctggggcctgtgctttgggggaaagcacacaaggagatcgagggtgttttttctgtgtcctctgctcctgtccttgccattgcctctgcgcagctgcctcctgttctttcactccggtgacagcccgggcagatgcctccctccagagccgctgccagccctactccatggacagctgtcgccacggccccaggagagcagcgtgaccaccggcaccagccatgaggagggcacatctgcagagaatcccctacccctggctgcgggcctgagggctcagcgccctactgtacaggacgttcccagctggcgccacttaacacgagcctcttcttcacttggtttttcacctctgagatgttccgctctgctgcaagcaatagggtgtttcacagatccatacttgtctttacaatttccaggcttaggaaatatttttaaattttattgatgacctttccaaagtttaaatgagttagcccttggatgttaagaggaaatagtattttaaagacaaagtaaaagaatgccaaatctatgaggacattatgctaagtgaaataagccagtcacaaaatgacaagtattgctgattccacctatataaggtcctagattagtcaaactcgtagagactgagagtagaaaggggatgccagggactgcagagtggggctagggaagtggggagttaggatttaacgtgtacagagttccagttcgggaggatggaaagacttccggaggttaggcacaggggctcatgcctataatctccacactttcagagaccaaggaaggagaactgcttgaggccaggagtttgaaaccagactgggcaacatagtgagatcccatctctacaaaaaatttaaaaaattaaacagtgtggggacgtgagcctgtagccccagctactcaggaggctgaggtgagaggattgtttgaacccaggaggttgaggccacagtgagctgtaatcacaccactccactccagtctgggtaacagagcgacaccctatctcaaataaataaataaatctttttaaaaataaaagaattggatatgatgttaaattttatgttatgtgtatattgccacaatttaaaattttttaaagaataccaaatcaagaagtgctaaagttcatggaattacctatatcagaggtggtgggagtcaggagtatggaaaagaacccttcaaatgaaaaggttcatgattatcgaaaacagcttgtcctgtttttaccaactggaaactttctctaggaaagcagctattcctaatggcatttctaaaattatgcaaacacaaaaccaaaaagaaggcaggcacccagtaaagttatctaagactttggtgggaaaataaataaataaacctgccgcctcacggttgtttctcctcacctacaaggctttgatttctgagatggggcctgaagcaggaattcctcacacaatggatgctcaatttgtcacaggatgtgcctctccactctcataccagataaaaggttagcctggtttttcatctagctgtgtctccctcagaatcaaaactatcgtcctcctcagtgctggatcgagtcctttcatctttaatttgaccaaaatggaaaccaggatcatgagaattcctcggggctggtgttgaaaggaatttcccctgctcttgccagagtctcgaggggtggcctccttccacgggtgagtaaccacaagtccatgtgaccgaacaaacagcatattcttttgttcaaaagagaaaaacaacattgaaggaaatcagctgaagaaaattgagatgaaagccagtccacgcctcagcatcctgaggaaatgttcttccttgatgctctgagctctctaagaagttaccacaaaaccaaacccatcagaagtttgcaggacgtccttgtttagagctgggaaataaaccacgaaacagcgcaaaggagagtccaggcctgccaatgcttccgcgaactcctcgccccgacctcatccttctccagctcctacctgcaggcctca

SEQ ID NO: 35306 - DNA, 2300 bp, Homo sapien
gctggagtgcagtggcacaatcttggctcactgcaatctctgcctcccaggttcaagcgattctctgcctcagcctccagagtagctggtattacagacgtgcgccaccacacccagctaatttttgtatttttagcagagatggggttttgccatgttggccaggctggtctcagactcctaacctcaagtgatccacccgcttcagcctcccaaagtgctgggattacaggtgtaagccaccacaccagccagacttcttaaaaataatattttctgtacaaagcaagagtaagaaggtggtcaggagacttatcagattgaaatgatctccatgaagtcccagaaaggtaaaggagacttctcacttcccactcagctctcaggcccatgaaaaccacccatccacatcatacatactgcaaggtgacctgaattccaaagtcctgactgcttctcaccttttatcctccccaggaactgtagttaataacattcaccctgtattagtccgttttcacactgctataaagaattgcccaagactggataatttataaagaaaagaggcttaaattccacatgtcttgggaagccaacttccttgggaaggaaacttacagtcatggcagaagggggagcagactcatcttacatggtggcaggcaagagagactgtgtgacagcacgagaaaaactaccattataaaaccatcagatctcgtgagaattcactcattatcacgtgaacagcatgggggaaactactcccatcattcaattacttttctcccttgacatctgaggattacaattcaaaatgagatttggccgggcacagtggctcacgcctgcaatcccagcactttgggaggccgaggtgggtggatcacctgaggtcaggagttcaagaccagcctggccaacatggcaaaaccccatctgtagagaaaatacaaaaattagctgggtgtggtggcaggtgcctgtaatcctagctactttggaggctgaggcaggagaatctcttgaacctgggaggcggaggttgcagtgagcagagatcgcaccagtgcactccagcttaggcaacagcatgagactccatctcaaaaaaaagaaaaaagacaaaatgagatttggatagggacacaaagcctaaccatatcacaccccattggccacccacccacctcctcctcctagaagctcttccctccctgtgagttggcaggtgaacttctgttgttcctttctggccacatctcccacctcctttactcactctactctcttcctctggaaactaaacataggcatttcacaaggctctcctctcttccttaaaaaactcactcattttacaccttcaactctctccttcatacagatgattctgttttatcagctcacccctcacttcactcttgagtcccagactcaaatttccaactacctgctggaaatctgcacttcattggcccatggctgttttaaactccatctgctcaaaaccgaaagcaagacaaccccctgaaaacctacttcttctgcactttccactcttctgttccttcatgtgagaaaatatccacacgaagtacagcacatattctcgtctctgagtgtaccatcctccctgcacccctgcactcaactagaaatttccattctccttagctgttttctagtgcccatactactgattctgaactcaggggattatctgcaaacacaagttccaaggccccatctgcaggtttgaaaaccactgctcttgacacaacattttctaggtgaaatcagaccaagggaatgcttgtaccacatcagacagtcccctgttaaaactgttttcacggggctgtgatttgttgcgatacccttggctgcttaaaggctgctacaaaaaggcatatgattaaaattgctgttgtactcatgccagaggcgtagctgagcatgttaacattacatcacagagggggccttttatgaggcagggtccctgactgatgagcaaaccaccagaggagggtcaggcgagaggcccagtggagggtaacacacatggagttcagtgacccctttgttccttgaggagagaggacctatttctacctaaggacattcccggaaggcaatgggtttcaaacaatatcctgaagagactcatctcggggaactaagcaggtaggaatggaaaggaggaaatgggaggggagaggaagtcaatctgggaccctcatcccggcttcaaccaaaagcttcactctcatctgcctgatggatggagctac

SEQ ID NO: 35307 - DNA, 2300 bp, Homo sapien
attcagtcctagaaaatctgtcactaccatcattagatacaggagaaaacctaagaatatcagcggatgctgcaaaagcacaccatcaaattaaaacccactcatgattttaaaaagtaacaaagacctcttcgccagcaaatctggatagaatatctacaactagacatttttgggaatgctcatacttcaatggtgaaacactagaagcactccagtaggcgaagatgacgacggcagtgttctctaccatgttactactcaaaatggtcctggaagttcccagcctacaccagatgagaaaatgaaatggatgcataaacacaaggaaaagcaagtacgaactataattaattcgaaggtagaagactgccgactccaaaatcctagagctctaactgaccattaaaacagtgtccagcaaaggaacaaggtaaacatatgaaaacttagtgattttcctatacaacggcaatcaattagaaatcagtctttttgaaaatcctattcgtaatagctagaaaaacaacctaagaataaatctaaaagaaaacagacaaaactacaatacacaacacacacatacaaatgcacatatacctatacattcagctataaaactttactcaaggacagaagaagacaagtaaattgggagaaataccatgttcagagatgagtatcagaaggctcaacacttcacatacctagtctccaacccaaattaatctagaaattcaatacaatcttcagccatgaaaaaaaaaaatccctactagaatttttcacagaacttgacaggctgattttaaatttcctatagaagactgtggaatttctttaaaagccaatataattttgaagaattacagcaaaggggagggataggcaacttgatatgaaaacattataatgctatggccattaaaacaatgttataaagaataaagactatgtaaattgatcactgaaacaaagtaagagtcagattgatacaaccagtttggagggcaatttagcaggatgtttaagttaaaaatgttcacactcttctatccagctactttctgggcacatgtacacaagacgtgccctagagtgagttcaccgctacaccggacatcccaaaaaaacaaaagctgcagacaaccttaatgtccttcaatggggaagtgactaatcatttaacactgcagaagtaaagttaggaagcaactaagaaagaatgagacaggtctacacacaccacacagagtgatctttagaggtatctagggcatcttgttgatggaaaaagttacatcatatcgtttgtgtacattctaaacacacattggcagtactttctatgttcactatagaaaacatgtatacaaaaccatgtccctacaaatcaccaaagatcttgttaagatgcagattccaattcaactggattggggcggtgcctcagagtctgcatttctaaccaactccagcaagcttgatgctgctgccagtccatggaccaccctgcagacagcaaaggcacaggagatgatgtggaaggttccaggggagaccaacactaagagctgatgaatggggaagagggtggaagacaacagtcaagtgagatggccaacaggagtctttataatgttccagaccagcccgggtaacagtgagacccatctctaaactaaataaattaatttagtatttgttaaagaagagagaggccaggggtggtggctcatgcctgtaatcccagagctttggaaaggcagggcaggaagatcactcgaggccaagagtttgaggctgcagtgagctataatggcaccactgcattatggcctggatgacagagaccctgtctcaaaaaaaaaaaaaaaaaaagaataatgtcattgagtacttgtgtaattaaaagctagtttttaaaaacccatatagactacttttgagtatctccttactaaattctaggagcctcatgatgttaagtacagagagggccaactagtgttgccagctcctctcctcaaacaagaatccataactgaccagaagagagcaagagctgagggaaaataaccaataagctagcagtgacagcctattactactgaagaggtacttttaaaaatgctattttaagtcaggtgctctgtttttatttaaaatagtttaagtctagagagcttattaaaaataaacaactgctagttctatctttagtattatctatgcaacatagttcaggaagtttttacatggtctactatgttttacttttacttcatattcttgctaat

SEQ ID NO: 35308 - DNA, 2300 bp, Homo sapien
tttttaatcatgaagaggtgttgaattttctcaggtgttttttctgcatctgttgaaacaatatgtgattttttcccctttattctattgatgtggcatatgaatgttaattgactttcacatattaaaccagccttgcatttttggaataaatccttcttggtcatggtcatttttgtatattgcggaattcaatttgcgaatgttttgttgaggatttttgtgtctatattcataaaagaggtataggtctatagctttcttgtgatgtcttttgttttggtattaggtaaatagtggcctcatataaagtgtggtaaattgttttctaattactggaagagtttatgaagaacaggtatttttaaaaattttggtagaattcaccagtgaagctatctaatcctatgctttttttaagggaggttttgatgatcagtcttatataggcctgtttagattttcttggttcattttgactagtttgtatatttctaggaatttgtttatttcatctgagttgttaaaattattggcatatagttgttcatagtattttaattatttttatttccatatggtttgtagtaatgttccctctttaattcctggtattagaaatgtggatgtttatttttcttaatcaaaataagtaaaagtttgtcaattttgttaatttttttaaaagaaacttttggttgtgttgcttttaaaatattgcttttcagtttattaagttctaaattgtttcttttctcctgcttgccttgggtttagtttccttttttgccagtgtcctaagataaagggttaggttattgatttgaggtctttcttctttttagtgtaggtgttcactggtagaaatttccctcccatcactgcttttgctgtattccataagttttggtatgttgtggtttccaacttctcttgagacattttggggggaggtggcccattgattatttagcatgggttaatttctgcatatttatgaattttcccaacttctttgttattttcagtatcatccccatttggagatagaacttgcatgattgcaatccttttaaatgtactgagcttatcttaagacttagcatatggtctgtgctggcgagtatcctgtgtgtgcttgagaagaatgtatattctgctgttgttgggtgcagagttatctccttgtcagacttgcataatgtttccatcacaataattaatggagcagtttgcctgcccctggatgtcttattgctccttcacagtctgatgctgagatctcaagctatggctgcctgccggttaactcaaagaatggttttcatacctttttttttttcttttttttgagacggagtcttgcactgtcgcccaggctggagtgcagtggctcgatcttggctcaccgcaacctccacctcctggttcaagcaattctcctgcttcagcctcctgagtagctgggactacaggtgtgcaccaccatgcccagctaattttgtgtatttttagtagagacggggtttcaccatgttgtccaggctggtctcaaactcctgacctcgtgatccgcccgccttggcctcccaaagtgctggaattacaggcgtgagccaccgtgcccggcccacatttttttactagctggaaaagatcaaaagaataataatattttatgatgtgtgagttataaaattcaaattttagtgtccatagatagagggtttttttgtttttgtctttgtttaatgccatttcattcattacatattgtgtctcgctacttccttgctataagaacagggttaagtgattgggagaccagatgacccataagcctaaaacatttactctttggcagtttatgtaaagtttgccaactcctggtctaatgtgtccactatgacttccttatgtatactcagtctggccactgagtatgcctaaaaacggagcacacacctaccgttagctgcggaggctactgttgctcttcctctttgctcaatttcctgaggagggagggacaggatctgcctggggcctggcagcagcaggtccccagggatgctggccctgggggaaccagtggtacatggttaaggagggaggggaaacaaaagcagtgtgctccaccaggctcctgcctcggctctaaggaaacagaggaaagcaaacgggaatactctggtttagtatactgcccgcttctggagtggacattgatttaaggtgggttgggcaggaggcagggggaacattaaacatagctttcctacaagacataatctcattgc

SEQ ID NO: 35309 - DNA, 2300 bp, Homo sapien
aatctcattgccccttttcttttaaaactcttaaactatttctgcaaaaacgtcatctatgtggacttttccagaaatatgtcttttacttaaattgaaatacaccctcatacacaactattcacaagtgaaggagcaagggaaaaatcgctttcaagagctttccctgctatgatacggaccgcgtggactcgcccttggtgacctgacgttaattctgactctgtggagatctgtcagacgtgaaatcggccctgtgatgagctaaggtcttgctgttcctaatccttttttctcagaagcaataatatgtatttaattttaggctgttcagtagttaagggcttcagttttctatatctcaagtagatatactggagagttttttatttctttgagagcagagaaaatgatggggatggggtattctcccgttctctacgatcatcagcacttctactcattaggctcgagtatttggggatgttagagaaccaggcatgccacagtttcgcctgacctacctctaactgccagaaatgtactgacgttcttaataattgataggtgcagacctttgcgttcttaattaaagagccactccgtggctgtaggcctctgcccacaagatacagagtcacatgctgcccccaggatgcaagctgatgcttttatagtaactgcagatgtaataacagattctaggtatttcttcagtaacgtatggaggcactgtgtcacataactctcgttcatgtgagtagcggaagatctctcttccatttacgcttcagatgttaaggtagtagaatttgtcacggtgataaaacgtgcttacaaggcagggttgtgtgaattgataaatttgatccaaaatgtattggtcatccatttcaatgattaacagcatctccattgaaagatgttagtgtaaaattaattaaaaccaagatttgaaaataacctgatcgctctagactgttttattacaatcaagtatgatgttctctgttgacctttttagttttaattgagtgcttctgaatgatacttgtgatacagatcatatgtttctttgatggcagtttcacaccacagaaggttctcagcgccttgtagctcattgctgtcaccactccaggctgttgcctgggtgcccgctgctggaaccctgggatgaccaggcacagctgcagatgcctcgagctgctccagccatgagtgtggaaaccaactcggtggtcaggcttcaacacagaaatagcagagagcccctttcagtcacaagaaacataagtcacctaatgcatatccacacgttctcagcataaaaatttagcatcttgtttgacttactttcagggaaattgtccacaacccaaatggcctattactattttattgaggttgcagaagagatcattttatcatctattgtggtttttgctatttttgatgtttcctaatgaaacttgcacttttccccccaaattttgatttttttaaaactatttttttccttttatgaacaggttgaaaggattgttgacaaaaggaaaaataaaaaagggaagacagagtatttggttcggtggaaaggctatgacagcgaggacgacacttgggagccggaacagcacctcgtgaactgtgaggaatacatccacgacttcaacagacgccacacggagaagcagaaggagagcacattgaccagaacaaacaggacctctcccaacaatgctaggaaacaaatctccagatccaccaacagcaacttttctaagacctctcctaaggcactcgtgattgggaaagaccacgaatccaaaaacagccagctgtttgctgccagccagaagttcaggaagaacacagctccatctctctccagccggaagaacatggacctagcgaagtcaggtatcaagatcctcgtgcctaaaagccccgttaagagcaggaccgcagtggacggctttcagagcgagagccctgagaaactggaccccgtcgagcagggtcaggaggacacagtggcacccgaagtggcagcggaaaagccggtcggagctttattgggccccggtgccgagagggccaggatggggagcaggcccaggatacacccactagtgcctcaggtgcccggccctgtgactgcagccatggccacaggcttagctgttaacgggaaaggtgagtgtctagggagctgctcaggctccgtggtgatcccagagggctcgggtccttctctagagatcaggccttgagctgggcagagtccggggcttctc

SEQ ID NO: 35310 - DNA, 2300 bp, Homo sapien
tgtatcgggagaccaaccctctgagacagctgctgtgggactgctgacagcatagtgtctttgcagccacatcttcaacagcagtgcatctgaacacagactgcaagtctctcctctccattaatcctcattttaaggggacggatactgtcatgttacaacatccccatccaacacttgtggccaattgcaatcagaaaccaccacctaaagagggtacaagaaagaacaggatgagaatgcgggggagaacgcgtgtgcacctgaccacacagactataccacaggccctgtttgaaacaaaacaacagccctagcatcgtgatgtggtctccctacccttcctcatccagccttgttcacagccatttcaggtttttcttacctttctttataaaggtactgatgaattcaggtgtaattaattcatgaagaggtaaattcttcacaaagtaatagggtccagtgttcatgaccaggtttttcagttcttccgatagtatcccacattcaggaatgagaaatgaaacctattggaatgtgtaatacaaacaaggtcttacttccatgaagatgaacacccaggtttttaggaatgaaacaaaatcatgaaagttgttatttctccacgagtttcactggaacataaaaacacgggcaacaaaactcttatgttaacttacctatctcaggcaaagagaaatctgactacttaagtttttcatttctgcattcaaacgtacagtacaggaaggggattgaacagaatacttttaatggaaaactcgtgcttgcatttaatcttttgcaaattagcaatgctgtatattttatgtcctgttcctttcactattttattttcaaggaaatatagtataattgaatatcccttgatttgtttaccctggtgttatcctggaatgaaacaaactatctgtcggggcataaggaattaatttatggacatccaattactaagaatctatgtgcaagcaatggtgctcctgtatgttttcattttcgagacagaaaaatgcaacaggcgagttaaagtatacatccctgactgctgtgatgagcttgacatccaaaataggtgttaaaaacagggcaggcttcaaatgttgccacattgtaaaagtcatcactgtcccaaggctcaaacaccagcctgttctgactgatcaggtcaccacttaacatctctgaaacactgctcagtcaaacctgagttattaagctgatccatttaaagtgtaaaatgtttaatcccccatgataaggttagtttcttgaagtctctcagatatcaaattagttccaacaaccaatttagaaaatcagtcgcttcggccgggcgcggtggctcacgcctgtaatcccagcactttgggaggccgagacgggcggatcacgaggtcaggagatcgagaccatcctggctaacacggtgaaacctcgtctctactaaaaatacaaaaattagccgggcgtggtggcgcgcgcctgtagacccagctacacgggaggctgaggcaggagaatggcgtgaacccgggaggcggagcctgcagtgagccgagatcgcgccactgcactccagcctgggcgacagagcgaaactccgtctaaaaaaaaaaaaaaaaaaaaaaggaaaatcagtcgcttcctgggccgagcctaggcaggatgctctggtgagatccacaggtacgcaggtgggagagggattcaagctggggaggaggcagtggtggggaggaggcgcgagacccgccctgatttggggaaaaagcgaggtgcacgtggctgccccacagcctaactccctggtcccggccctgaacctcgaatccctccctggactcactcccagttcggcgggttgacacgagtgagcagccagaacgcccctgacaacagctccctccagactgggtaccgcccccacgcccggcgcatcctgggagttgtagtcctgtagccctgcaagccactggcttagagcagttaagagactacaactcccagcaagccgggcgagggccccgcccctccgcgtaccgccggcggccccgccccgcgaagcctagcactctccccaaacctctctcgcacgcggggactgagcacggcccgaaaagccgaggacagccggactcaccctgtagttatagtagtgcgtctgcacaagatgccggtggcgcgacttgtggttgccgaagttggatttctcgcaaaccagtaagtgccgcggcgcctcccgaagccggcgcagcgtggccatgctctcctgggtt

SEQ ID NO: 35311 - DNA, 2300 bp, Homo sapien
cattttaaactaaatggtttgctggaaaagcttcacggtgcttccaaatacaattggtagaccatcaggatcacaccagtcactttgtggagttttggaatgtcgacaaaggagaggtacatccgtgatgtttcagtcttgggccactgctaccacacacaaagcaactgtctggtgacaattacattaaatatgaggtgaccaagaagcaatgctttaagccttttacatcttaacatgttattagtagctgttatttataaaacatctagctgccatattgtgatctaggaaattagtagggttttttttaattaacttgccacgccttataattctgctgtttaaaataatgggaaacaggttctcattaggtttttccttggaaagaaaatgtgacatttcagtcatagattacattttgactttttttttttttttgagacagagtctcactctgtcgcccagcctagaagtgcagtggcgagatcttgactcactgcaacctctgcctcccaggttcgagtgattcttctgcctcagcctcttgagtagctgggattacaggcatgcgccaccacaccctgttaatttttgtatttttagtagaaagcgtttcaccatgttggccagggtggtcttgaactcctgacctcaggcgatctgctcgcctcggcctcccaaattgctgggactacaggcgtgagccacagcactcagccagattaccgatgtttttagtggcagatgactttccggccttgtcttagttttaatttttttttttgagatggggtcttactatattgtccagggtggtcgtgaacttctgagttcaagtgatcctcccacctcagcctcccaaagtgctgggactacaggcgtgagccactgtgctcggccagattactgatgtttataatggcagatgactttccagccttgtcttagttttatttttatttttggagatggggtctcactatattgcccaggctggtcttgaactcctaagctcaagtgatcctcccacctcagcctcccaaagtgctgggattacaggcatgacccactgtgactggcttagttttaaattcttaattatttaccttgtaaactacttaattccatttcttccacatctcatagaaaaactgatgttccaggaagatgtatcaccaatattctgctgttttgtatcctgccagtgcagaattggggctgtgcctctctagtttgagaagcatgtagtaacatacttgattttgccctgatcagtaacgtaccgcatgctgggagccgcagtctcttaaccgctccaagcccgtgacagaaaaacgaaatggaaaaatgacttaggagaattatcactattaacccccagaaacaacacattattaaaagcggttctgaagggctatttaaaagggaactcaatagtagtttcaaaggagtcctattgtaaggcaaaaattgtgctttaccttcccgcacaaccttccctaatgttttgggaaggactgatacaaacttttagtcctgttggcctgtgttaataatggccaagaggtccccaatgggtaacagagtcctgtgaaccaaacagtgtgagaagtcagaaagcagctgggtgtggcccccaaagcagcttagggggttacttaactgtgcggctacatttcttgaccatatactaaaggaactgggcctttccatgcgatgttttccttttataacggtggcaggaagcggtccctctgaggggcctgaccgaggtatgcgccggcgccaggctggggtccaaggggcgctccgaggcggggcccacagagagggtttagggcaattccaagggatggcggggacggaggaaaagtggcgttgaaaaggcaagagccaggttcccagccactgggacagtgaatttacagcttcagacatccaccaaagagcggctgcgtgggctcctaagaagtctaagaactgctcagaaatccagcgccgccatccccactccaccgccgccaggggcgcacagcagcgggtatgcggccggagggaaggggcggggcgggaggaaggggcggggcgtgccccgccagcggaggccgggaggaccaggaacccaggagagcatggccacgctgcgccggcttcgggaggcgccgcggcacttactggtttgcgagaaatccaacttcggcaaccacaagtcgcgccaccggcatcttgtgcagacgcactactataactacagggtgagtccggctgtcctcggcttttcgggccgtgctcagtcc

SEQ ID NO: 35312 - DNA, 2300 bp, Homo sapien
gctgggcacaggagagaggcaagtggcaacagcgtttatgctacggaggactgtagccccactgtaccctaaagcgagctgggggaaacagacgggtgttcccagccccatctccaactcccctcccccatcccccagagacggggttgaagaggaaggccagatgaagctttggccatttttttctcagtgcaatggaaagttatggaaagattttacatacagggttcagcatgatacaacttacacatttaaaagatttacatgtttaaaaaaactagactaggctgggtgcagtggctcacgcctataatcccagcactttgggaggccgaggcaggcggatcacttgggttcaggagttcgagaccagcctgcccaacatggggaaacctcatctctactaataatacaaaaattagccgggtgtggtgctgcgcgcctatagtcccagctagtcgggaggctgagacgggagaattgcttgacccgggaggcagaggttgcagtgagccgagatcacaccactgcactctagcctgggagacagagtgagactctttgtctcaataaatgaatgaatgaatgaatgaatgaatagcctgggagacagagtgagactctgtctcaataaatgaatgaatgaatgaatgaatgaataaataaataaatttgactaaaaggttggagagtgggttgagaggataagtctggaggcaggaaaaactgaggaatgtattcaccaatcttatgaagagatgaaggcgtacccaagagaagtgaaaccatatgtccacacaaacacttgagcaagagttgctataggttgaaggtgtgtgtctcccccaaattcctatgttgaaatcctcacccccaaggtgatggtatttggaggcggggccttcgtgaggtgactgggtcataagaatggagccctcatgaatgggattactgccatataaaagaggacccagagcattcattggccccttctgccatatgaggacatagtgagaaggtgccattatgggccaggaaacaagtcctcagcacacaccaaatctgctggtaccttttcttgaacctgcagcctccagaatggtgagaaatgaatttctgttgtttgtgagccacccagctgtggtattttcctatagcagcccaaatggattaacacaggaatgcgcatagtcacactactcataatccccccgaagtggacacaaccctgatgtccacgggcagacaaaagcatactgttatgtacccgtgaatggataaacaaaagcactatatccatacaagaggatattgtccggccataagaaggaataaagtgatgatactgatgtgtgctacaacatggaaacctttcaacaaacttgaaaacatgctgattgaaagaagccagtgacaaaagaccacatattgttggattccatttacatgaaatgtccagaacagagacacctatagagacaaaaaggagatttgtggttgccagggagaggggaaggggagatgaggagtggctgctcatggatatggggcttcttttggggtgatggcatgttctggaataagatagcagtgatggttgcacaactttgtgaatacactaaaaactactgaattgtatgctttaaaaggatgaatattatggcagtgaattatatctcaattttttttaatgtataaagaagaccaagcatcacagctcatctgtagtctgtgctttgggaggccaaggcagtaggattatttgaggccaggagttcaaaaatcagtcagaccaacacagaccccacctctacaacaaatttaaaaaatagctgggcatggtggagcatgcctgtagtcccagctagtcaggaggccgaagcgggaggacttcttgagcccaggagtgcaaggctgcagtgagctatgatcgcaccactgcactccagcctgggcaacacagcaagatcctatctcttaaaaaacataaaaagtaaaaagaagagagggaaagagagaaaaagatgatggaagccgagacaaagatagtcatggggatggatgaagcaggttctagaacttaccgaaaaaaaaaggaatagagtgtgccaacagcttagatatagagtgtgagagagaagagtggaggctggttctcaggctccagaagcataagcctgcatggagcatagcgtcactgagcaagacaggtgtggaggatgagaagcgggccacaggatgggaagggaatctgtgtggaggcggtgccctaaacatgctgccttgaggagggacctcta

SEQ ID NO: 35313 - DNA, 2300 bp, Homo sapien
aaaatgttacaagactatgcataggtaaaagatccgcttaaagtgcaagataaactgactgtaatgtaacatagtgtggacagtttgacaataaggtttcagattccatattgcaactaccttaaagaaatgacatccagtttagtcttggtgtcatatcaaagaagaatgtctacagtcttctgaaaaggccattaaagacactctttccttttccaactatttatctatccgaggctggattttcttcatatccttcaagcagaaaacatatcacaactggttgaatgcagaagtagatatgaggatccaactgttttttaaaaagccaatcattaaaaagatttgcaaaaaagccaggcaggcacggtggcatgtgtctgtagtcccagctactcaagagactaagtgggtgggaggattgcttgtgctcaggaggctaagatggcacttgttgaatagccactgcatttcagcctgggcaacatagcaagaccctgtctctaataataaaaagaaagagaaagagagatgaaagaaagagagagaaagaaagaaaagaaaagaaagagggaaggaaggaaagaaggaaggagatccaaagaccaaaaacttgaataaccactggcctgagattctagtaggtctatctggcagggtgcacgtggtttttaactgtttcaaggttatgttggtgagtccctttggccctgtctctcaagccccactgaagggaagccacaaactgaccctctgagtagattctggcatggggaccagagatgtcttagctaaggatcctttctcccacttagaaactatctctggacctgagtggtttaggggtggagggtagagtgaaggtatattcagtctggagataccagtcaagaacgtgaaacacttttaactgagccaagaggattccagggtggggagtatgaagtgggacagatattaggtagcatttgagcctaatcttgaggaacgtgtcctatttggccaggcaatgtaataatcacaggtctgagatattactaggcacagtgacttcatcagggtgaaaccgtgtccattcttctcttctttggcctactcttactcccatttctacttttcttctgtaaaccagaacgtatttgagacttatctcaattaatttagaggtttattttgccaaggttaaggaccatggccagtgacacagcctcaggaggtcctgagaacatgtgcccaaggtggctgggttacagcttggttttataccttctagggagacagaagttaccagggaaatacataaatgaatacatgtaaggtatacattgggtcaacccagaaaggcaggacttctcgaagcagggtcttcgaggtcataggtggattcaaagatttcctgactggcaattggttgaaagagttaagctggagcttaagccaaggttcttgtcatgtagatgaagcctccaaatagcaggtttcagagagaataagcagtgaatgtctcttgtctgaccctaaaaggtgtcagactctccagaaaaggcctaataagggaagaagattctctatagaaagcaaatttcccccacaagagacaggttttcagggtcatttcaaaatatgtcaagggaatatattttgggataaaatactgccatttctttcagggcctgatatccgtcatgtgattccataccagagtcaggttggaatgtggtatgttattgctacaaagagtctgttttttcagtcttaaggtctctgagtcaatgttaatgttggtcagtcacgtctaaactccaaagggaagacagtagaaggaggtaagtctgactcctccttcccatcatgggctgatgtggtttttcaggtattttttggaatccttcttggccaagagagggatccattcagttggttgggggcgcttagagttttatttttgttttgcacttctcgtaaccaagtatgactcccaagactcccggggcatgctgtagaataatgctgttaccaggaatttgtcaggaaatactctgcatgattggaagctgagagtaaaggcttaggatttggtgttgtttgcacaaacctcccatgaaaagaccatgcacactggagcaggacagttgcaattttggcttccctctctcctgactctgggatcttgagtaaattactccaagtccttaagcctctgtttccacatctggaaactgaacatactaacaccgacctctcagagttgttgggacaattaatcaggaacatatgtggaagcacagtgccagggacaa

SEQ ID NO: 35314 - DNA, 2300 bp, Homo sapien
tcattaagtaaaatcattctctcccgtgaaatttaaccacttaactgggtggatacaacctcagtggtatgacccagatgctgttttcaaatttgcagcatgagtatattttccaggcgggtttctaaaaatttgagagtcattgcttaagaggcttagcgttcctgtcctctgacagaggttgtactgggcagacccatctcagggcctgccagctcacacacgtgctggaggggggcctacctaaccaggtgtgttccaagggtaggctctgctcttatgacatccaatccacagtctggccagtcacctaagtgaggcttgaggtaaagagatgagttgatccaaccagattctttctcatgggaatatggctcaaactcagagagagacaggtagttagtaaaaacaaaacaaaacaaaaaacaaatctaaaaaaaaatgcagagagagaatccataagaaaatgatgggtcagaaccagcaacactgtgaaagcagaggctctgaattagaaaaaacatacaaagagtaacaataaaagactcataggcaaataggggagtggggaggcgtgagaaaaagtgaatgtgttatattaaagatgtgagtttaggccctcaatatcctgctgtcaaggtccagtaagcgggatctctgtctggtgagccaggagaaactgaggtttcagctccaaagcttgtgagaccctttttccttttccgctacgcatttccaccataccctaaatagaatggattcttgcaaccaaaagaactcattacgacacctaggaaattttagggaggtgctagagtgtgccttcagctttgtcgcagtgtactactcactggccacttccactctcaactcttccagtgctcaagggaagttttacatatgcaacacactggccttaacttcacaaatgactgatttccatcccttttttctcttctgcagaaacataacactaatcatgctcctagaataactaccaagatagcctttagggggaaaacgtcacaagacatgaacgtctcccctggtagaaagaaaggctcctccccgaggtctcagaggccacacctgtaggcaggagcacgcttttcgatggcggagcccggtccttgcctcgcagccgccggcaaaccacggtggctcccagtccccggggatattccgcgtcagcccgcacccccggtccccggcccctggccccccgcccccggcccccggtgcccgctgggtcacctgtaattgtaggcgctgaaacgcttgctctctctcagcatcgcccggtacagagataacacttgtgcgcgactggaggctgccattttggaaagaaaaaaaaataaacgggtcctcttcgccgaggtcccaagtacgacccaacccacgaaactccagcctgtgcggaaaccacgaacgaaataaaatgctgcggctcggctttgccagcgggccgggcctaagcctaagcgggcagccctgcggatcgcggacggcgccaggcgtcccgcgccgcttcgggggcgggcgcaggcagggctcggggcagctaagggggcggtgctgggagggagatgcctccgccccgccccgatcccgcccccgcccggaggctcgggacccagcagccgctccacgcggcgggagggcggggaaataagaggactggccgcccgtgcatccagccaagctcctggcggacggatatcggaggcccaggcattcgagggacgtgcagttgcatcacggagagcctttgggaaccgtctggggtcttggcggagacatttgtgtttcgggggcagcgccccttcctacatccaggaggccgcgttgcccgggttaccgaaggccgccgcaccgacgccccgcccctgaccgccgatgcccctcccacgccggctgcggtcgccctcggcgctgcctgagagagtttgcgggatttcaagggtgacttgatttcgcctgatcctggtcggcagggtggggtttcttggcattcctcaggccgggggatgcgacgtctgggtgtggaggtgatgagctaggggttctgtggcactccggctctgctcagggcgacctgcgtaggggcctctggggcaggcccgctttctgtcaaaatggcagcgcccagcgtgcgcgggtatctctgaagttggggtttaagattcttgcccgtgagagcgaacgagcctgccgtacttctgattttgaaacacctgggtctgggcttcccgggcgagcggtgggtgagtgccggcctcattgcagcctggggtacg

SEQ ID NO: 35315 - DNA, 2300 bp, Homo sapien
atgttgtagctttgaggtgccgcatatcatttcatatcactggcacacaatagtgtatcaagagaaatcagctctgaatcttactctataacaatgtgcaattgccttggtcttggatcctttaagaaatagcaaagggaaaactcaaaaaagtcctttcaataaagcagaggctagatttgctcaatgacctgaccaaccaggaagtaatagaagttttgctatcctgtttaaaaaataataataaacaataacagacatgagattttcaagaaatcagggaggagacttaaagatatcttaataaaagtattttctcttcagtgccttttaaaaaatgtcattgcatcaggattagtaagaatatctggatgcaaggacaccaggttgcaagtacactaaagaatggtaaggtcagagaagtgttttttctgcctttaaagttcctgaaaatagaggctgggcgtgatgactcacacctgtaatcccagcattttgggaggccgaggcgggcggattgcctgaggtcaggagttcgagaccagcctgaccaacatggtgaaaccctgtctctactaaaaatacaaaaattagctgggcgaggtagcgcgcgcctgtaatcccagccactcaggaggctgaggcaggagaatggcttgaacctgggaggcataggttgcagtgagcccgagatcccgccactgcactccagcctgggcgacagagcgagactccatctcaaaaaaaagaaaaggaaacagaaaagttcctgaaaatataaagttgtttagacatacagcaggtatatcgtttcaaaaccaaatacactaaagcagatgagaacacaaccgtgaccaagtggttcggagaaagatggattttaatgcaaagttgttttgttttcacgcataacgtacttctcgctgtgcttgagtgcagaaaggtgtggttcttcctaaggttgattacataaagcaagattccaaaaacaagaaaagtgctttgcaaacacagtaactaggactggctgaagcttcctgcgtccagtgccatgctcaaagatcagaacaagcaactttatccaccactttaataagatgattcaaaaaagctgcagtcttctgaagaaagccatggttgaaaacttgctccgcttcttggagaaagcctaaagccctaaaggtctctaattattctccaaagtctacaacccaagctgcattttatgcatttattaggttacaaaaccacgggaactcttcactcaaaagcaaaaacacatccggaaagaggaaaaaatccacggccaatgtaaaccccctacaacaccaaccgcccacgtcgtaccccaggctgcaatgaggccggcactcacccaccgctcgcccgggaagcccagacccaggtgtttcaaaatcagaagtacggcaggctcgttcgctctcacgggcaagaatcttaaaccccaacttcagagatacccgcgcacgctgggcgctgccattttgacagaaagcgggcctgccccagaggcccctacgcaggtcgccctgagcagagccggagtgccacagaacccctagctcatcacctccacacccagacgtcgcatcccccggcctgaggaatgccaagaaaccccaccctgccgaccaggatcaggcgaaatcaagtcacccttgaaatcccgcaaactctctcaggcagcgccgagggcgaccgcagccggcgtgggaggggcatcggcggtcaggggcggggcgtcggtgcggcggccttcggtaacccgggcaacgcggcctcctggatgtaggaaggggcgctgcccccgaaacacaaatgtctccgccaagaccccagacggttcccaaaggctctccgtgatgcaactgcacgtccctcgaatgcctgggcctccgatatccgtccgccaggagcttggctggatgcacgggcggccagtcctcttatttccccgccctcccgccgcgtggagcggctgctgggtcccgagcctccgggcgggggcgggatcggggcggggcggaggcatctccctcccagcaccgcccccttagctgccccgagccctgcctgcgcccgcccccgaagcggcgcgggacgcctggcgccgtccgcgatccgcagggctgcccgcttaggcttaggcccggcccgctggcaaagccgagccgcagcattttatttcgttcgtggtttccgcacaggctggagtttcgtgggttgggtcgtacttgggacctcggcgaagaggacccgtttatttttttttctttcca

SEQ ID NO: 35316 - DNA, 2300 bp, Homo sapien
gagcgtttttcaaaggaattctcagattctcttatacgttgtcaaattctccagccatcggtctgtttccttcacctcttatataactcaattttaaaaagacaaaagtcattctaatcaatcatcagttcggccatcaatttgctctctttgcttagacataatcttgcaattgttatctgtatttaaatttgtagcctgttaaaaataaagcccatgtgagcttaccggtattttccaaattttgacaatcaatgtgtcactttgtaaatagaaaaaaaaaaggtattaacgtatacatggaattggataagacttcagaaagtatctttccaaaaaaactattttctcctatttctgctaggctgaagaactcacctagctagagaaactcactcccaagaggttctagctggttttgctaaaacttttattatctttactgcttattaagtcactgatatctgttctccatggttggataagttttatctgtcaacatgggatgatttacttatgctgcttcttgcaaacagggccctaataaatgaatgtcttccacattgtatttttagaaatgagcattttattataaaaatgatgtatgttcatagtaaaaaatttaaattgtatgcatatgaactgcaaagtagataataccctcaattccagtcctcagtagataattgttaatgatttcctttctatctttatagatatttcctatgcacaaaggtttacatgttcatacaaacaaaaaatggaataatttatagaatattttataccttagttctttcaatacatctttgttttctttacttaatggtgtatagaatactttataatggctacttgaggggccatacctattgtggaatatttaatttcatatctctactggctacacatgagatccagagcaaaaatataaggaaacaaaacaaaatatatgtgccatgccctataaaaaaaatcttagctgggtgatacttaatgagacaagctgtataaagtgctaaaatataaaacaagattcaaataaaaaataataatggctactagtgtttgctagtacaaacattctacaatttatttaatcagtcttctattgatgaagtttctggcattgcaatgaatattgcagtacccgtatctttgaatacctatattaaaatatttgtggaataaataaatgctgagtcaaagagtgtgtattttcagttttaatatagagttgtaccgatttgcatgtccacagacaatgtagatggagggtacctgttgtcctgcacgcttgacagcactgaacattatccacttctaaaatctttgtcaaacctacagctgaaaatgtcatttgcagcaaataatttgtatttctctaatcatgagtgaggctgagcatcctgtcccatgttcacagcagtctgtatgtctcgtgctcaccgactgttgaagagttttttgttatgttttaaaaaattggccttttatcacagcctggcagtctccttccccacccactagtttgttatacattcctgatccaattttttggtgcggtttgttgagcagaagccttaaatgtttacgtggctaaattaatcactcttttcctttatggcttctgagttccccattaggtttacttttccaagaaaggaagaactgcttctaatttaatctctataatcagctgagagtagttggagaggctgggtccattacttatatatggtgtgaccttctacaagttactcatcctcccagaacttcaatttcctcatctgtaaaattgggataataaaagtgcctttaaaggcttctcgtcaagaccaagtaaaataatgtggttacaactgagtgcacggcacacaggaagtgttcagtaaatggtggctttacttccctgagattttaaacaccatcaccacttaacagctccagcaaatgagtcacagacatgtggcaaattcctgtttctctggaaggcagagaaagcactgggaatgacagcgtaccgcccgtgggccagtccctggcttgctgtggcactgccacaaatgctgctgttgtgtaacttcctaggaagcaggattaattcctagcatggatcttaagtcactctgggatctaagagatgtttcgatcattctgggatttatgcttcttgaaaaggctcaggacaaatggcagtgaaggctacgtggatacacagtttgtgggtaagcacagcgtcatcaccttaactttcatgagaatgaaaagaagaaattgctcaagaaaaaaccagaatt

SEQ ID NO: 35317 - DNA, 2300 bp, Homo sapien
ctggtggtgacaaactctctcagcatttgcttgtctgtaaagtattttatttctcctttgcttatgaagcttagtttggctggatatgaaattctgggttgaaaattcttttctttaagaatgttgaatattggcccccactctcttctggcttgtaaattcttttctttaagaatgttgaatattggcccccactctcttctggcttgtagggtttctgccaagagatctgctgttagtctgatgggcttccctttgagggtaacccaacctttctctctggctgcccttaacattttttccttcatttcagctttggtgaatctgacaattatgtgtcttggagttgctcatctcgaggagtatctttgtggtgttctctgtatttcctgaatctgaacgttggcctgccttgctagattggggaagttctcctggataatatcctgcagagtgttttccaacttggttccattctccctgtcactttcaggtacaccaatcagacgtagatttggtcttttcacataatcccatatttcttggaggctttgctcatttctttttattcttttttctctaaacttcccttctcgcttcatttcattcatttcatcttccatcgctgataccctttcttccagttgatcgcattggctcctgaggcttctgcattcttcacgtagttctcgagccttggttttcagctccatcagctcctttaagcacttctctgtattggttattctagttatacattcttctaaatttttttcaaagttttcaacttctttgcctttggtttgaatgtcctcccgtagctcagagtaatttgatcatctgaagccttcttctctcagctcgtcaaagtcattctccatccagctttgttccgttgctggtgaggaactgcattcctttggaggaggagaggcggtctgctttttagagtttccagtttttctgttctgttttttccccatctttgtggttttatctacttttggtctttgatgatggtgatgtacagatgggtttttggtgtggatgtcctttctgtttgtcagttttccttctaacagacaggacactcagctgcaggtctgttggagtaccctgccgtgtgaggtgtctgtgtgcccctgctggggggtgcctcccagttaggctgctcgggggtcaggggtcagggacccacttgaggaggcagtctgcccgttctcagatctccagctgcgtgctgggagaaccagtgctctcttcaaagctgtcagacagggacatttaagtctgcacaggttactgctgtctttttgtttgtctgtgccctgcccccagaggtggagcctacagaggcaggcaggcctccttgagctgtggtgggctccgcccagttcgagcttcccggctgctttgtttacctaagtaagcctgggcaatggcgggcgcccctcccccagcctcgctgccgccttgcagtttgatctcagactgctgtgctagcaatcagcgagactccgtgggcgtaggaccctccgagccaggtgccggatataatctcgtggtgcgctgtttttttttgttttgtttttttttttgtttgtttttttttgagacggagtctcgctctgtcgcccaggccggactgcggactgcagtggcgcaatctcggctcactgcaagctccgcttcccgggttcacgccattctcctgcctcagcctcccgagtagctgggactacaggcggtgcgccgttttttaagcccgtcggaaaagcgcagtattcgggtgggagtgacccgattttccaggtgccgtccgtcacccctttctttgactcggaaagggaactccctgaccccttgcgcttcccgagtgaggcagtgcctcgccctgcttcggctcgcacacggtgcgcgcacccactgacctgcgcccgctctctggcactccctagtgagatgaacccggtacctcagatggaaatgcagaaatcaccgtcttctgcgtcgctcacgctgggagctgtagaccggagctgttcctattcggccatcttggctcctccaggccaatttactttcaaaaatacctgcatccaggaactctcatgctagcaggatgaggtaatgactatttcccatactcgtgtcaactttgagcaatgctaggaatttccatatgtccaaacaactgtttatcaggaaatgcaacaaggtacttttgacactgagcgtgaaaggaactcattgaaccaaaatcttccaaaaagactggaacataagagagcggatgaaga

SEQ ID NO: 35318 - DNA, 2300 bp, Homo sapien
caccgcagacccggctggtgggcaaatcgagagtgatagggaacttcagaccacatattttaacatgcttaccattgaagaggatgaattcagccaaatttacgtagatatacttttctagatgcatttgcctgctactttacacattggtgtctgcattttatatataggaaagggttaagaagtgtttggaatatgtcatgtcgggtgtttgttatttttgtttgtttgggattggttatggaaggaattatttagtccccattttatgttaaggaatgttgagttgtagttacgctgtcaggggtctttttaaagttcacatttttaccatccagaatgaagaaaagatatagaagagggcactagaaaacccccttctccgacactgggtcagaacattaattaacgtggcctaaaagtgaaagtgaagcaggttattaatagaatggacaacacgggggaaaaaagaaactcctgaaacggaattgttacctcctatcagttcaggctgtggcattctttgcagacaaatccttgcagtattgggggagggggtgctttaggtaattggtttggggcaagaaaggagaatgcataatatgttttttccataagaaatgtgaaggaaacaaggtttggagttctctagaccttaaaatggattctttgcagtggggttttatgcaactgacatgattttgagattttataatgcagaaacattataaagattttagagtgtgtgagtgcaggatattggtgttttcctttagttccaaaaaatgacaatgctttaaatctggttgttttgaatctttgacattagtgaaaagagctgctgtaaataatatttctaatggcagcaaattccttaaatgttggaaataagtgaatgtggcattttgcaataaacctttgaatttttagagagcaggagagagagttgtttttgagatagaaattttaatcggacaagatttgggactctgttttcccggtaggaaataaccttactttgagaggtttggagggaaaaaaaagacggtggtcgtgcctgagggacgcgttttgaacacattaacctcggtccaaaaatgactatttgttgactgtggaattgaaattgaacgtatttgttccctaatgtctgccctttcctgcaacagaacctcggtctttattaattcacggctgggagctgtcccaaatcattgacatttggcaagaaaagtgggggttgggaggggcggggaggtagaagagtgtggtgaacacgaaagaagacgcagcaggaggaagttcggaatgaatgagaggtcgaacgaatgaatgaacggatggaaaccgcacaagaaggggacggcagagaggacagggaaggagccagggtcacccgctagagtctcgcctaagcggggttcaggaaggacagcgagggacccacgggctgcgacctgctgggacgcgtgcgcctgcaaaatccgtcccgcgcgcagcctcccggcctcccagagaaggctagagtccaaggagtcacagttttaaaagacagaaatgttcacgacttattttacacagcacacactcacacatgcgcggtgtgcagggtcttctccagcagcgcctgggaagataacgtgacaagagcgctcccgcccccggcgagccccaattccccttaaaaaatgtcaatgcattttaggggcttctttcgccactgagttttgggggtgtaggcaaggggtggggagagacgtggacggggagattggactttattttatttcgtttcttctctgcaaagctgtatttgtgacatgcgttatagaggaagatgtgtggagtgtatttccattttgaacgagctctatcagaacaaagattcgtttattcttaagattttacgtcagtgttcgatttgttagtattgtagtcgcaagggtatttaatgttcgctgtaaggtgaactcggaggtttgagaaggtttacgtatctgccccagcggaggtcgaagttaacctcggtcccttccccagtgcttcccgttccggattaaaaagcgcaaggcccgcctcgctcttcctgcagcaatttgcaaacgggtacgctctcggaagctgctacgggttcggtcaccttcctcttcggcgtctggcccggcgctcgcggacaggcgcccgcgttgggggccgggggattgaggtgtccggtcctcccgggacacattcacacacaagcgcagccgccagaaagctgccgaggaccaggccggcgcccagggtcgtgggcgccagtg

SEQ ID NO: 35319 - DNA, 2300 bp, Homo sapien
gagccgtgggccgggccgcgtggcaacccccctgaggccccgcccctcggaaagcctcccgccctgccattggaagacgtcgggggagggtccgagaaacgcccccctctcgccaccagcccccgccccaccccttgtccgcccacgttttcggttcttcccggagcctccgagctcggggaaaggaaacacccggggccgccaccgtgcccctggacaccggaaggcgagcccccaaccgccccgcccgcaggccggtgacataaccaggggcggggagacatgactccgcccccagggccaggaaggctgcatgggagtctgaggctcccgcgggacgtgagttaggggccgcacattgcagacacctcacgtcaccaagtgctgcagtaggacccccgcagcttcccctcggccccctaccctccacagcctgtcctacccccgttattttgcacctttctccccctttgtctatgcatctccaaatatctgagtatggggacggcaagattggccctagagggcaagctgcctgtagaagcaaattcaacgcttctccttaatccgtgtgcatttctacagtttgacagcttgacgtcctctagtgtagtttggcaaaatttggggggtcgttttcatttttttctctccacaggcttaaggattaaagctggccaatgccttctttagcattttattaaagacgctacaatttagactttttttttttctgtttggtgcagaagaaaggaagaaaaccagagcttaaaggcgtttagaaaggaaatagccctgttagtttttcggttttgactcaagctgtcgtcgatagcagcttgcacctagcacaaagccagctgcagaagtattttgttgcagggtaggctacacctacacagggtctgtgcctgagcatcaaaagacagtgcaggtgtgtgtgggtccgggtgtgcgtgtgcgtacgtgatgtacgtgtgtgcgtgtgggtacgtgtgtgtgtagcccaacaaataagcccaagaggcgcatcaagattagaaagaagtccgcacaccagcgcttgccttggaaatttcctaaagcgctgagagttggttggtaaatcactagtatccgaaaactgtcttatcagaggctccttccccggtgccctactcgccccctaaaacaggtgtcgctgtgtcccttgaagcggcctttggcccgctggggcatcgcaggtgggtaaaattcagaggacattcggtgtttatttctggggccccacgtgtgcaaaccaaacccccggggcctgggcgtgtgcgcgcgctcgcgtgccttgtgtgcgggcgggcatgggggcgctcggcgcggctggcgggcgtgcgcgcgcgcgtttgtgtgtgtgtgtgtgtgtgtgtgtgtgtgtgctcgtgcggggggccgggctgcgtgctcacgcgctccaggctgcgcccagagctcagctgctgggttggagaaaaagagggtaggcaagcgcagggggcgggcggccgaggagcgctttcgaattaatcgagctagcttagctgtttttccctctcccgctcctttaaacccccctgcatcgtagagagcgggctggattctctgtggtgctgatggaggagggggagcaggttgaaacaatcgagtgggcgcgccaggactccccagctcctggcggggaagggagggggagcccctgttctgcgcagggaggcggcggggctggggggcccccggaacgaggaagaggcaggggtgaccgctagaataggaaagtgctcacccccgggaggcaaaatttcgttcagatcgcacattaattggagatatctgattaattccagcttctgatgactataaatggcgattctctaccaaggtgtctatattaaaaaaaaaatcattccgtgtcatcccccacgtcaggcctgctcgtgggcgtgaggctgtacttcctccgcccccttctaatggagtgaaccattcccagctctcccccccccctcagcctctctctctctctctctttctctctctctctctctttctgtctcttcctcgctccctctctttctctcctccctctgccttcccagtgcataaagtctctgtcgctcccggaacttgttggcaatgcctattttttggctttcccccgcgttctctaaactaactatttaaaggtctgcggtcgcaaatggtttgactaaacgtaggatgggacttaagttgaacggcagatatatttcactgatcctcgcggtgcaaataggtaagtggccgctcag

SEQ ID NO: 35320 - DNA, 2300 bp, Homo sapien
catctatctacccagaaaatcatttatgtagagtaccaactctgtttgcctctctcttcttcacttttaaaaagactcaggcctatgagggaggttgggacgcctggggaggaaaatgaagagaggaaaaagtcagcgggggttccctcccggggtagggcggtgaggcgcagccacgtcccaagggcaagaaccggatcggcccggggcgcggcgcgggcggctgtgcgcacgcgcgtgggttcacccgcttcattgaggccctcagccctgcctactccacatccccagcgccccacgctcagagttacaggggaggggttggagaggatcccagaaaatgatgctgtgaagatcccaggtggataagcaggaggaaggcaaggacgttgagggcaaaaaaccttaagccactcccaagcctgggctctgcacgagtctgagcgaggttgggggcccgcagctggtggcctggtccgggaaagctgggccggccccacgcggaaccccgagcgaggggcggagccgtgggccgggccgcgtggcaacccccctgaggccccgcccctcggaaagcctcccgccctgccattggaagacgtcgggggagggtccgagaaacgcccccctctcgccaccagcccccgccccaccccttgtccgcccacgttttcggttcttcccggagcctccgagctcggggaaaggaaacacccggggccgccaccgtgcccctggacaccggaaggcgagcccccaaccgccccgcccgcaggccggtgacataaccaggggcggggagacatgactccgcccccagggccaggaaggctgcatgggagtctgaggctcccgcgggacgtgagttaggggccgcacattgcagacacctcacgtcaccaagtgctgcagtaggacccccgcagcttcccctcggccccctaccctccacagcctgtcctacccccgttattttgcacctttctccccctttgtctatgcatctccaaatatctgagtatggggacggcaagattggccctagagggcaagctgcctgtagaagcaaattcaacgcttctccttaatccgtgtgcatttctacagtttgacagcttgacgtcctctagtgtagtttggcaaaatttggggggtcgttttcatttttttctctccacaggcttaaggattaaagctggccaatgccttctttagcattttattaaagacgctacaatttagactttttttttttctgtttggtgcagaagaaaggaagaaaaccagagcttaaaggcgtttagaaaggaaatagccctgttagtttttcggttttgactcaagctgtcgtcgatagcagcttgcacctagcacaaagccagctgcagaagtattttgttgcagggtaggctacacctacacagggtctgtgcctgagcatcaaaagacagtgcaggtgtgtgtgggtccgggtgtgcgtgtgcgtacgtgatgtacgtgtgtgcgtgtgggtacgtgtgtgtgtagcccaacaaataagcccaagaggcgcatcaagattagaaagaagtccgcacaccagcgcttgccttggaaatttcctaaagcgctgagagttggttggtaaatcactagtatccgaaaactgtcttatcagaggctccttccccggtgccctactcgccccctaaaacaggtgtcgctgtgtcccttgaagcggcctttggcccgctggggcatcgcaggtgggtaaaattcagaggacattcggtgtttatttctggggccccacgtgtgcaaaccaaacccccggggcctgggcgtgtgcgcgcgctcgcgtgccttgtgtgcgggcgggcatgggggcgctcggcgcggctggcgggcgtgcgcgcgcgcgtttgtgtgtgtgtgtgtgtgtgtgtgtgtgtgtgctcgtgcggggggccgggctgcgtgctcacgcgctccaggctgcgcccagagctcagctgctgggttggagaaaaagagggtaggcaagcgcagggggcgggcggccgaggagcgctttcgaattaatcgagctagcttagctgtttttccctctcccgctcctttaaacccccctgcatcgtagagagcgggctggattctctgtggtgctgatggaggagggggagcaggttgaaacaatcgagtgggcgcgccaggactccccagctcctggcggggaagggagggggagcccctgttctgcgcagggaggcggcggggctggggggcccccggaacgaggaagaggcaggggtgaccgctag

SEQ ID NO: 35321 - DNA, 2300 bp, Homo sapien
acatgtaaatttgtacagctgttatggaaagcagtatggaggttgctcaaaaaataaaaatagaagtaacatatgatccagcaatttcacttctgggtatatatccaaaggaaataaaataagcctctcaaaatactctcaagtttattgcagcatcaatcacaatagccaagatatggaacctatctaagtgtctaccaagagatgaattggtaaagaaaatgtggtgtgcctgtgtgtctgtctgtgtgtgtgtgtgtgtgtgtgtgtgcatatataatggaatattatactgccttaaaagggaagagaatcctgccatttgtgacaacatggttgaaccaggaggacattgcgctaagtgaaatgagtcaaatacatcatgttctcatttatatgtgacctctatgaggtcgaactcatagaagcagacagtagaatggtgtttggcaggggcttctgtggaagggaatggggtgaccatgttggtcaaaatgtacaaaatttcagttatgcaagatgagtaagttctggaggcctaatgtacagcatggtgagtatagttaataatattatattgtcttcttggcatttgctaagagtagatcttaaatgctctcaccacaaaaaaggtaaccatgtgaagtgatgaatatgttaattagcttgattggggtaaataattttataatgtgtacctacatcaaaacattgcatcatacacaataaatacatacagttttcatcaatcattcctcaataaagctggggaaaaataaaataaaattagagctcaaaaaaatgagaaggtctaatatgtgtgtaattggaaaagaagcaataattgaagagatagtggcattaaaccagtgattcaaaatgtcttaaggaccccaaacagataaattattttaaaaaattcacaccagccagatgcagtggctccacctgtaatcccagctacttggtagtctgaagcaggaggattgcttgagttcaggagttcgaggatgcagtgagctatgatccagtgcactgcagcctgggtgacagagtaagacctcatttctaaaataaaaaaaaaaaacttaattaaaaagtgttccacatcaagtacatcatgataaaatagctgaaaaccaaaaatgaaaaatgtaaatgtagcaaaagaataaagattaattgtcttcaaaagaataacaattagaaatgataactgacttctcgacagaaaaaaaaaaaaaaaacagaaaccaacagacaatgagatactttttaagtgctgaaagaaactgacaacctagaatcaagtaccatgaaggatatttgaggaaaatataattcaaggataacagtaaaacaaagccacatttgtacaaacaacctgttacttgaaagccttcactagataaaaagggacccggatggaagctttgcgatgcaagaaggaatgaacaaaaaaaatggtaaatatgtcgataaatatgtagataaatacgaataaatactaaatgtataaaacaataataacaacaccccgttaggtcttaaatgtacaaagaagtaaaacacacaaaaaatgatagtatataaacctgaacagacagcaaatgaagttatagtttaaaaaattattgcattttccaacaacaggataatacatactagactctgataaatttaaaacatatgctgtaatttatagggtacctcaaccctagtaaaagggtatgtaactagagggaggagatggaataataaaagataatcaatccaaaaacaagcaatggaaaagataaaaagaaacatagaacagacgagacaaatagaaagcacatgatgagatggtagattcaaacccaaatatattggtagttagatataaatgcactaagtgttacaattcaaaggcaaagattgtctgacggtttttgtttgtttgtttgtttttaagacagagtctcactctgtcacctaggttggagtgcagtagcacaatcttggctcactgtaacctccaccttctggcttcaagagattctcgtgtctcagcctcctgagtagctgagattacaggcatgtgccaccacatccagctaatttttgtatttttagtagagatggggttttgccatgttggccaggctggtctcgaactcttgacctcaagtgatcctcctgcctgacatcccgaagtgctaggattacaggcatgacccactgcatttggccctgactgaattttttttgaaggatgtgctgtttgcaagaaatatctaaaataaaagaatacagatggt

SEQ ID NO: 35322 - DNA, 2300 bp, Homo sapien
tattatagcaggtggtctcatattcatttttccacatttctcaatgcccctgagcaattagagatcagaacataatgaacaatctttccctctccagtttcccctctggtttttaatccacccaacatccaatctgtagaggaaagcatatgagaacagaattattctcttcagtgtcatgcatcatttttcagaggcatttgcctctctagacccagacgatattacaattaattcagtgaatatttttaaaaatacatttatttcagtatgtcttcatcactggtaatgattttcattcacaagtcatttctacagccttggagaaacattaagctcaagttggggtgtcctttctgcctgctcattaataaagaatttttacctagctaacattttttaaatcaaaaacaaagggaggggttggaggctggagggaggtcatttaaaaaaatgattacaaaacctatttgttttagctcaaagtctcaacagtctaagacttggtgatctaaatttaaaaaaaaaaagtcatgagttttgttttgttttattttcccatagtatcaaacaggataagattattttcttagccatttaaatataacccagggaagaaggaatacatatttcttgggagcaatgaaaatcaaaagtatagtcccctagaagcactggtctctgaagttccagatagaagccggaacttcatggtaggttaaaggttggaggtcatcccatccctcgaggctcccaaaccaagacaaggtaaaagatgcccaacagaggcaaccactcttgtgaaatgattttagaagacagaaaggacccaagttctccccatgcctacaatttcactatcccagtgtaattccttccggctcacaacaagataaaatagtgaacaccttacatccgttcgtgtctttggcataaaaaggttatccaatctatgcctgaaaacaggctttggcggtaaatcaagaaaaggcagaaacacacagtggggaagtcacaacgagagtaaacctgaagatggaaattgggggaaggaggaacaggtgccctaaagtcaagcctcactttcttgaaattatgagtaaggcagagtcttgaccaagtcgtgtctgggataatgtgaattagtgttcagccagaaacagaatgagagtggcaatcgttttattgataagaccctgggtgaacagggctgaaaatcaagaaaggaaaatgggaacgggaggcccgtggcagctgccactgttgtttggggcattaagatcaagtcctttaaggagggggacccttgaatctctaccagactccagtttggacttccaaggttgttctgttgaaggaggtgggtagtctttggttaaaaatgctaaactattctgaaggagaaaataaaaaggcaagccaagtcattaatcttaaaattgtcagctgaattattttcaatgagccctgatgtctggtgtcctgggaggcagggagggcatttggattaagtttaatcagtaggtacatatggcaagaaaggtattcagataatttgttatctattaaaatgaactaaaatgaatctgtggtgtcacccaccaatgcatgtcacaggagcaaattctggccaagacagcaaattccaccaaggacctactctgtaaattcctaacttcctattagtgggtttttaaaattgtattttcgggaacatagtcccattcatgggactaaaataatactacgttgatgatcaaacgcttagaaacgaaacaattagaaccctgttgggattctactctagttggcttcacctgacaccagctgcaattctgaaggatcacacagcaagatttctctctaccgcccccatggggttgaatgaccacccttttccagcatggaacatttgagaataacatgtccaaagggcttttcatgttgggtcaggaagaaagtcccctacaagaagggttttttcactctgtgtttattaaatgctggtgatgtgtttagctgtggtctgtcctttcctgtagttttacgatgccttggaataccagcaagaattgttaccaattatttctctgcccatgataatgatgccaatttgcaaatggacatcttcctggaagaagatgggaacgtgaattccaaactcaccaaggattcagtgtggtgagtttgattgacaatggcattggctgatgtcacattatagtaatgttacacatttaccacaagatagactcaatctgatgtttctgttctattttgaggaccattcaacagcacag

SEQ ID NO: 35323 - DNA, 2300 bp, Homo sapien
gctttgtgcaaataatttgatttcggattttagccctgaaatgctcattctgactgcactgtagagaatggactggaaaggggtacatacacgggtagattcaagggctgtttaagaggtaggatagaaaatatttgctcaaggatcggatttgatgattgagggagagaaacaaggaagcctcaagaatgatgcccatgtgtctggtgtaccacctgcgtgcaaagtgatggtattcattgaggtagggaactcctgagatgcaccaggttttccaggaaagtgatacatctcatgttagacatgatgagcgtgtgttgtcactgggatgtgacaaatgaggatagccagtaggcacttagatacgggaatctgcaattctggaaaagatcttggctaaagacccagatttgggaggtgtcaggatatagatggaatttgaaaactatgggagttcctcagacaatcaaggaatattgcgctgcactggaggaaaccacagagtgttcaatgtcaaggaggcctaggaaaaataccttcaaagacagagttcaatgcttccaaaaggtcaggtaaataagaactgaatcctgtcttttggcctgagcacaggccttggagaccgtgacctccactttcagtagaatgatgaggcggaagccagatggcagatacttagtgatgaaggggaggagaggaggagtaacagcaggagtggggacataggttgggggaggtttttaaaaaaatactgaagagacctgaaattgcatgaatgctgagaagacccactattagcaagcaggagcttgaagctgcaagaggaagagtacgtaagagtcacagcaaagccccggagaacaaggcaacgcagaagcctggtttggagatgcagagggaggagggacctttccaacttcagtaacaagaagaaagaggaaaagatagataaggttgcaggcaggttcatagattggtagcagaaaattgagagaatttctaaccaatggcatctttttttttcttctttataacattgggagattgagtggcagggtcagaaatttgaagacagtaaagaaggttagaaatagccatgtttgactgggtgcggtggctcacgcctgtaatcccaacactttgggaagccaaggagggtggatcacctgaggtcagaagttcgagaccagcctggccaacatggtaaagccccatctctactaaaaatacaaaaattaggcgggcatggtggcatgcacctgtagttccagctacttgggaggctgaggcagaagaatcacttgaacccgggaggtggaggttgcactccagcctttgcaacagagcaagacttcatctgaaagatagaaagatgaaagaaagaaagaaagaaagagtaaaagaaaaaaattaaaattttagggggaaaattttctaatttttgaacatgcactaaaatgattttcagagaaaaccaagtgttattttctaatctgcatggcattattaaagatgtttactcatcttccttggggctaggcatcccattcctgcaggaagtcttgtggttaggcggtggctgtggctctgggatgattcaggaatgcagaccatgccttatttgcacaggagggacacgttgctctcactgcatgcatggtcacaactgtctgtgtgacctgtctgtgggagggcagacccccctcctgccaagccacagtagcagctgacctgccaggcaaaagcattcctttgtaaaggaaaccctcccagaccctctgaccaaaggggacgggtggggacttcctggcactgcagggccccttgcctggtactcccagcaactggttgcggtggggagggcagatctagggatggggatggggaggagaagtgggaatgggaaattgggagtcagaggggcaagtgggagagaagggcgcacctgccgggataacaggccagatgaagtaaatagaaaatcctctgagctcccctactggctccagctgtggagaagggggaggagaaaaccctgtgggacaggggaggagggtgagggctcctcttaggaagttatttaagagccaactgtcttgtctttcccgagtccgtttgaggaagtccccgaggcgcacagagcaagcccacgcgagggcacctctggaggggagcgcctgcaggtaagccaccgaccctgcaccctatgagccagggcccgctgcgtccaccttctgcacctcggtttcctggttgaaccagcaagcggcttgctctgggccctgtggcgccggtcacag

SEQ ID NO: 35324 - DNA, 2300 bp, Homo sapien
tgttgaaatcctaagcctcaaggtgatggtattaggaggaaaggcctttgggaggtgattaggtcataagaatggagctctcatacatgggattagtgcctttataaaagaggcctaagagaaacccttcgccccttccaccatgtgagggcacagccagaaggcaccatttgtgaaccagaggcccctcaccagacactgaatcttctagcaccttaatctccaactttggacctccaccctccaaaatggtgagaaataaatgcttgtcatttaagccacccagtctaaggtatttgttatggcagccagaacatactaagaccatttccctgccacagctgcccacagctctctgctaggttttctgctccctgccctgcactcctggactcctcctccagtgtcaatcatgacgcactttgcagggaaggaagttctcaccctcaattgctctcctcactcacatatgttcagagctctctttacaactgctggagcactcacatatcccaagggaaagcttctgtgttccatcctggaccttctaggggctaccacgcttccaccagggccgctgctctcaccataagcttcagactctcatctcccgagatcttgctcacagcgcagctgccttccgctcacacaggccagaggggccaccttgtctcttcttagagcaacttcccaccactcccttggggctcaaccttcgctttatgttctgtaaaagccagcagttctcaaacttgagactgcatcaggcacacctggagggcttgtgaaaatccagaatggtgagtcccgccccccagagtttctgatttaataggtcttgagtagcccagaatttgcatctctaacaagcccccagtggaagctgaggctgtcatcttcccaggccgcactttgagaactgctgttgaaagccatcatcactgaacttatttgcagaggtacctaaaaataatcaatccacaactgttccttctccaaatgaccactctctgatgtctatcaagaaatccaaattatttaccaattaatttattggtaattatgttccacctatttcaaaaaaagttttgagctaactctaatttttgcttagccatcagcagaaatagtaaatttacctagtgcattcagaaaaatgctgttcctcccagggaaaatagtgttttctattgctcctgaaatctgctgaccttggcactgactctggtcctcttacattaaggtgaagctggggcggggttgaggaatcaagactgagaaaccttgctgtcctgcagcagaatagagatacatggaagaaggaagacagaatcttggctttgaagagaaagtgagatgtgatgtcaatgatcccactaacaccaaaaccagcaaaccagcctccttaagggtggccccacctccccacccttcctactttttctaccaagccaaacccagaaatagaacacggctcacttctcagggctattgcctctgcctcatctccagagaccacatctgcagctcccaaaacaaggtctgttctgcagctggacaattcactgctaaaatcccaaacctaagagcagagccaaagccagaggagaggaaagtgacaatagggccaaagcctcattccagattccaaatgtcattctgtagccctcgtgctatcaactgctgcctgctggctgcagccaggtccctgggtccatacacagcctgcatcaagagcctgcagagactcgggggctggagatgggaaacagatggtggcctgcgctttgtctttcccaagtttacagcctcacctgggggtggaggctgttctgaggggcccccaagaggtaagttcacgcatcactactgaccctctccctgtgaaagcagaaagtcagcacgcatcctaccccagaccagaccagccacacctgtagattcaaggtcctgggggaacagtattcaaatgcctctgctctcagccttttacttctgactgtggttcccagcgagtctaaaatttgagaagtgaaactgaacatccaactgccttggtgaggggagaggaagaaattttacaggctttttattggccggttatttttctgtgtgtcccatacaggcccccaccatgaagggtttcacagccactctcttcctctggactctgatttttcccagctgcagtggaggcggcggtgggaaagcctggcccacacacgtggtctgtagcgacagcggcttggaagtgctctaccagagttgcggtaagcccttgcagtacacccatgtgtgtt

SEQ ID NO: 35325 - DNA, 2300 bp, Homo sapien
acatgaattgctacatttattcaaaagcatattgcccaacactttttaaaataagcccatgatattttcatcagctcccccccgtgtcttcaaagccaacatcatgttcactctgacaacagggggcctccatccatggaataaacagggtcttgctagttgggttatatctttacttgttaatgtttttatcatagaaaatgtttatcattgcctgaatttttttagttcctgaacgtttggccttaaaattgctcatggattgcatagcggatttaataaagtatctattattattatcaaaacagagggagatacaaaagttaggagagcttgagtagacattaatacttaggctcaaaatattttctaaaaagattttcaaagttaagacctgcctttctaattccattttatcccatcccatcccaacccatcccatcccatcccatcccatcccatcccatttaatgtaatgcttcctcctccaaatattccactatgtacaaggtattgtgttagatatgataggggctataaagataatattttctgcatacaacttctgctcattcacaaagctccaatggcttatctatgcctcagaatacagtccagaaatgagcgactggctccaacttccatcctccacatcacaaatccatccttcattccttgaggccagagtggcaacatacacaccagcacattcccaccatgtttgatttgcttgtgtgctttctcccatttgcaatggtcttagtctttttggccattatctaaatcctcaggtcttgctcattcccatcttctttgtgaaggcttccctgcccccatatattctcttgcttccttgaactcttaaaacagcgatgtctggcattcttggtaaagtgtacaaacatgtatcactctgcactttgctacgtggcttatcctgcaacactgaatctaaacatgagatttcttaaaggccagagctggtttcttgttttgttttgtttgttttgctttccatttccttttcctttatgtttcccactggactggagataggagagctatttttaacagagggtttaccttgtactaatagctgagccttgtactttaggagtgttttccatttaattctctaggttccccaacacctagcagagagcctcacagcctcacagtctgatccacagtaagcactccataaatgtacatgttgagtgaatggatgggccatatattggggctgtttctcagctccaaatccagccctctttcctctgctttttcactgggctctcggtaatcatgtttctccttcactgtctgccagtcaaggtagcagagagatggaggctggagtcgaagaagggacttgctccttcgtgagtacttgctgggagtgtcactggtgatggcccatcatgttggcagtggcagttggttccagtttccagctctcttgcaccttcccagcttcagctgagactcagctctgcggggccctaagctactgcagtaacagcacatcagaagctgtcaccctttccttagcagcctgtgtctcagctccacagggtccttctgtcaagcatccagtttctaatccccacaacctctgccttttgctctcccagccttcaggggtcctttctttgctcttttggttctccagcaactggttctctaaccaacttcctatatcaaattctctctgttaaaataactgatatggtcttcgttttcctgacagcacccagacctgcagaataaacaataatctgaagagataggtatgatttacctcattttactgttacgaaaatatagactcggagatgttgtattaacttatctagatccccacactagaaagtgtcagagtcaagattcaaagccagagttaaaaccaaacaaacaaacaaattgctcccgggtattgtgcagtgaaactcacaaagtagaacctcaactacatatgttacttatttgatttgtaagattgcccagaatattttgtgtgcaggcatatggcatctggtagttctgtttcataactgatttccatttcagcttagctatgagctcacatttgccaatgtagtgttccagacagttttatcatccacattgctgacctggaagatgcatcattgtctatgatatctgcaatggaaatgatcactaggcaatttcagccttgcaaatctaacgtaagtacacttttgtttgatcaaaacccctttggtccagtcactaattttcctaagggtgggaaagagcccttttgtcttatgctcatt

SEQ ID NO: 35326 - DNA, 2300 bp, Homo sapien
gcgcccgctaccacgcccggctaattttttttgtatttttagtagagacggggtttcactgtgttagccaggatggtctcgatctcctgacctcgtgatccgcccgcctcggcctcccaaagtgctgggattacaggcgtgagccaccgcgcccggcccctaatatgcttttaatttttttttaaatgtctccagaagtcagcgggtgtcaactgcatacgagcttcccaaagactcaaaactcagtttaaaaaaaaaatgtgagtttccctttatctgttcagaaaagagcgtggtgggggtgggcggccctcagtgcctgttctcctggggagatggtcttcggtaagtggagctcccttagagtcctaatctgtctcctgatttgggctttcacgattgacacacatgcagctttagccttgtctcctgctcacagggaaaattctgctcatcttgctgctcagctgcagggtggttctgggagcagctgtccctcggggagatgggtgaggccgtatgaatgccagcgatggagagatagcgaactgtgtggtggagggagaaactgttaacgtgcaggagggcgccgccttcagtggtgcaagaagttttcaactgtccttgtctttcaaaagacactgtctcaacagagtgtcagcaacttctgaagccatttcaggctgtatttgttaatgacattttagaattcttcctgggtgggctctgcccagcttctggtggtttaaatattagaaatcagactgatgttggtgctgggaggagaaggaattatggaaagacaacatgaagggaagttcaggatttgtggcaagtcttgcccagggatttgaggcaagctgtgtaggatctggttcaatcgttctgtctcatacgggggatatgatggctaccattccttggaatatatgcattttcagcattagtacccaggattttttttcccctgctcttagagtgtgttgttaaaagttagtcgtagtgatggttttattttaaaaattcaaggttttttttgtagagatgaggtctccttatgatgcccaggctggtcttgtcctgggctcaagcagtcttcccacctcagcctcccaaagtgctggaactacaggtgtgagccactgcacccagcttcgtttttatgttattaattgaagagtatattttccccccactaaagtggtaattttccagactacctttaaagaagaataaaacaccttcctcttccaggcagctaaatctaaatcttgtattctcttttaaagcaactccttagccaaagacgtggcaactgcgggtgaagtatctctgggcaggaaatcaatgcagaaatgcaactggggagagggggcttgggggccagttccagggagattggaactgctgtgttctcatcagcagaagtggcccctgcccacccccatcctaatcccttctcatgtgggagaaggtctgtgagccctctccctaccaggcaggttctatggcaatgtgggcacataccctggggcaggggccgagggacttaactcacttcatgagcgccaatggaggagcgaagggaatgcctgatgaaaacaacattctaccagtatgcactgttttctaacctacagagtgcctctgtgttcactgtcccatttgagaattctaagtagaattctgaacaggctggagcagattgcccaccccaagggacagatgttggctggtactgttggtattcatggaagattccttctgacactccctccttctttgtaattgccatgaactggagcactgggccaatataaatcatccaagggtgaacacgctgcacatggacggctcctctttgtttttgaagggattccatctctattttgccatgtgctccttcaccccactccccacccccgtctttcatttctttctctggaaaagatacttcaactcacaggactgcgatgttgaaacggacacccaagagcatcacagatgggccaggcctggacctctcgggacaacattcctcacgacttttagatagaagagattagagatttgggactggtggcaactggtaacgttttcagtgtttggtaaacagccagggtccggagctctgggaacagcctgatttagctctttgtttaagttttgtgttagaggctcccaagaagctgatgcaggggaaagaaattaacaaccatggctcattcacagccaggcagccaaatggacagctctataagactcaagccgacagcggagagagtgcaaccaaacagcct

SEQ ID NO: 35327 - DNA, 2300 bp, Homo sapien
tggtcgacagctatgaatctagtccagctctttcattttcactgtgagcaaatgaggcttggaatgagggaagagggactagaccactgcgtgcagagctgcacacatagctagtgacaggagccaggatggaaactctttgcagatgccccctcgataccttgcagagatggcctggtccctctaagaagctatgtttttggcttgatggagagattgaactacagaaaccaactctctatggtggctgctcatctgggaaaagaaagggacaaaatctacacttactgagtgactactgtgtcacaggcatggaaaatacattcactcattcagagcaggtgtgtggagcacctcctgcatagcagatgctgccctgcctgtcatgggtactctttaagcctcacaagcctgcaggggaagctatcacgtgctccagagctgaaggctctcagggttatgcagctggctcatcagtggcagacccacatctgaactgacaccctttgaactccaaatctgctgtgccacatcacatcctaatatgctttttttttttttttttttttttttttgagacggagtctcgctctgtcgcccaggctggagtgcagtggcgcgatctcggctcactgcaagctccgcctcccgggttcacgccattctcctgcctcagcctcccgagtagctgggactacaggcgcccgctaccacgcccggctaattttttttgtatttttagtagagacggggtttcactgtgttagccaggatggtctcgatctcctgacctcgtgatccgcccgcctcggcctcccaaagtgctgggattacaggcgtgagccaccgcgcccggcccctaatatgcttttaatttttttttaaatgtctccagaagtcagcgggtgtcaactgcatacgagcttcccaaagactcaaaactcagtttaaaaaaaaaatgtgagtttccctttatctgttcagaaaagagcgtggtgggggtgggcggccctcagtgcctgttctcctggggagatggtcttcggtaagtggagctcccttagagtcctaatctgtctcctgatttgggctttcacgattgacacacatgcagctttagccttgtctcctgctcacagggaaaattctgctcatcttgctgctcagctgcagggtggttctgggagcagctgtccctcggggagatgggtgaggccgtatgaatgccagcgatggagagatagcgaactgtgtggtggagggagaaactgttaacgtgcaggagggcgccgccttcagtggtgcaagaagttttcaactgtccttgtctttcaaaagacactgtctcaacagagtgtcagcaacttctgaagccatttcaggctgtatttgttaatgacattttagaattcttcctgggtgggctctgcccagcttctggtggtttaaatattagaaatcagactgatgttggtgctgggaggagaaggaattatggaaagacaacatgaagggaagttcaggatttgtggcaagtcttgcccagggatttgaggcaagctgtgtaggatctggttcaatcgttctgtctcatacgggggatatgatggctaccattccttggaatatatgcattttcagcattagtacccaggattttttttcccctgctcttagagtgtgttgttaaaagttagtcgtagtgatggttttattttaaaaattcaaggttttttttgtagagatgaggtctccttatgatgcccaggctggtcttgtcctgggctcaagcagtcttcccacctcagcctcccaaagtgctggaactacaggtgtgagccactgcacccagcttcgtttttatgttattaattgaagagtatattttccccccactaaagtggtaattttccagactacctttaaagaagaataaaacaccttcctcttccaggcagctaaatctaaatcttgtattctcttttaaagcaactccttagccaaagacgtggcaactgcgggtgaagtatctctgggcaggaaatcaatgcagaaatgcaactggggagagggggcttgggggccagttccagggagattggaactgctgtgttctcatcagcagaagtggcccctgcccacccccatcctaatcccttctcatgtgggagaaggtctgtgagccctctccctaccaggcaggttctatggcaatgtgggcacataccctggggcaggggccgagggacttaactcacttcatgagcgccaatggaggagcgaagggaatgcctgatgaa

SEQ ID NO: 35328 - DNA, 2300 bp, Homo sapien
ctgctgagctgaagtcctactgttgggtaccattttccccaggaccccacggcattcagatcttgccggcttcctccagccactgctagaagaacattagcagcgaatcatggaatgtcagggattcaaagtagaggccctctggttacatccttttgttttaaacatcacatataagcccagggccctctgtttacttttgattttacccaaatagaaccaactagggagcagatgtgtgcagctcagcaggaatccagctttggggaaatactgaggtctccagacttgggactggctttgtgtgaaatgcttggttaggggaaaggggctccctgctgaacaagactggaaaaacatctcccaaaggcaccttgtggcatctgtaagctgtgggttgcaggggtgctcataaaacaaaactcaagatagaaaatacacatatttcagacccagctctgtccccttgaagccagcactaacagccagcttgaccctttttcctgacaatcccttacaatgtgggagccagggttcccacagggcctgaagaggacatgcccggggctcctatagccttagagagctgctcacacgatctggggctggatgagcaccatcaggcttatggagagagactaggccaaaagttcaggccagttctgttgaaagagagaacactttaaaaaaaaaaattgtgtttcttcagaatttgctcaggattatcagaaaagagagaaggaaaaaaaaaaactttcatcctctacagttgagcagggaagggatggggaaagactcatttcctaatgacagccttttgtaactgaagatctaaataaggtaaaaaataaaaatgcttctccatttctacaagaagtggccagccaggaaagggacttcttgtctaaccctcctgtgaaaatgaggctcattcagtcagatttcaacccagccttctccactttctgcctccatcacccttccgggggcagaatttagcagtggtctgccaccccgagcagccgctcccacaggaactgcctcattaagctctgtgaccagtaactcccaacttaggaaaagctcaagaaggaccactctgctttgtttgcacttttccaagaacccttactacataaaacgttctaaacttgggaacactaacttttgcactgtttcccaccgagccacagagctcgcaccagcatcacgctctccctttgccaggatctgagctcgctggaggaaaatacaagttcctctttcagcttctttccttcacttctggagacaagctttccagctaccaaaacagaacgtttcccaggttttcctcccacacctatgaactttgttccttgattaaatcctagtttcccctctaaacagaactggactatgtccaaccaatgtcttcagtttctgcaaacattaactctgatgttttttttcaagaggtttgtgttcggcttttgagtaggttccggaggctgccagtggaaagtctgaggggggtatcagcagcattttaccccatcccccgcatcccctctggccagcaggacaggaaaaggaagcctgtttgcgtgcacgagcctgctgaccggcctttgccatgcgctgtgctttcctttgtagacacagagggactgcgagggaggatgagcaactccttcctaagctggtagggtacatggctccaagaaacgctcctggtctggagtggaatgtaggaccgttctcctctcacagccagccacacaaagctacctgtcttcggacatctttccccgacgcttgagcaggctgcagggaaaggggcccgcttacccggaggaaggaaaccctccgcagaccctccaggaaggcaggcctggggcgccccttccccggggagcctggaaacccacaaggcaggagccattagagggcagcacgtgcctgtctcataacactgagcagactcgtcttttttttttcttcttccaattacagggtgtttcaaaaagcaaaagtaccgtggctccagcgtcagcagaaaaacaagttagaaagacaggcaggggagggggcgatccctccaactccaaagctgtgccagggagacaccgctcttggggaagttgggctgcagcccccgcacgtgctaggaagataagtgaaggtcccaacacatcctgtccccttagagcccctggggcccagcagccgggcccagcagcccgacccagcgcctagagcccattcgcagacagcgcgctgaggcggcttgggcgccatgccctttgggttactcagct

SEQ ID NO: 35329 - DNA, 2300 bp, Homo sapien
actggaaactggagttccatgacaccgcagcatacttctagggtcttgcacacctggtctggcttcagtaagggaataaaccaagtctagagtgcaattagcgtttgaattagtgacatgaggataaacaggtgattatcccatctaatagctgttgaatggtgttagagatactatcagaccgcttgagcttcaaacgtaggggtttattgacgattaagaaaggactatgggactattggtttaaataaatgaaaatagggtttccaaaatgaagttatttctaagtgctttaaaccaactgattccaacttctaaagttgcttaaaaggtgaagagcagaaatcacatttgtacttccttttgtctgaagcgctcacagtgttaagtatagacattcttacacactttcggttaggtgaagaacacataaaattcagtaactgcattttgcccacggggagaccaagtcagaactctctacagacttccacagaggtcacaatcagacactgaagagacaaaattagaactcagtgttctgggctttagaaggatcagcttctaaaaccaacactttttctctctgaaatctatattgagatttttagagttagcaacaggtgagaacatttttattgatgtttggcttcacagttttaattacctgttttggattagagcttgtgggagtctgcagtctgagttggtggggacctgatggaatatattacagctgctattttcataaaagtttatgcttaactttttttgccttaagttttgggttcgtggatttagggtcaacacaggattacaacggtctaggttttccagaattgccacaaaattcagtaaaactttcactgagccacccttcttggtgaagaagtaaaaccttagcaaaagaaatgctgggaagagtgtgactttgataaatgcaaatatgactttcttccatgtacgtgtgtagcactgaaacaaatttggtctattcctttaaacatatacagtacaaatgtttttcctttcaaacaaatagaaatcattaccctttactgattttagataattcacaaaatgagttctgtttaccaatcaagtaactcatgctggtgtttatatctgagggaaaattagtgaactcacatgtctggctagcctggcctctgatttgcatatatgtaaatcagtccctttcatttttttcatgatcagcctgctagtccaagggttagatcatcctgaacagtaagctggcactttatttgcttgtaagagagaacttatacatctgctatacaatctgctatacgtttttggaggcgatgatgagcagtgaggaggagggcaaggactggcttatggtggattacacagacttactgtatatatggcccagatgctacgtggaagacttacacaaaaattccttgtttttgtgaaggttagacttaactaggcatctgtattttttgtttgctaaatcaagttagctaagcaggttagtgctggccactctttactggccaggcgtcctgggggggtcttcccagcaagctctacagaagcagcgcggctcttctctcgtgggtgtggatcttgagatgggcgcgctgctctgatgcggtgctgcgtctcccttcaggaagaagatgggaatcgtaccagttcacagagatcttcctggtcctcagttaatacagaatattaatgaaacttatcactttaaatgaacccaggtagccgcccttgtcatcttaactaccaacgaatgtcttcaggccgttaagacagggcaaaggggtgagaggatcgggtggggcgagaggaaagcctggcccgtgcgggggtcagaccttcattctgccgtcagctgtgctggagactctcagcaagggagagacgtggcgtctctgagtggtttttgccctaaaggatgcttacggtcataggaagcttttccatgtgtttccttcatgggtgtctacggcttttgttttcagctgcgctttgcacaggggctggaaggctaactccccaaaagggaacttcctctccttctagaaactgacccctggtggttgctatagcaactgcaaagcgagaataatgagctgtgtaaacaagccccattcccagtactggggcgttgctagccctccttagagagggcgagggagaggaggatgctgtgcctggaaagcggctcttgaggagagctggaatctcggcaaagcgtccactccctcccctcccctttcctctcacctctagtgttcccaccagccccggggagg

SEQ ID NO: 35330 - DNA, 2300 bp, Homo sapien
aggaattcaaagctgcagtgagttgtgatcccaccactgaactccagcccgggcaacagagtgatgctctgtctccaaaaaaaaaaaaaaattaaaaaaagttgtagtaaaactgttttcaatcttttttgttgccagtattttctagatggcattatacaggtggcaatttgtcatgaaaattcatatagcattggagatttgctaaattatgcataaaattccaattttgatatttttcctattcaaaacttatccctgaatggggagaccaggaaaggctagctcctgaatcagagacaaagtgagtaaataaagtagcattccccacagggcccttcctctgccctcattggaacacattacaacttagaaacacaagacacctattctatgatggcaatgtgaactattattcctgtctagagacctgcccatctcctccacgactggcctgtcttcaaaaaagcatttgataatacatttgggggcggcggggttgggggaggctcagaaaaatgcaaccgctaaaatttctctggatggagttttcttcagtaaacagtagaccctgggaaacataacaggttccgaaaacttaattttgatgactgaaagtcagagaaacagccagctgaatcagctccttcttgggcagtggtttagcctacttatctcatatcagacctaagggtccagctgcttttccttggttctaaagagttctattctggccaggacccatcccgagacagacacttctgtctgcagccctgaaaactagaggtcaatggaagggctcaaattaaaggcccacagttgggcttacaactctccatggtgttcaagccttctcagaggagctggtgtggtggagccagggtcaaaggtcatagtaaatagaaagtagccagctttctgcctgcataacatcatcttgcctaaccagactcaaacgcttaattctactgtagtattctttggacattcttctttagaactacgggggcgggggggggggggcgtgtttattttcaacaaccacaatcatccttatctttctgaagatgtttccaaaggctgagaacagacccctttcagaacctcggtaggagaagtattaacagttggaaacatgtcagctgctttatggaggaagcacagcccaggcctggtttctctgggctccgtgataacttggggcaaggcagccagtgcgaagcgtggtggcaggagctggagagatggagagcggctcggagaagggcccctgcttttcagagttgaaacaggagccctctgagagaaagagatactgcgtgtggcttctctgaagccttggagggcgacgtggatgacacagcatcagccattccatcgcggggtggggacacagtggcggcaggaaccgtcctcagcccctggcggccacggcagttccccgctgaagcatcctttgtggggtgtgggtaagggagggggaccaaagtcgggtcggagttgagtttgttagacggcgagcacactcagggcggcagcccgagtaagaaggatggccccgggagagaaacggctcgaagctaggggcggggtgaagcgcctgctccttaatctcctgccccatcatccactcgccccacctggatgcagagcgaggaccgcgtggaaaggaaacggcgcgggcggggctccccctcgcagatgcctcggagacccagaggggcggcgtcaggccagggccccgagccctacgccccccatccccccaactccagcgcctctgaggtgcccctctcgcaattccgaggcatcaccgtgtctcccccgcctccgttaaaatagtgaaactgcggagtgaagtgatggaaagccgggggcggggagtcgcccgcggcgaggggctgcaggggagggggcgcggtggccgaataaggtggcccgcgagcaacgggacgattgggatcgcagccagtcgcggcctcccggacccttcccctcgggcagcccggccctcccatggcccggggcgccttgggagggcgtagggcaaacctggggctgcggtggggggtggggaggggactccacctccatccatcccgggatggcaactgcggtcaccctgctaaagtcggggcgggggcggcggtcctccccctcaccccccccagtccgagcgccgccgccgccgccgccgccgccgccgcggccgctcagtaacacgtccccaggagactcgcaggagcaacacgtgatgtgtctacttatcagggtgagagggggagagcgagactccgagc

SEQ ID NO: 35331 - DNA, 2300 bp, Homo sapien
ccatctcctccacgactggcctgtcttcaaaaaagcatttgataatacatttgggggcggcggggttgggggaggctcagaaaaatgcaaccgctaaaatttctctggatggagttttcttcagtaaacagtagaccctgggaaacataacaggttccgaaaacttaattttgatgactgaaagtcagagaaacagccagctgaatcagctccttcttgggcagtggtttagcctacttatctcatatcagacctaagggtccagctgcttttccttggttctaaagagttctattctggccaggacccatcccgagacagacacttctgtctgcagccctgaaaactagaggtcaatggaagggctcaaattaaaggcccacagttgggcttacaactctccatggtgttcaagccttctcagaggagctggtgtggtggagccagggtcaaaggtcatagtaaatagaaagtagccagctttctgcctgcataacatcatcttgcctaaccagactcaaacgcttaattctactgtagtattctttggacattcttctttagaactacgggggcgggggggggggggcgtgtttattttcaacaaccacaatcatccttatctttctgaagatgtttccaaaggctgagaacagacccctttcagaacctcggtaggagaagtattaacagttggaaacatgtcagctgctttatggaggaagcacagcccaggcctggtttctctgggctccgtgataacttggggcaaggcagccagtgcgaagcgtggtggcaggagctggagagatggagagcggctcggagaagggcccctgcttttcagagttgaaacaggagccctctgagagaaagagatactgcgtgtggcttctctgaagccttggagggcgacgtggatgacacagcatcagccattccatcgcggggtggggacacagtggcggcaggaaccgtcctcagcccctggcggccacggcagttccccgctgaagcatcctttgtggggtgtgggtaagggagggggaccaaagtcgggtcggagttgagtttgttagacggcgagcacactcagggcggcagcccgagtaagaaggatggccccgggagagaaacggctcgaagctaggggcggggtgaagcgcctgctccttaatctcctgccccatcatccactcgccccacctggatgcagagcgaggaccgcgtggaaaggaaacggcgcgggcggggctccccctcgcagatgcctcggagacccagaggggcggcgtcaggccagggccccgagccctacgccccccatccccccaactccagcgcctctgaggtgcccctctcgcaattccgaggcatcaccgtgtctcccccgcctccgttaaaatagtgaaactgcggagtgaagtgatggaaagccgggggcggggagtcgcccgcggcgaggggctgcaggggagggggcgcggtggccgaataaggtggcccgcgagcaacgggacgattgggatcgcagccagtcgcggcctcccggacccttcccctcgggcagcccggccctcccatggcccggggcgccttgggagggcgtagggcaaacctggggctgcggtggggggtggggaggggactccacctccatccatcccgggatggcaactgcggtcaccctgctaaagtcggggcgggggcggcggtcctccccctcaccccccccagtccgagcgccgccgccgccgccgccgccgccgccgcggccgctcagtaacacgtccccaggagactcgcaggagcaacacgtgatgtgtctacttatcagggtgagagggggagagcgagactccgagcgtgcgggcgaggaagctgggcggggggccgagacgggggccgggacgacggctggggcgccggggtcgccagctcctcgcccacctccctccctgtgggagaagaggaggaggggaagtgactgcggagttgatgaactttgcacatccagaaacgccattttgattccttttccggaacaagtttgcatctctcctcggtctctccctgaagcccaccggtccccaacgcatcatgccagggagccaagcgtcctgcccggccgtaagtacgtgccccggattccgactcgcggtacgccggcggcagcgagaagtctggggcacagccggagcgaccttttaaagaactttggggatggggagggtgaagtctgcagagcgcgttgtacttttgaaactcggtgtgtcccggagccggggacccgcacgccc

SEQ ID NO: 35332 - DNA, 2300 bp, Homo sapien
caacaaccacaatcatccttatctttctgaagatgtttccaaaggctgagaacagacccctttcagaacctcggtaggagaagtattaacagttggaaacatgtcagctgctttatggaggaagcacagcccaggcctggtttctctgggctccgtgataacttggggcaaggcagccagtgcgaagcgtggtggcaggagctggagagatggagagcggctcggagaagggcccctgcttttcagagttgaaacaggagccctctgagagaaagagatactgcgtgtggcttctctgaagccttggagggcgacgtggatgacacagcatcagccattccatcgcggggtggggacacagtggcggcaggaaccgtcctcagcccctggcggccacggcagttccccgctgaagcatcctttgtggggtgtgggtaagggagggggaccaaagtcgggtcggagttgagtttgttagacggcgagcacactcagggcggcagcccgagtaagaaggatggccccgggagagaaacggctcgaagctaggggcggggtgaagcgcctgctccttaatctcctgccccatcatccactcgccccacctggatgcagagcgaggaccgcgtggaaaggaaacggcgcgggcggggctccccctcgcagatgcctcggagacccagaggggcggcgtcaggccagggccccgagccctacgccccccatccccccaactccagcgcctctgaggtgcccctctcgcaattccgaggcatcaccgtgtctcccccgcctccgttaaaatagtgaaactgcggagtgaagtgatggaaagccgggggcggggagtcgcccgcggcgaggggctgcaggggagggggcgcggtggccgaataaggtggcccgcgagcaacgggacgattgggatcgcagccagtcgcggcctcccggacccttcccctcgggcagcccggccctcccatggcccggggcgccttgggagggcgtagggcaaacctggggctgcggtggggggtggggaggggactccacctccatccatcccgggatggcaactgcggtcaccctgctaaagtcggggcgggggcggcggtcctccccctcaccccccccagtccgagcgccgccgccgccgccgccgccgccgccgcggccgctcagtaacacgtccccaggagactcgcaggagcaacacgtgatgtgtctacttatcagggtgagagggggagagcgagactccgagcgtgcgggcgaggaagctgggcggggggccgagacgggggccgggacgacggctggggcgccggggtcgccagctcctcgcccacctccctccctgtgggagaagaggaggaggggaagtgactgcggagttgatgaactttgcacatccagaaacgccattttgattccttttccggaacaagtttgcatctctcctcggtctctccctgaagcccaccggtccccaacgcatcatgccagggagccaagcgtcctgcccggccgtaagtacgtgccccggattccgactcgcggtacgccggcggcagcgagaagtctggggcacagccggagcgaccttttaaagaactttggggatggggagggtgaagtctgcagagcgcgttgtacttttgaaactcggtgtgtcccggagccggggacccgcacgccccactccgcgcagcgtgcgctcgggccggcggggcggccagggatgagcggggcagccctctcccctcgggctgcgcgccgggccattcctcctcctcctcctcctcctccccttcctccgctcttttccctttcccgagccgccggctctgccaaccagctcccagcgcgagccgccgcagcgccccgccagcaggacctgatgcgcatccatattagccgtccgagcgcaggaatccggcccgacccgcgccgccgagtttatttttaaccagcaccgccgggactcggatggtgcgcgcaccgccggccagaaacatcttcccagcgctgctctccatcttccgccctctctccctcgacatcctcccccccatgtgggaggggaaacttttctcctacatactttcgagtccttctcgggccgggaagcgcggagatgacggcgcccgccctcccgccgccgccctaaggtatccgggggtgcctgcccggggtgctcgcgcgggggtgcctgctcggggctgctcggtgggagcatccgccgcgccctgctctgcggactttgaacctcccgggcggacggcgccggccgggagggg

SEQ ID NO: 35333 - DNA, 2300 bp, Homo sapien
agcatcggcagcatttcttaagagtattacacatccagcaaatcctctttaaaaacaagacattctaaaatgcaaccagtttagcagtatttttaagacaaagacaatgcaagttcattaacctaaaatggagcacaagctaagcaaataactaaatcaaagagttcttctctccttttcttttgtaaaaatgggggaaaggtatttttttaacacatttaaaacttgattaaagccattcaaatgtttaattcatcagtgtaaccaaagctcaaagcacatcaaagcaggacccatcagcgggtacccagaaggctccctccaaagggcggaggtaaacacatacacacacacacacacaccacccctaaaattagtgattctgtctttgtataaattacttgtagagtagctcgaacccattccttcagaagttctgtggactcttgaagatagcacaaaactcaacgtttgtttttcaaagaggttttagccaacactttggcctctatctaactcagacttccgggttgaaatatgtcttagaaactatacctgcctacttgaaaaagcaccaaatctagaggatgattttcatgggtgtgaaaaaacaaaactaaaccacattcttttcttggcagttctcttttccccaccttccacttcaattaaacttatttcagaatcaactcgcacacatgcagggtccactacatatataaaggggaaaaaaaatatcaaaaataatggagatgcactagcaactctgcctttgcagaaatcatttcttcttaagacagaaattcctcgctatttccagcaacaccattcaacaggcaaactttatttccactggcttttaaagagctaagcttaaatctaaactctaagagggttcaattttctactaatgaaaacccccggacaggtttttcaacataccaaaacgttatatttttttattcacccttttgtctctctccacatccaccaccatcacaagcagcagcagcaggagcatcctcaaacgaagaaaacccctccaaagtgccccgaatgtgtgctgctgctggctctgaagccgtgtagaatttcgtaatggaatgtgaactgctcgtccggatctgggctcacgttctatctcctaaccagtaaggagcgagggagggcaaatctgctgagcaaggagaaatactttcctcctcttttataacccatcacggatgcacggcggccgaggggcgcgagctgcacgcggcgcctgtcaagcggcccgggcccgcaccccgtggggtccccgcgtcccccagctccccgccccgcccggagagaaaggtggcctcgcccatcggtgggctcggccgacgcgccccgcactcacgcgcggccgcggagcaggtcacatcctcgacgcgcccttggcccggtccagaaaacacgccgcttcccagggagggggtcggcgacgggaaggacctcccctgctccttagcaaccattaaggtcgcagtttcctaagagaccgcgagcggggagggggcgcggggggcccggcccaaggcttgtgcgggaagttgggggcggggggggcagcaacaggccccctccccccacccagctagacgccgggggccgggatgggaggaggaagggaagccccagaactcgtgaaaaactggtccagcgggcggcggacaaaagtttccgagcgcgctccacagctgggcggcggagcgggccccggcggccggccccgcctcggatgctcccggcctccttcctgtgctcgtgacggcgccgagccccccaccccccccgcccgcgaggcaggctagctccacaccgagggctcccacgaaaacactcaccccgccaacggaagggcgagggaacaatacgtgcccgcacggctagggcccggtcccctcctccccaggccccccggggcggtggtcggcgtgaccacgaccgccagccgggaacccgcgagggcgcggggctgcccgcggccccctcccggccggcgccgtccgcccgggaggttcaaagtccgcagagcagggcgcggcggatgctcccaccgagcagccccgagcaggcacccccgcgcgagcaccccgggcaggcacccccggataccttagggcggcggcgggagggcgggcgccgtcatctccgcgcttcccggcccgagaaggactcgaaagtatgtaggagaaaagtttcccctcccacatgggggggaggatgtcgagggagagagggcggaagatggagagcagcgctgggaagatgtttct

SEQ ID NO: 35334 - DNA, 2300 bp, Homo sapien
tgctgtcaggagttgagcagtcctgtcccctggctttcctgggaaggcctgggtggaggcggcaggagcaggcaagggaccaagagagtgcctgctagacctgatgcctctcccttcccccctgagcccccagggaaggagctgccttatagactcgggtacagggaggcagggaatagagggttggaatccagaaaagagggtggagggcatgactgcagttactgccattgtctcaggacagacagaccaagccctggtacagaaattgtttggctgttggccttttctcttcagatgtttacatgcaggaagtgcctttgataaagtatggtttgctaacatgagtatgatatgcatgcgcatttttggatgccaaacacataggcagatgaaactaagaagccagatgctaagatagttgttgatgaattgaaactagcctaactggctccactgttggagtcatttgctcaaactactccaaacttttgtttggtctactgaaaacattagttggaaaggtacagcgttaatttaaggcagggaagcctccagcacgtgagagtcgtgtctctctcggtgatgctgggagggaaggatgggagatgagagtcatttcacggccgcctagctcctcctcttcctctccctgccctggagctgcagcctcagctttcagagtctcttgcctggtggtaggcccggcgagcggttggattttaagtatctcagttattttcagtatcatcagtcatcactttcagagttccttttctttttcaagggtacccagtctaactgtttagctccttttcaatagccctcctcactcacttacgcctagtcaggaagattaataatgttaactgatttactatcactgcaaaaagcattagttaattagacttttacacctcagtcagatggcattagacaccctttgtgcactttaactcaaggatgttaaagacctaaatctttcagaaaaaaagaaaagaaagaaaaaggacaggcacttttccagtttaagctgcatgttggtccatgttaattaggcatttgtcctttagtctggaggtgatagaaaatgccagttactgtggtatttaactgacatcaaactcctgtccaaataattcagttgggcccagccttctctcttaattggtgggaaggaaaacttcggcacacacccagaatagggaggaaactgttacgttgaacattttgaagtttcattctgaaggatctgaaagacacttgaatattttttaaattaactatccagttgagctttttaaaaacagtaacaaaagaatctcccctcaaacttgagctaccccaaatgattagcttttgtaagtcttcagaaaatgaaagtttagtcattgtaatccaaggtcaaagtggtggttgttatccaaagctcttatagatttatgtatctgtttggccctgttttaaacagtgctctgaaaattgacagttttctagctcacactcgtatttctttattaataccagaaattcacaagtgggttaaggcacccaccagtatacacatttaaaaatcaatatatgctagcatattgggacaaaagtgacatgaatatgattgtttcatgggagcaattagatgacactttttttgttttgtttttaaaagtaacttgttcctagttgctggagaaggtaatcctccgtaataagagtatagtttaccttattcatgagttacgtaaaacaattacaaaaataatgaaaagattttttttctaacttagtaggtagccttatttgactctaaaccttactcacttttgtgtatggtttctagccaaaggttcacacatgtgagaacatttcacttttagtactgaactactttttcgtgcactgaatgaatacaatatgttaacactcctgtaaggcccagaattgcttggctgccccttgccctgcctgcctggtactggctgaaaaggtaccattgtttgttctgcaaacactgagtgatgtttgtttccaaggtgactggttctattgctgccctttaagcaaaggtgggaggggggatgggggagagagaaagttggcttcagacacctgagagcatcctgttctgggtacagtgtgtgtatgtatatgtttgtaagttgaaattttattttaactgaggtaattggagaaaaagggatagtgtagaaatgggaggaaaagacagtatcagtaagttaaaaatatcagtaggttctgatgtttaactcaatatactttgagtgaatgtaatggtaaat

SEQ ID NO: 35335 - DNA, 2300 bp, Homo sapien
agttaaaaacagaaagtttgaaacacagttttttttttttcttttaattttaaaaaatcttttgtagagatagggtcttgctgtgttgcctaggctggtctcgaactcctgggttcgagttgaccctcccaccttggcctcccaaagtgctgacattaaggttgtgagcaactgtgcccggtgtgaagcacaattcttcataaatttaaagggtctgctagcatggggaaatgtcatggaaagatgaaagtatagatgtttttttggggggtgggggctgtagctttcttctctttatggagaaagatgtggacaaagaggctggatccatagtctcaaattgtatgtttctgcggttagtccttttacctaccagttggaaaaccatttgattcacatcttcaaaatgtctattgacaaggaaggtacattttatctctttacaagacaagtgctttccctaagattcccttttgcccttttggtaagaatttaggctggtactgcaggtttgtagctgctctgggtggtaccatttctcatatgctaggtcatatcccctaaagttggaggaggaagccatgagaaatcatattcttccttgtgttgttcctacacgttctctttacagctgagatgatgagcttgatcttcagctgctgttgtggactcgtagaatttattagcacacattgtgggataataggatcttaatatccaattaccttatggtagggcttcagctgtagaatatcctcctagttaaaatgagggaagcagtagacttcatacctactgactggacctgtagccataatagtctagttgcaaggaacgcacatggcctgaaaaagtaaattgtgacatggccatgggccatagttttccctttggtcattcttttcatgtcgccaggtttcttttaggtctgtcctgagagtgtctaaactcagcctttagtgaatgcctgaactgttttgtctttggtcacttttagataaaggcgtgagacgggtcaagtggagcctgagcatccttgcaagggactgaggcacagtgtgaaagagaatttgatgcatgggtataaatatgagctttagaaagtaaaattttactgcagagtccttttggctgttgggagtgtgcgtaacaggcagtactgtaggggttaagataaggttgagaaacagctgtagaatgtggttttggaagaaagaaaggcagacattgcctctcatttgtgctccttgcattgttgtgaatatagtggtctaagattatagccaataaatgatttcagttttttcttcactaagtgaaaagatgttcactttgggcctttgcttcccttccagtgtcaacgagtactaccaagagaagaagacaagaggtcaacacagactcattttctactccgtgtgaatgatagctacagcaggggaaagtttcatagtctatcagtgggtcagaaaatggaggtaatcagcagtgtggcgggagggttcttctttccctcctagggtacgttacctgctttatacatattttttaagaaacaggctttgatatgtcaatttgaaatttgtttgtaactctgatagcgttggcttcttaaatctcttataaaattcaggctccccatcagaatcactgtattgcagcagtggagttaaatgaaacctgatgtttctcatcactagttttaggtctggaacatttgtgtagtagtgaataagcctaggttcttaggagggtgctgcagggcggcagctttctgggctttgtcattgttggcttggcctttcccactctgcctaacccagattaggaaaggtagagaaacctgcctctcatgagtttgagtcctgttggtagtgcacactcagaaaggaggcaaggttacttcgtccttggtatgccaagacttggtttaaatgaaagcttccatcactctgggcgtgaatgtggcctttaactggagaaagacagcgttggatgtttttgacctgaattacaattagagtagccatggccagcgccccctggcaatgacagaagcctaaacttccccatgatcacatcagcaatttccaattttcagttttatagcagaggcttcttagaagcttaaacccctgtcccaatgacgtcaagttcgcccgctggcttggaaggttcagacctatcttccatcaacaccatgatgtcggcggtcatgagtgtagggaaggtcacagagaatggcgggagcccccaggggatcaagtccccctcgaagcctccaggaccaaatcggattg

SEQ ID NO: 35336 - DNA, 2300 bp, Homo sapien
agaaaggcagacattgcctctcatttgtgctccttgcattgttgtgaatatagtggtctaagattatagccaataaatgatttcagttttttcttcactaagtgaaaagatgttcactttgggcctttgcttcccttccagtgtcaacgagtactaccaagagaagaagacaagaggtcaacacagactcattttctactccgtgtgaatgatagctacagcaggggaaagtttcatagtctatcagtgggtcagaaaatggaggtaatcagcagtgtggcgggagggttcttctttccctcctagggtacgttacctgctttatacatattttttaagaaacaggctttgatatgtcaatttgaaatttgtttgtaactctgatagcgttggcttcttaaatctcttataaaattcaggctccccatcagaatcactgtattgcagcagtggagttaaatgaaacctgatgtttctcatcactagttttaggtctggaacatttgtgtagtagtgaataagcctaggttcttaggagggtgctgcagggcggcagctttctgggctttgtcattgttggcttggcctttcccactctgcctaacccagattaggaaaggtagagaaacctgcctctcatgagtttgagtcctgttggtagtgcacactcagaaaggaggcaaggttacttcgtccttggtatgccaagacttggtttaaatgaaagcttccatcactctgggcgtgaatgtggcctttaactggagaaagacagcgttggatgtttttgacctgaattacaattagagtagccatggccagcgccccctggcaatgacagaagcctaaacttccccatgatcacatcagcaatttccaattttcagttttatagcagaggcttcttagaagcttaaacccctgtcccaatgacgtcaagttcgcccgctggcttggaaggttcagacctatcttccatcaacaccatgatgtcggcggtcatgagtgtagggaaggtcacagagaatggcgggagcccccaggggatcaagtccccctcgaagcctccaggaccaaatcggattggcagaaggaaccaggtaagtgttcacacctagtggtgacctctggtgggttcaatccatgagaacattgggagatgtttccgagtttcctatgataaaaccttggaagaattgggaataaaacggacatacccagaggccttgatcatttttcaagggcaaaatttttatggcttatgttagtttcctttcatggagaaggttttctttgctgtggtgtcgatgttggtggaagtgcccttatttttggccccaccattggattttaactcaagctttcttcacttgatggccatggcagggaacatcactgatttctgtgatgtggtttgtttcctcattcacacagctggctatttttaagtatcttcagattaggtagcaaataagtattgcctgtgctagggctgccgttcagctttctatccttgaaaaagcacagaatttggcttcagataattccagttaagatgctgtttagtcatcttggattttcattgggcatcagatcagaacagggtaaagtaaataggtggaattgagaagggttaatgctgttacaaaagttgatgtcttctctgttgggaaataaatgaatcttcaatgtaagatgggacatttccttgaaaagttgttgctgtcttggcaacatactgttgaacagaaagaaggaaggtggtggaaggaggcagagagtgaatacttctcatttcaactctggatccatgtaatacgagttgacttcctcgtgtttaaagtttggtttaactaatttaatgagactatactaaatccttggagagaaggtggtcttgcatttgtccaggaaccagcaatggatgagaaagcaaacctgctgggcttttgtaaactaattttctttttttataaataatcctactgtggctgtccttatacagaattctctgagtattaatatgatggttttctataaattcttagaagtagagccttaattaaggctttcgatacaacttgccctacaagaaaagttgtaccagccccaaaccctgccagcagtatgggggaggatgcatttctccacaccttgctgaaggatggggacttggcagagttcagtgatgttttagggttggaacattgattcctttctctctctcttttttcccttttctccttgtgcctctcttcctgtgggtgcctgagaaaatactcagcctgtatgactgtggc

SEQ ID NO: 35337 - DNA, 2300 bp, Homo sapien
ctgtatctggcttgtttttcatccccagcttctagttcacaattaggtagaaccctattactctttgaagaaggaacaagaaaatgtgggccagttttcatttgccattcttccatgtgagttagtatggttcgtaagtattcctggtgatacgctagtattggcaattctgtgaggttgaacaaaggggtggtatggtgtgctagcgtgggaattaggagacctctgggtcttgacagtgccctggccactaagcaaaggcagttcatccttggagtctcaatgtgcttttttgttaattgagatatgcttgaagtatcagccctaaatagtctgattctgtgacctacaaacccttacttaattcagtgttactataaatgattcttcccttaaacctactttttacttagcaaaagagaaaaaaaaaaaaaggaaacgctcatgtcaggctgcctgggtttgaaccccagatcccctcttagttggaggcaagttgtatgatgcttcagcttttggttcctgcctcctaaggttgttaggagttactgtgtgtagctgcttagaacattgcctgggtctcagtaagccgcttaagtgactgctctcattttcgctgtaaagcaccatactgtaataacatcccatgaagcatggggcggggaagagtatatggtaccttatggactttgatgtggtggggtagtaggtaaattctgaatatgtaagctacatagtattctttttgtaactaaaggataaaagttttaagatgggcatgtaatatggctagcactggattttaatgatgagccagagtaataaggctggcaaggggagtttttgttttgtaataaatctcttacacctgcacatccagttctttttaaaaacacgtttgaagaggctccatatttctcagtgaagctgttggggttcatgttatttttgaaaatcatcttgcaatttatttcagcatcagactgaaccacccaaagaaaattagtctatttctgaacagttttttcagaaaccatattggtctgatcacccaacatttatagaaataggcgcttaaggcctagaggcatttcagaaaggagaatgagaaatactgtggtcaagagtagtgttcagatggagaacatcaagcatctgctctgcccttccacacacatcctcatttcatcttcacaactgccctaggtaaccttgttatctgtaatgaaacagcctcaaggagcacagaggcactcactcctcacgtttggtctgttgccatttccggcttggttggaatagggtaggagccttttggcagggagcacattctcagtaatgcagagtgcactcacctgggttctagcttcaacacttaggatttgcttgatattttgtattctctgaggcactgcctgtatttgtttctgctatcacagtccagagtcaagcttcatttataaagactgggcagggcatggtggctcactcctgtaattccagcactttgggaggctgaggtgggtggatcactttaggtcaggagttcaagaccagcctggccaacatggtgaaaccccatctctactaaaaaatacaaaaaggccgggcacggtggctcacacctgtaatcccaacactttgggaggccaaggtgggcagaacacctgaggtcaggagttcaagaccatcctggcgaacatagtgaaacctcgcctctactaaaaatacaaaaattagccaggtgtggtggtgcatgcctgtaatcccagctacttgggaggctgaggcaggagaattgcttaaacctgggaggtggagattgtggtgagctgagatcgtgccactgcactccagcctgggagatagaacgagactccatctcaaaaaagaacaaaaacaattagccgagcgaggtggtgcacgcctgtaatcccagctactcatgaggctgaggcaggagaatcacttgaacccaggaggaggaggttgtagtgagtcaaggttgcaccactgcactccagcctgggtgacagagtgagactgtctcaaaaaataagtacataaataataagtaaaagctactaacaattaaaaaataaataaataaagacaagactgtctggaaaatggctctcctaaaaggaccagttgccatcatccacagtggaagattcaaagcagttggtccttggtacgtatgagaagcggatttcattcccttgaattctacagagcagtttattagagtgaatgcattttaaggccttgcatttgatatgtcatccagttcataatca

SEQ ID NO: 35338 - DNA, 2300 bp, Homo sapien
aaacctgggcttttatgttaattatatcatctgaggttctaaggttttttttttagattttgaaatttagggataatagctcttaggtttgggtaccactttgctgcagtttaagaaagggggaagggaactcatttattaaacatcaatcacgtgctgtgttctgtttgttttctagtcatcatatcacacacctttacgacagctcactgaaggaaggtgatactgttcccattttgtagatggaatagacaaaacctgaatttaagtagcttgctcaaggttccatattgaatatggaaagttcaaatcatctcagtaatgaatataccatatatacttgctgtattgtatctatgataattcagttacccacaatacccttttaaatttctgttaatgacatacctttaaatgtctccttgatgaacagaatcatggtctttaaaaacattttcatgggttgattgcattttcaagctctaaaggattgaaagataaatcttcacgttaaaggtaagagtgaagtatctgctcttgggttacagaaccagatagtactagaactaagattacagggtaaagctgcttttatcttttttctttttctttttctttttttttttgacatggggtctcactgtattgcccaggctggaatgcagtggcatgatctcagctcacggcagcctctgcctcttgggctcaagcgattctcctgcttcagctttccaagtatttgggaccacaggcgcacaccacaggcctggctaatgtttttgttttgtttttggtagagacggggtttcaccatgttgccaggctggtctcgaactcctgagctcaagtgattcacccaccttggcctcacaaagtgtcaggcttacaggcgtgagccactgcgcccggctcacagggtaaggcttctgtctggtgtgttgtattacggattttgcttaataggcacagtgaggcattaaaaagaaaattcagtatgcctgtagaaaggataatccttgtttaaagtctccaaattgcagtcaaagatgttttgactgtgcctttttttgttcccctgctgtcccttatgtagacttctgtcagtacccatggcagcctgtcatcttgttgacatctccttctggactgtgagctctgtatctggcttgtttttcatccccagcttctagttcacaattaggtagaaccctattactctttgaagaaggaacaagaaaatgtgggccagttttcatttgccattcttccatgtgagttagtatggttcgtaagtattcctggtgatacgctagtattggcaattctgtgaggttgaacaaaggggtggtatggtgtgctagcgtgggaattaggagacctctgggtcttgacagtgccctggccactaagcaaaggcagttcatccttggagtctcaatgtgcttttttgttaattgagatatgcttgaagtatcagccctaaatagtctgattctgtgacctacaaacccttacttaattcagtgttactataaatgattcttcccttaaacctactttttacttagcaaaagagaaaaaaaaaaaaaggaaacgctcatgtcaggctgcctgggtttgaaccccagatcccctcttagttggaggcaagttgtatgatgcttcagcttttggttcctgcctcctaaggttgttaggagttactgtgtgtagctgcttagaacattgcctgggtctcagtaagccgcttaagtgactgctctcattttcgctgtaaagcaccatactgtaataacatcccatgaagcatggggcggggaagagtatatggtaccttatggactttgatgtggtggggtagtaggtaaattctgaatatgtaagctacatagtattctttttgtaactaaaggataaaagttttaagatgggcatgtaatatggctagcactggattttaatgatgagccagagtaataaggctggcaaggggagtttttgttttgtaataaatctcttacacctgcacatccagttctttttaaaaacacgtttgaagaggctccatatttctcagtgaagctgttggggttcatgttatttttgaaaatcatcttgcaatttatttcagcatcagactgaaccacccaaagaaaattagtctatttctgaacagttttttcagaaaccatattggtctgatcacccaacatttatagaaataggcgcttaaggcctagaggcatttcagaaaggagaatgagaaatactgtggtcaagagtagtgttcagatggagaa

SEQ ID NO: 35339 - DNA, 2300 bp, Homo sapien
tatagagttactcttgccctagattgtaaattaagtttggcattattgtcagactggatggagggtgaagtaaaatagtatgaacaattaagaggctctccccctcttgtctttaagccatattctcctacatgtattttataagaaaatgttaagtcaaattttagtggctctttaattcctgacctcttcattctccttttcagtataacctcccctatgctcatgcccacacagacaaaaaaacaaaacgaaatacacacagaaaaaagtctttccaaactgtttaagtatttaaacatctgagccaaagcagatagaagttattgtataattgttaatcactttgcaaataggggctatcaaattacctatattggcattgctggattataaactctatatctgtaatataaagtgtttgagtttttaattgggctgttatgatcagtagttgattttgagaaagctctatgagctctaagtaactgcatggttttttgtttaatgtaatataggagacccttcacattcccaaggaatatattccaaaacatttttgtgaatatctaagtttgtgaaactactagggcatgatacagtaaggtgtaattacagaatttacgaaatgtaaatggcctctacagagttttatggaatacctggtactaacgtaggcagctgcaaaaccacactgagttacagctgtcagccctcctcattcctaaataacttgccttacatatcagccctcccacttctgaagttcaaattagtgcctcggaaatgtagaatttattatttgtcatttttttttttttagcatagattgagaacagttgaactcttaaatcctcagatgccaggggtctgctctagcatcagtaagtatttagcagaaactaactccgtaatgaatggaattcaattccacacatggtttgttcaagcacacttaataagtagcctattttttaaatgtctttttaaaatgtaaatatttggatgaagtttttctttgttttgatatattcatttgctacaccaactatgttttcagaattcatcttttgaacaacttggtttcagaatatgtaaaatgactttaaggatcttgtgtatcaaacctatccccggatgtgtgagaataatgtgttcataaagcatggatctcgctttggttgtatagcttcctcatttacttcatggtcttacatagctggtgactttcagggctaatctgccctctaaagcattgtcccaggagaggaaaaggaaatgggacctcagaagtagaagcctcagggaaggagtaaagtagaaatcagaagaaaagaagcttcacttgatagtaataaggtttttaacttcaagtaccttcagaaaatgtgattttgataagaggaaagggcaaatttagaccttaaaaaatatggaagaactactgccttaaaagtgcatttgtggcacatcagcctagaactgtatcatggctgtgctggggagaagtaaatggtggtaatgtaacattgccacctttacttaatgatgtgttattttcgaggtacagtagatcaatatagtaataggcgagcctcatatatagcattcatcttgtacaatgatatccatacccttgatatgaaggaaaattgacttggtttgtgcatttgaatactgaaataattttttaaaactcagtgacacataccatctcttgccaagactagaccctgtattttagttcctaaattagatgtttaaatttaaaaacattttcagatgtacttaagtacttccatagtacttttttttttttttttttttttgccccctgagacggagtctctgtgtcacccaggctggagtgcagtggtgcgatctcggctcactgcaacttctgcctcttgggttcaagcagttctccctgtctcagcctcctgagtagcttggattacaggcgcccgtcaccgcacctgcctaatttttgcatttttagtagagacggggtttcgtcatttggccaggctggtcttgaactcctgaccacaggtgatacgcctgccttggcctcccaaagtgtgctgggattacaggcgtgagccactgtgcccggcccactgttcactttttgaatggcatcattttatagctgtagaactaaaatcaatgtttgccccaattttcttaagtaaaactctactttgagctcttacctccaacttagtaaaaagcagcttcacacacaaacaagattcttactggtggaatgttaggtttcgttgttaagttaatctgtc

SEQ ID NO: 35340 - DNA, 2300 bp, Homo sapien
cagggcccgccaagcccacgcccacccggaactcgcactggctggcaagcaccgcgcgtaaccccagttcccgcccgcccacgcctctctccacaccttcccggcaagctgagggagctggctccggccttggccagcccagaaaggggctcccacagtgcagcggtgggctgaagagctcctcaagtgccaccaaagtgggggcccaggcagaggaggcgccgagagcgagcgagggctgagtactgccagcatgctgtcacctctcagaagctttgttttttgcaataaatcttgctgctgctcactgcctttatgagctgtaacactcaccgcgaaggtctgcagcttcactcctaaagccaccgagactatgaacccaccaggaggaatggacaccttaacagctgtaacactcactgcgatggtctagtagcttcactcctgagccagtgagaccatgaacccaccagaaggaagaaactcggaacacatccgaacatgatgaaggaacaaactctggactttaagaactgtaacactcagcacgagggtctgcggtttcagtcttaaagtcagtgagaccaagaaccctattccagacacagctctgacatagagtggcaacactggtagcgtgcacaggagcagaggcagcagcaaagtgagaggaggccctccacttatgctgggcgccctagtagcagcagcaacacagcagcggtgccactggtggcctggcagagtggaatttggttgattcagcccagcaccatcaggctgtgactttagcagactgtaggtagtggtggcagtgggtccaagctgcatttacagcccccaggacaaggagacctgaagcggaaacaatgcaggagtagaacagcaaatgtcctaggtcagtagtgtatggaatctggaaccagatagccttgttcaaatcttgcatctgccgtttgctagcgttttgaagctttgagtaaattactaacctctctgggtctgttttctcctcagtaaataatatccagctcatagagaggtttagaaaattaaatgaaaaagcacagctctaaggaggtgattgacaatagtaagcatatgatttatttcctcatctttatgacatctcactctggtccagaccaagattacttaatattcagattaatttcatgaactgctatattactccagcaactcaaatccaaaatagatgaaaaggaaactaaagaaaactggacagccattgctgcacctattgtatagttacaaatgctgactacataccaaaacactgtttaggtgacttataattctggaatgtcacatacgaatttaagaattgctggccaggcgcagtggctcacacctgtaatcccagcactttgagagacccaggcgggtggatcacctgaggtcaggagtttgagattagtctggccaacatggtgaaacccccgtctccagtaaaaatacaaaaattagccgggcgtagtggtgcgcgcctgtagtcccagctgcttaggaggctgaggcgggagaatcgcttgaacccgggaggcggaggttgcggtgaacagagatggtgccactgaactctggcctgggcgacagagcaagacttcgtctcaaaaataataatttaagaattgtcattacttaaccatgggagagggtgtgggcagacaggggacaaagattttccactgtgtattttcatggtttttcctttgaacaatgtcctctcttccaacaaaattttttgcttttaagtgccacataaaggcagctcatgttccttacatcgccgttatcaagaggatcgtcattcaaataaagtaaccactgacaatgctaattaattggaagtaaagaactgggcggaaagaacggctaaccgcaagctgccgggtcgcaactgcggcggaaggcggactctcgcgggagccacaaagaggcagcagccggccacgtgacttcccggtggcctgctctccccacctctccgcgctgagcagccacgtcggcggcggtccctggtccagggaggggcgtggcaaaggcccgtgcgcggtacgtgtcccgcccctcgctgcccggagcccggatgaagagtaacgccattaccgccggagccgccgagagccttagccgacggaaactggacactggaccggcagcgccatgagactcctcccccgcttgctgctgcttctcttactcgtgttccctgccactgtcttgttccgaggcggccccagaggtgaggctgggggagtgtgcggaggggatggcca

SEQ ID NO: 35341 - DNA, 2300 bp, Homo sapien
cagataccaagtcccgtccatgtctcctttaaaaatgtctttcagggccgagcgcggtggctcacgcctgtaatcccagcactttgggaggccgacgcgggcggatcacgaggtcaggagatcgagatcatcctggctaacacggtgaaaccccatctctactaaaaatacaaaaaaaaaaaaaaaaaaaaattagctgggcgcggtggcgtgtgcctgtagtcccagctactctggaggctgagggaggagaatggcgtgaaccccggaggcagagcttgcagtgagccgagatggcccactgcactccagcctgggtgacagagcaagactccatctcaaaaaaaaaaaaaaaaaaaaaaagtctttcagtaacctgtgctttctttccatcccatgttgccacactggtccatattctcctgacttcctcaggcctgtccagagctccagagctgagagtggaaaggatggccactcacattgattctataaatttttgtccttccaggccatccatagcctggagtgacatcccctacccggtactcccctgctctactcagatcaggctcatttccctgcagacagataatgttccttacgaattaagcttcagtcatctgccctggcacgtgcttctctcctaaaaccttcccatctacccattcatctattttcaaaattcctacaatgtcttcagtctctaaatctctatcttacaattcagcacttggtgatttcgtttactgttttagagcttcaccactgtttcaagggtgttagtgtttgtgtttacagatcataaatgtcttgagaggagcatacttagggctttccaatatcccctactgcaaatggaccagtgctgtctacacagcaaatattgattgaataaaacctgcattccaatgacttatttctatcaagctctttcaatttatagtcattactcatctgcctggattcttttattgaatttctgaatgaatagtttattgaaaattagttgttttcaaacctatgtcatcacttggtaaaatataaaaaagtaagccaagcagaccagtcaggatcagtgaaaggcccaactttatgctcacttctcccttgtctttcaaataatgctgcctggattgtggtgagatctgaaaaattcttgctttgttttcccaatgcaaaaaagcgcaaaggccttgtttcttagttttcttgtttgtgaacccagcacttccaattacatttctacaactttgttcatccctcatgtggcactgcacaatctgccagtttacctttttaatttaaagttagactattttttccatctttcatttgtccttacaggtttatgttggatttttaacatatttatcaaatgtttgaatagatgttccagagacattctaaagctgttttaagataggagttaaaagaggtgtcacgggagttactcgcaaaaactatagttttgtttaaaagctttttcagttgtaagacaaactttacctttttaaaaagcacttatctcattcatttttcacctcaaaacgagacaccaaactttttaagacacaaaagtgtgctcacttccaggatccatagtttcttggacccacgctacggacctggctctccctccctctgcaccgggttttgtgggagggagaacgctttccaacctcctccaccaaggactctcacaaactcgcaatcgggctcccggagtgctggaacgcccctgtgtgacgtccgcccgcgccgggggaactccgcagagacaggtgcagcccgcgaggcccgagcgaccctactgtgggtgcggtgtcttcccagagagtggtgaagttaggaaggtacgaccccctaggccgaacagcctgtgggctagctggcgcctcctgccgcagtaaacacaaagtggggtacagaaacgaaaactccgggaagaaacggccagcacgggcctcgccgtgccggctactcaacacgccttcctgagagcacagaacatccacagccctatacagcgcgccatccagagagctccggactcccagctcggcgcaggggcgggacttccgctcaagtcagacttccgggcgaggcggtgaggggcttccggttggggtggcagggtggtggatctgtcggtcccgttttcccgtcgcacgtggtggccactgttggcttctgaatggtttgcaaggcggatatccacgccaaggcctttggatcggccgtgggtacatccgtctgagccgttcctttccatcgcagagcggcggcctccggcggcg

SEQ ID NO: 35342 - DNA, 2300 bp, Homo sapien
tttgccagataattcttcgttgtgggggactgtcttctgcactgtaggatttttagcagcatatctctggcctctacttaccagatgccactaatgtaccaccacccccagctgtgacatacaaaaacgtctccagaaattgccaaaagtcccctgggtagaagtcgggatggcaacatcttccccaatggaaaatcactggtgtatccttacaataccctggggtggatggtaaattagtgccctctcattaccattaactacccactagctatgctggctgtgtttcttctgctgcttttcttctctaaagctttttgtacacttctccgtaaccataaaactggaatgcccttcctctttctctggctaacccctactcatccatcaagtatcagctcactatcacttgctcaaggaagtcttccctatttttcccccacttctcctttgtactacttacccaattcgaatacaaatagtctaattatttaataatatcggtttcccctgctagggtgcaagctctgtgtcattcaggatggtatttaccaatgcctccctaccacctaagactagatctgactcacagaaagcattcaacatacatatatttattgaaaacatccccaataattaacaaaatccgcatgtgatgaatccttactgtaaacataaagtacaagctgttttcttggaattccaaaataactccaatatgtttcattttgcttttaggcaggagttatccttcatccctctttccccagactccacgtccagtctaccaccaaacgctgccacttctacctccaagacatatctttaggatctgggctctagtccccaccatctttgaatctgattaccttattatttttgaactggtctctctgttccactcccaccctccatgaacatcatctacctagaaagaatgattcctttaaatcaccaagcaaataatgtcattcttctgctaaaatccctcctatggctttccataagacccacattaatatctgaacttttcaccatcacttgtaaaggtctccatgatctggccccccttcttacttctctatcaccctaccaatcttctcaactacctccactgtgctctaggcactctggcctcggggcctttgctcttgctgtcccttctgtgtgaaatgctgttccctctgctcttgccaggattagctccttgtcattcaaatctggacttaacctttccctacccattcagtcaccacttggtatatcaaacgatttgcatagtctacatcattatttggtttttaaatggtgtgccctctctttcacgtagaaggtaaagttccatgacagcaggaagttggttcttcttgttacctccggcgcccaggacagaacgtggtacatattaagtgcttagtaagtatttgttgaacgctaaatgtggttaaaacgcaaaaacccatgtttcctaatcgctatccccaactctgcctcccagtgacgctaaccgacctgagaaccgcagactcccttgacaagtagctttcacttaactctgccgcgtgaactgggagaaaaacccagctgggatgcagaaacaggcaaagggttgtcaagagagacgctgagtgatgaaccactagtctccctctaaaccgcaaacaagagtccacaccccaagggggcggtcaaggagagagccgtacccagagccagggcactgtacggccgcctacctgtcagaggagtccgcgtcgtcgaattgcccggggaccacccggctcatgagaagccgccggtagtccatgactggagagcgccgccggaggccgccgctctgcgatggaaaggaacggctcagacggatgtacccacggccgatccaaaggccttggcgtggatatccgccttgcaaaccattcagaagccaacagtggccaccacgtgcgacgggaaaacgggaccgacagatccaccaccctgccaccccaaccggaagcccctcaccgcctcgcccggaagtctgacttgagcggaagtcccgcccctgcgccgagctgggagtccggagctctctggatggcgcgctgtatagggctgtggatgttctgtgctctcaggaaggcgtgttgagtagccggcacggcgaggcccgtgctggccgtttcttcccggagttttcgtttctgtaccccactttgtgtttactgcggcaggaggcgccagctagcccacaggctgttcggcctagggggtcgtaccttcctaacttcaccactctctgggaagacaccgcaccc

SEQ ID NO: 35343 - DNA, 2300 bp, Homo sapien
tgatagcgttttagatattttgagttaaataaaatatattaagataatttcacctgattctgtttactttcagtgtagtgactagaacaatgtaatactatttatgtagtttgcattatacttctattagctaatagcctagagttctgtttctcttgaacttggttgcctttgatttccatgactggatgaacttgctagttggttttgcctttggttcctttggcctttacctgacattttactgattaacaattagagtgaataaaagcaccaaatagtgactctcatttagtcaaccaggatagcgtcgtacagttaagctctgctgtttattgattgtcacaggttttaatgaggaaaatttggtaccgtcttttggaactttttaatttttgcatttctttttaggtgttggatcccagaacaagaatgattttattcaagatgttgactagaggaatcataacagagataaatggctgcattagcacaggaaaagaagtgagctcttctttggatgattggatatttaattttcttatttcagataccagatgaaactggcacttagaactacattatgcctttaagaagaaagaaaaacaaagccatacacattaatattcatggttagagaggaagttgtacatataactacgcccttttcactaccgctgctgcattggatcattgagtctaactagttgtgcccagtagtgagtgagatggtcagattattacaggcctgagttctaataaaataaattactcatggggccaggggtttatggttatgtttctatgagtcagcaagtctttcttatttttttctttacctacgggtatactgccttctgtttgttagagaagactctgaaatccttttgactcaaaattgactactccagcttgaaggaaactcttactgtgatttactcagctataatggcaggggtctgcaggctcttgaaagggccagctaataaatatatgtgagtgttgtggctcaatatagtttctgtttttgttttttttttaaagcaattatttaaaagtgtaaaacccattctgctggaagcaattctcagtaaaattcaacttataaatcactggatttttaaattttttttaaacagagtctttttttttttttttttttgagacagtctcccaggctagagtgtggtggcatgttctcagctcactgcaacctctgcctctcgggtacaagcaattttcctgcctcaccctcccgaatagctgggactacaggcgtgcaccaccacactcagctaatttttgtatttgtagtagaggcagggttttgccatgttgaccaggctggtctcaaatttttggcctgaagtgattcacccgccttggcctcccaaagtgctgctattacaggcatgagcctccacgccttgcctaaatcactggatttaagaatgtctttaattattttgcatatacttgagatataaaaaagtttgaaaccacttctcccctatatttaaattggattttactgtacagtcttgcattgcttaatgaagggaatactttctgagaaatgcatcattaggcaaatttgtcattatgcgaagaacattatagagcatactcatacaaacctagatagtatagcctactgcactctcaggctatacggtagttccgaatctgtacaacaggtttctgtactgaatactgtaacaattgtaagacaatggtaaatatttatctatctaaacatagaaaaagtacagtaaaaatacctgttatagtcttacggaatcacctcatatatgcggtctgtcacctgtcagtaactaaaacgttatgtggcacgtgactgtatttgtatattggagctatgtttactgtccttttgatgtaatgttttacattttaattcacatattcaaaagacagtggtattccttatgcatgttatttcagttcacttgacttttgaggttagaatcaaatagattgaaaaagtggttatttaacataaacttcattttcttttttttttgacttaatataggctaatgtataccatgctagcacagcaaatggagagagcagagcaatcaaaatttataaaacttctattttggtgttcaaagatcgggataaatatgtaagtggagaattcaggtaagttcagatttttccctccagttggtttaatttctatttcctaaaacattaaaataataatggaatgattgaaataataaacatttttcttattcaagatttcgtcatggctattgtaaaggaaaccc

SEQ ID NO: 35344 - DNA, 2300 bp, Homo sapien
taaaaatacctgttatagtcttacggaatcacctcatatatgcggtctgtcacctgtcagtaactaaaacgttatgtggcacgtgactgtatttgtatattggagctatgtttactgtccttttgatgtaatgttttacattttaattcacatattcaaaagacagtggtattccttatgcatgttatttcagttcacttgacttttgaggttagaatcaaatagattgaaaaagtggttatttaacataaacttcattttcttttttttttgacttaatataggctaatgtataccatgctagcacagcaaatggagagagcagagcaatcaaaatttataaaacttctattttggtgttcaaagatcgggataaatatgtaagtggagaattcaggtaagttcagatttttccctccagttggtttaatttctatttcctaaaacattaaaataataatggaatgattgaaataataaacatttttcttattcaagatttcgtcatggctattgtaaaggaaaccctaggaaaatggtgaaaacttgggcagaaaaagaaatgaggaacttaatcaggtgactgtctgggatgtgtgtatgtctgtcctatgccctgtacatgaacatcagcccttcctcccagcagatcccagtgtggttctgcccaaatgtagggacttgttagggcctttatttctattaggtctgctgaagtaagcagaagaaacacatgtctggacaaatagagattgtttcctattctgttgttttctattctgagaatccatttcaaaagaatactgccacaattcatatttattccacgaagctagatcatttggaaggccttgtaagccattgaaaatgtttagaatttatactgaggataataaggaactgctaaaggattttaatcaggaaagtgacacaatcagatggttataatgctctgtcatgttttcgtaggtattggagttttcgactaatcttgttaggtcgtgaactctttgtttatcatagtttccttttcttagtccagttttggacactttttttatattctttgtttgcactaacacctttttatcaggtaaaggcctcatctagttgagatcaagtttcctgaaaattatggagttttaaaaaatgtcttataactttttatatggtgtacacaggtgacacattggatagtgtagtattgagcaagtactactcgttttgaaagtcttttgtgttcaacaagctattaggtgtgagtccaactatttttattaagcatttttcaggctattcaacacaaaagatacttgtggacctatctcctctatttcctccattgtaagatgcacatttttttcagtttaacatctctggaattgctttgggtattacaggttatgggatgtaatagttgaattgctagtgttttatcattctcggtggtacataatggtgccacttaaaataatcttagagtttatgaaatattataatacatttgagaggccttggtgctatttcttaacagcaatattaatcttgggacctgcagttgtaatttatttagatgccttttcaacttttcagttgtccttttatttgttataatatcacaggctaaacacagcagagataccatgtccagaaccaataatgctaagaagtcatgttcttgtcatgagtttcatcggtaaagatgacatgtaagtacatggaagggctaataattgcattctcagaactgtatttttaagttctttgagtttatccactatatgaatatttcccatttgaataacttattaatctttcccactatattagtgaataagtgttatcaatgtattctaccttttcaagtctgaaaatgcttcagaatgaggagcaagttagtcctgtgttggagggtggtcttatacagtgtgttgggaaagcatctatttgccggtaccttcttggtttatgtgcattgagacagattgtcccacatacagctcacatgatgagttgtagaagagaagggcatgtaacagtatagtaagaagcaagaaaacttgttcttggtcattttatcttagttcttttcattcaaggcctgcaccactcttgaaaaatgtccagttatcagaatccaaggctcgggagttgtacctgcaggtcattcagtacatgagaagaatgtatcaggatgccagacttgtccatgcagatctcagtgaatttaacatgctgtgagtgtattttgtctcttaagaactgcctgtcagttgtttcgtgtcctttaaaatgataaa

SEQ ID NO: 35345 - DNA, 2300 bp, Homo sapien
atttaggatgttttccctctatgcatctcatttgttcagcaaataattataacctaggatatggaaatactctgcaacatacaaagataaatagggtccagtcactgcccttaaatatattatagtaaaactttgatttaagaaattcaggggcccgtgcggtggctcatgcctgtaatcccagcactttgggaggcagaggcgggtggatcacttgaggtcaggagttcgagaccagcctggccaacatgatgaaaccccatctctactaaaaatacaaaaattagctgggtgtggtggcaggcgcctgtaatcctagctgtttgggaggcaaaggcacgagtatcacttgaatccaggaggtggagattatattgagcagagatcgtgtcattgcactgcagcccaggtaacagagcaagactctgtctcaaaaaaaaaaaaaaaaaaaaaattcagggattattcttccctaatgtgtaataaagaggctacacaattgcacggtagaattatccttttaaaaaaaacccacatatctattaaccacccccccagtggtaacaaaagctcttgttagccaagggtccccttacggtcataggaaccaggctccacacagacccaaacaccacccagactcacaaaactgttcaatctgcaggcaaaacagaggaggaggcgaagagcccacgccaccaatcacacctctggctgcgttgcttcctcacccatcttactgcttcctgggcttttccaggcatccccaagaacacgaacggcttccagctaccaaacatgcctgctctaggaagacagtggctttcatttatctttctctaagggtgataaagaaagataagaggataaaataaacagattgacatgcccgacagatggaacaccccccacctcaacacacacccacacacatgcacatacacacacacacacatcagttgtccaggttggctcatcacacagtgaagagcgaggataacttgcccatagttataatcttagtgctacaatttacttatgcaagagctcaatttcttcatgtgtataatggaaataacacttgctctgccaaccttccaaatccacagtgagggtcaaatgagataaaatacgtgaacattcttgaacactgtgaaacatataaagcttaaggtaccacctgttaagccaaaagttctttgctggatgcgaaattttaaccgttaatgttcctgtctttatcccacatgtaaatcagtaaacctccctcttggacacatttaagatgcattcatttagaaagcagttattgaacatctaccatgttacacaacagattcaatgctagacacatgaagatgaataaagcatgactctttttctgcaggatatcaaagtctgcagtagtaaaacaaataattacaatacaacattaagtatgctataatgaaggtatatttatagaattttgaaagcgcagcaaagaggtttaaaagtagcttgttttcttacaacttggtttaaaaaatcagaatccaaagtctggcagagtcttcactggctgacctaaggtcagctattttttccctgccactcatagatagctccccttgtactgataaaacagatcactgacaggcaactttctctctggctgaccttagaaatcaccttgcagttaggaaagacgaatcagtcatattcagagcagatttttaaaagaaaacgacactttgatttcagtgagattaagaagaatcatttacttgctcaaaatcccatgggaactctctatatctttgtgttggtaaatgatacctcttcatcacaagaagatttatagcccatgagttaaaataactgttctgcctaacagaggagtagttctggggtttttgttttgttttgttttgtttgagacagagtctcacacttgtcgcccagcctggagtgcagtggcatgatcttggctcactacaacctctgccttctgagctcaagtcatcctcctgcctcagcctccccagtagctgagactataggcgcacaccaccacactggactaatttttgtattttttgtagatacaggatttcaccttgttgcccaagctgatctggaactcctgggctcgagcaatccacccaccttggcctcccaaagtgctgggattaccggcatgaaccacagtgcccggccaaggagtagtattttaataagtcaaaattacaggcagaagctaggattggaaccataatgtgaaggaaaagaaaatgcctgttaaaatgtcagacaattaa

SEQ ID NO: 35346 - DNA, 2300 bp, Homo sapien
taggttataattatttgctgaacaaatgagatgcatagagggaaaacatcctaaatgaaatgttgtacattatgcactgacattttccctccatgcatgtctttctctcctccaccaatggatattatgggctgtttgtgcagaggctgacttccagccattgattctgtttgagaaaaaccaccgtcttgtctatagatcagtgtttgtacaggttgagcatccctaatctgaaaatctgaaatccaaaatgctcccaaatccaaactttctgagcactgacatgatgaccacaagtggcgaattccacacctgacctcatgtgatgacttgcagtcaaagtgcagtcaaaactttgtttcatgcacaaaattatctaaaatattgtataaaattaccttcaggccatgtgtataaggcatatagaaaacataaataaatttcatgtttaggcttgagttccatccccaaagatctctcgttacgtctatgcaactattgcaaaatccaagaaaatccagaatccaaaatatttctggtcccaagcattttggataaggggtactcaatctgtataatcatttaaacacttgaccactttggttttattaaagattcgaggaaattgagactacgatgcaaattattggttgtgctaacagtgataaacttttatctcattatatgtgtttactccttgaatttaagacgttcagctgtaaaaagaaaaagaacaagacattttgtcaaaaattatgcctaaagggtcaagttgtcatgagaagtgctataatacgacaaattttagaaagtcccccccactccctttacaacataaaaatgtagttttttatttttgttttcagttcataaacattttggaaacgcactgtatcagaaggtaattagcggcattgtttggaaagatgaaaaatttattagaaaagatctttaaatggcttttactaaagcgtcatttaacaatttttcatattatagaaacagcttttcatggatggtgtgactgggtctgtatccaaacccggttcggttcctggagccaacggcgtagttaacactcagcctcttgcagttaacactcagcctcttaactgggagtggccctggagcaagtcgctggaatgttcaagctccgcgtcactcatcggtaccaagttgatgatctctgcctagggttcttcgccaccctcaggctcaagtcccaggaggcctcctccgctgacttgggtgaacagctctgagttccggagagggttcggtctgcggagaagcgcgcgagagacaagcatcctcaaggttctggtacaaaatttggaaaatggacctggcgttgaaatctttactcctcgtttaaaaagaccatcgaaagggaaaaaataaaagaaattgcagtttatatttttgttatcccatgaaaaattagctgcagtgttttcctcttcatgccaaagagattaatatttacggtgaagacttttccaggaagtcgtggttttctgtaaaaaaaggttttacacatcagaaatcggacttctggggcaatttcctgaattcctggaataaaacaaaacaaaaaaaagcccccaaacaaaactctatcatctaaagcgttccctcctcactgtggtcctagtcaatgcgtggtaggtagcgtttccagtgatcaacaaaagtaaatatttgaccagtaagtctccaatcgagaggcccctccattccagctatttccgcccggggaccgaggaaatcctcaaaagccgggccacgcattcccagcccgagaggccccagcgcagagcgcagcagcccccgcgagcgcaggtcctccccgcggtggcttcgcccagggcgcttgggtctcggggaccccgcccccgccccgcccggtgttactcaggcctcggtggcgcagggcggagtcgcgggcggcgggcgcaggtggggaggggcggccggagcgcgtcggtgacacccgcgggggggcggggaaggcgcggcggccgcaccccaccctgggaagaaaccggccaggtgtggcctaggcgcccagtgccagcggggaggagactcgctccgccgccgaccaacaccaacacccagctccgacgcagctcctctgcgcccttgccgccctccgagccacagctttcctcccgctcctgcccccggcccgtcgccgtctccgcgctcgcagcggcctcgggagggcccaggtagcgagcagcgacctcgcgagccttccgcactcccgcccggttccccggccgtccgcctatcct

SEQ ID NO: 35347 - DNA, 2300 bp, Homo sapien
caagttaggacaacaaatgtgatcttgcttgtatctcagcagtatgagaaacggacctcatttcctgtataattcggagtggaagacagagactggttgcattggtggtgggtgggggcagtcttggtttcgagagctggatggctctggcaccacctcccctgggcctgcctggaggagcctgtgtcttcttctgggagtagttcccagggaggtctgggctcctcacccacattcatctagtcctggcttgttggggagccttgcctgcagggaggaaccccaaatgggtggccaaaaaagaaatgctttcccatggtgagacagtgcagccaggtgcttcgggagaattcccacattactgtgatcttatcccatctatgcataatgcaaccattgtttgtcaaacatttttttttaaacagtgaaattctttctttaaaacacacacacacacacacacacacacacacacacacacacacacccagttggttagacaggcatcagataaaagcaggctcaggctggccctggctgaaggtaggaagagccaacttcttgtagcacatccgtgaggacttttcacagacattaaataatcacttggtctgctttaaatctctctgaaaccaaactacagtaggctgtgctgtggcataatatatcttggtaaatttaaaagccagactttggttataccttgcttgaagagcaaatgaaactctgtcatctcgttctttaagatacagaccatctgcaacattttccgccaacaccaccgttgttttaaggtttctgctaggtgtcttccagaaaagtgcctcatttgaaatgtacattgaatgagcttcattgtagagaaaaataggtattctaggaacatcttgaaaggagaatgggtttgttttgcgataaagacaatgtatttaaattttccatcactttcttcacaccatgatttttaaaaaaaacattattgtcttttacaggaattacagaaaatatatatatatatttttacagacagggtctcactctgtcaccgaggcaagagtgcagtgctgtgatcatagctcactgtagcctccaactcgtgggctcaagtgatcctcccacctcagctgcctgagtagctagagctacaggcatgcatcaccatgtttggctaatttaaaaacaatcttttttttttttgtaagacagggtcttgctatgttgctcaggctggtctccaactcctagacttaatcagtctgcctgccttggcttcccaaagcactgggattacaggtgtgaaccactgtgtccggccaatatttttgtagagtaagcttttttctcctctcctacctttccttcagcccgacttgccagtgaaatcttcatgctctgtgtctgacaccatgaggtcttcctgcagagggacttgtggtgttggggactgtcattagggaccgctgtgggatgaagcaggagtgaagctgaaatagctgtgtgtcattgtcattgccagaagtgtgtttttataactcagagagatatatttctggattggatcctggacctgggaggggaaaacttgctgtgaatgacattattgggctaattggtgaaatctgaacaagttctataaattagaaaatcatttgtgtcaattgtaaattttctgcttctcatcattgtattgtggttatatataagtgaatgtttttattcttaggaatgatatgctaagatatttgggggttaaaaagccatgttctcaaatgattcagaaaaaaataatatgtatacatagataaatatatgctgaaatatttgggggtagaagggcatggttattctcaagtggttcagaaaaaataatatatacacacagataaatacacacacatctatggagaggggagaagggggataaaagaaacacaacaaaatgttaacaattgggattccgggtaaagggtctcacaggagtggttttgtcccgtttttgcaacttttgcaagtttgaaattatttcagaattgaaataggttatttgatgtctggtttctctgtgtttgcctccttagtcaaaccggcacgatgtccaggcaccagaaccagaacaccatccaggagctgctgcagaactgctccgactgcttgatgcgagcagagctcatcgtgcagcctgtaagctttccctgttcccatcgcttctcccaaagccttggccacacccgactgtcctctggttagcttctgctggccggggcctattcactgacctctttcacgtagtgtttagagac

SEQ ID NO: 35348 - DNA, 2300 bp, Homo sapien
tccctccaggcttgtgccaatgttgtcatgaagctctgagatgacatggggctgtatcctgaagagaggatatgtttgacgtgggctaagttttaatttggttcacatatacaaacagggaaatatacactagaactttttatcaggagtcatgtcacatcagaaatagtctcacatttttccagaccaaccagctaactatggaaatgcaaataaaaagtaaggataccgggctgggcgcggtggctcacgtctgtaatcccagcactttgggaggctgaggcgagcagatcacaaggtcaggagttcgagaccagcctggccaatatggtgaaaccccatctctattaaaaatagaaaaattagcagggtgtggtggcatgtgcctgtagtcccagctactcgggaggctgtggcagaagaattgcttgaacccgggagatggaggttgcagtgagctgagattgcgccactgcactccagcctgggtggcagagccagactccgtctcaaaaaaaaaaaaaaaaagatactgtaggcagagtatgaatacattaacttcatactcctctcttaccagcttctagccacttctgtattttatggtgctgcctatttatagtcttatgactatttttttaagtgagaaccgtgctatttgcctttagaaataattgttcaccaaaaaattcccccacagttccttcacatgggtaaacaaagtgcaaaaggaaaccaaggtttgacacttgggcttgaaaaaattttaaaaagtaatataaaatgggttagattctaggagttgaaaccatttggggaaactacaagggctaattccaggtgttgggtaggaaatgtacaaagttaagcttgtgttatcaaagcaagaaagcattcaaggactaatagggatacatgaaagacacagatggcttaatgtggcttccactggccacatttgggacaatttgagcatcaacaagaattatgatgttaaaggagtatattatattgaattaaaaaaaaaccttaaatcaataactttaaaaacaccttgattcccatagtgaagcaaacactaaaatggaggtgtggaaagaatgccagttaataaacataaaaggcatgatactattgcggaatcacttataactcctaatgtaacaacagattcagtgaaggactgtatcaaggagttggggaacaggttattcttatggactcaaggtataatccacagattgcttaccaattcctaagaggaaaatgtactattagaatgaagagatgtagccaccacctttaccaagtgatcaaatttagcattactaatataactgagttatgcgtccccgtgagttggcaacatctcttaggtagtattgcaaaagtgctcaaactgaatctaatcatgagggaaacaaaatctgacaaatccagaatgagagagattctacaagacaactggcctaggctcatcacaacatgtaatgatttaataatttaaaaaggagggtgaaggaggctgatctggattaaaagagacaataactaattatagcttatgagttgaaaaaataaaactgctatagaaataattttggggacaatggggaaatttgaatatgaactgtataataaatgattttatggacttactaattttcttaggtttgatcatgtattgcggttacacaggaaaatgttcttattcttagaacatgcatgctaacatatttgggggtgaaaaatctgcaacttactttcaaagaattcagcaaaaatcattgggtggggctgtgaatgtggagagaagagacggagagaaatcaaacctggcaaaatgttaacaatgagctgaaggacggctaaacgaaagctcattgtactatttttaaaacttttctgtagctataagccgttttttctgaggaagtcgaggagggcgaatatctttctggaaaggccagagcaaatgcacgcaagagctgagaaaagattggaaaacgcctctcaaaataacagtcccgcccttcccgggactcttccctataggctgttcaagtcacgtggcgactgtggccccgcccacagctcccagaggcctgcgcgtgcggtctgcagttcggccgcttcctcttggcgggtgggctgcagctatggagggcgagcctccacctgtggaggagcggcggcggctgcaggaggagctgaacgagttcgtggagagcggctgccggacgttggaggaggtgaccgcgtccctgggctgggacctagatagtctggatcccggggaa

SEQ ID NO: 35349 - DNA, 2300 bp, Homo sapien
ttttttatttgagaaaatttgaatctcaaaacaaaaattttcttcaatgtttaatacatcatatcaaggtattgtatttactttttttcactaatgagcagattttagaaaattctgtaactaccggggggcactgctattaacttttttcaattaatttggttaagccactatgcttcctcctcaggaaattaaaatgagtttaatttaatctgtgctttcctggcgtgaggaggtgtgggatttctgctacttaattattttgtggcccctagctctaagtccttgcacaagtgggatatattttgaatattgaccatctagcttgatgtctcatacaaaaagatattttttacacagtttttaatatttccatagtttattttcaaagggactgtaatgcatattacttattaaaagcattttttcccccaactttgatggggaaaagcatatcaacagatacctacttttgtagatggctataaaaattgttacccaaaaggctttcttagagcaaattgtctcttatgattattcctgcctgcctccatgggatctgtctttatattgttggagagaatagcaaacatccataatacattttttttttttttgtggatataacattcaggatagaattgtttgtcatttattgcttagattgatattttgtatacttagggattatgaaaaaagtttgtgttaatattgcattattaaagcacatgtttaaagataattattagattttaagttcacaatgcttcatgtattgtttattcttgtgattttatttttactttaggaatttattcttcattgcctgttgaagttcctttgaatcacaaacggtttgtttgtgatctaactcaagctgatcgtcttgccctctatgatttcgtagttgaggagacaaagaaaaagcgctctgattctcaaattattgaaaatgacagcgatctctttgtagacttggctgccaaaatcaatcaaggtttgagatgcacatcatggctttacatttcttcattatcattttattctatgagtgttattaagatgatttaattcttgggccactttgagttagagtaaaatggttttgtatcatttaatattgacatgaagttggccctctgtgtctgtgggttccatatccatcaatttgaccaacggtggattgaaaatatttggaaaaaataaaagtgtgtggttgcctctgtactatacatgtagagactttttattcttgtcataattccataaacaatatattaacaactattcatgcagcatttacatcgtatcaggtttttggtgttttttttgttttgtttttttgagactgagtcttactctgtcacccgggctggaatgcagtagcgcgatctcagttcgttgcaatctctgcctcccaagctgaagcaattctcgtgcctcagcctcctgagtagctgggattacagacatgtgccaccacacctggctactttttgtatttttagtagagatggggttttgctacgctggccaggctggtcccaaactcctggcctcaagtgatcctcctgtcttggcctcccaaagtgctgggattacaacgtgagccactgtacccggcctgtattaggtattgaaagtaatttagagatgacttcaagtgtactggagggtgtgtgtaggttatatacaaatactacaccattttatatcagagacttgagcatccatggattttgatatccttgggggttcctgaacaaattctgcatggatactgagggatatttactcagtacctgaggttttactctgacttttacattaaatgtaccttctttctgtgaaaatattacaactgtgctgttactttaatctatgtacctaagcactcttatgttcaactaatggctggagagaagaaatgatataaaacttagcccgtgtatataaataatatacaatttttagaatgtttttatgtgctactttgaaacaagttaaaatataggattgtgatgtatttatttgataattcatagaatttaaaagctttgaaggatataatacttttattttattctttcattagacaatagtcgaaaaagtccaaaatcctaccttgaaatcctggcagaagtacgagattataaaagaagacgccagtcctatagagccaagaatgttcacataaccaagaaatcatatactgaggtaagttttacataatctttgttgataagaatttcccttaggtaattttctaaatctgttctatgaatttccacaattctttg

SEQ ID NO: 35350 - DNA, 2300 bp, Homo sapien
cagacaaagtatcgtattatcttttcggatggaagaaatccctgtagagatggttaaagactggcattcacataagttttgtgccctgaaattcatagctatcagatatttgtagaaataaagactcttctaaatgaccacttgtgtctgggccaaggcagaactagaaagaaggactcagtgggtagttggagtcagtggtggtctctatttacccatgagaaatagattcttggaaataggataggaatgcttataagatttggaccaacagaaagcctatgatctcataaattcatgaatcccacagtctataatctatttgacttcactctcaaatgcctaggaccatttggactaaggctggcaagtcagaaaattgcagtttttattttcaactccacacaattttcaccaagtaaaaaaccttcatgttttacgtgaatttgcttctacgatccatagatgactggatgttctcgggcggggtaaaggcaaatgaatttgtgtcctcattggcaaatggtgttggtggtggtgttatcttgtctaaaatccacaggaacctgtgtttcaggaccctgtctattgtcctgaccattcagaatgcatgccaagcccctgctcttcctggagttatctttatcacctctcctcaagttttatcttgcaccatataagtcacattgtatttcaatattaaaatgcaacattaatagataagctggagaatcaagacatttccaagaagacaggggacgccttttctaatatatcgtctgattacaccctctttcttttgggtgctagcttaagaagccaaaccaaagcacaaatgaacagagaagtcaacacatccgaccccaaaccctcaggacgctggcttgggttacatgtggccctctctgtggtcagtttgtgagtagcctccccggagggtgtgtcccaacttccagcagctgccgtggaaagccacgtgtccgctaaacgcctacattacatcaataagagaaactaaggaagggatggaaaagctatcatttttcttttcttcctcagttctggcagtatagtgatttaatcgctgttattatttttatttagttaaagcatcaacttaggccttttaaatgatggtaaaagagaaagcttcagatcggggtattggtcagatcattcttactagcgatgacctcttcgcctttggcacctcgcggctcttcgcatgcctccaagaattcccgggtcttgaaacctacgcgcggcggaggcgacgcctctcgggagagggagggtgaaagaaggggcggggctatttaaatagcccgcgagcttcgcgtccccattggctgccagcctgtcggttaccgcggggcggggagtcccggggctggagtgaggtacctgagccgggcgcgcagcagaaagcccacgttggccgctgcggggagcgcggcgtggagaggcgggagaccgaattccggcgccgccgccgcggccgctgctcggtgcactagcccccttccttcccatcctttctgcgagcgggtttgctgggcagccgggcgaccgccgaacggaaagcaagatcctcgccgcctccgcttgaggaggcgtgcggcgcgcggagattttgagtgggagcgacggtgcccgagagctcaggggcgcggagttcgtgagcgagaaggaagttaaacctcgcggaatagactggcatttcgggacgccttgtcgccgcagcctgggccctgcaacggggtaaacttcatggtggccctgcgatctggggaggggcgtgcgccacggtgatgccgggcatctcccgcagctcgtgagcggccccgctccccgctgccccgggtcccactcagtcgccagggagagcgcggggcagcgcacgtgtgcggccagcgaggcccagagtgaccgcgccgcgactcgcaggagccagggcgcaggctgcagtgcagcccggactcagacgcacctggcctggaccgcgcgcctctagagacctgcgcgaggctgtgaggctccccttcctcccctccaagcggttctcctggtgatcgccccttcgccacctctctagcctgggcaactgggggcgccccggacgaccatgagagataaggactgagggccaggaaggggaagcgagcccgccgagaggtggcggggactgctcacgccaagggccacagcggccgcgctccggcctcgctccgccgctccacgcctcgcgggatccgcgggggcagcccggccgggcggggatgccggggctggggcggagg

SEQ ID NO: 35351 - DNA, 2300 bp, Homo sapien
ttccgtgtgcaaagtcgcaaacttgatttattaattccatttagtgtgccacttgataattcatttcaccttcacagatggcagtctgattttgagttttgctggcttttccacagcctagagataaattatggcctcggctgctttgtttattttgaagagatggccaaatctgaattggcagccccagagcccgttctgcaaagagatggggtagagccttgtagaatgttcactggacgaacttggagaccgtccacgttcgacctcacccaagagctctctctaaaaggaccctggctctgtgctcccccaagcacgcagaagaccctccctcagtttgcactgtgcctgggattctttccagcatttcctactttatacagagaagccaagagtggtgtctgacaacttctgtgtaactggattttctggaaatatccagtgtagctccagggacatcacttttattcttctacactttccagcacccaccagacaccatgcatagatttcctttcttaaaaatctcatttttctaccttgccatggggctgatttgtatccaaaagtaatgctgcgtgtctaggactgaatgatggttaacaggatgatctacttgggatggtgagatggtcaaaagcataaacttgggggttgggtagacctggctggctgaccttgggaaaaacctctccacgcctcggtctccccctttgcaaaactgagctaagatctactgtgtggtgtctgggcagatgaaagtacactgcttagtgtgatgcttagcatggggcagatgcttggtaaattgtaatcacttttgttgtcagttaaatggatatttcactgttgcctcttaaacgcttacgataatatatactaattatacatgttattatcagtttatatttattgaacatttcggggaagtaattataaaataatcttgtctactgtcttaccccattccttgtatccttacttaattattgtatgaaattttatgggagattcttttaggtttatatccatagaggatcctagcagacctaggcgtgagcagacacaagcccaggtgaccacgctgaagcccttcatccctggcacatgtggctgggttacactggacccttaaaaatgcttgtcctctcccgaccttgggctgaggcctcttgtacttcagttccgcaccttagctgctctctgacgggtcttaggtgttgaaatagtatttttacccccgtttgctgacatagtgaataacaacttagtcctgcctattttagtgctggtagaaaataaaaaagaaagcaatgacttagaacaagatgtttcatgaaaatgttgggcaagcagcagctttatgagatttaaatgaaagaaaaagcttgaagagctgtgcttgttggtaaattaagtttataaaattaaggacggattataatcttgacatctttgcagtcttacctttattatataccaactactcctgtttaaaattcacttcttgctccctgttgattttaaaaccctctaagcttcagcatgagagtaaattctaagctggcatgtgaactggtctgggtcccagtcaccgacagccaggctaacccccctcccaccaccaccaaatgtcaagccagggccctgactcaagctaccaggtgctgactttacttgctcgagttaaaatgttgcttcctaaaaaccggcatgtttaactgagctattaatacaataaatcttgcctctaaagtctttcctttactccttttagctcaggtatgttttagcatagctttcaggaacattctcttcaaaaactgcaccttgctggcagagttgctacagaatgtggattttgaaaagaatatttgtaacgtacaaagtgtccagtagccccattagcaagaaggttcatgaagaaactgactgggaagttgatctgcttttattctcaggttgattgtacacagcactatgaactctgctccggaaaccaggttcgtggctatcccactcttctctggttccgagatgggaaaaaggtacgtctgcacttcttagtactgagaattcttcatctcttaaccccatcaggctgagctactgagtggtttaatgggcacagtgaattgccaatcttgattgttagggcactggtttggagaaatgtgtataatgaaacaaacgtctttctcttaattgataagatttgggttgtggagatgaaccttgaaacatttcagtggcccaggttatcactagaataacccacatcttacagtcacagggta

SEQ ID NO: 35352 - DNA, 2300 bp, Homo sapien
gaggggattgtagaagatggtggggtgggtagctcagaggtcatgatgagaaagaagcattgcagaaatgggtttcttgagcaaacagtcgaggaggtgctgggcagagtggatgccttcagattttggagatggtgcagatgctggtgatgacaagtgctagggtctcccttttgggtgtgagttactgagggaaaggtagatggagcatccacctggatgctgaagatgccaggaatgaaagacaggaaaggggtggccaggaacactgtgagccaggaaccaaagtcttcactgaaccaggaagagtgatgtggaagaatgacaggaactggcagggaagagggtgccatgcccagtggcatcaatttaaggagtactgaaggttttgtaggatttggaaggagcaatggggaaccaggaaggcatcagctttacttcctggctctgagggactccaggtgtgaaagaatgagcagccaacacttgagagagctcctagaactgtgtttcagttaaaaacgaaagacactgatgctgtaagagtgtatggcgatgcttgtgggaatttcccaacagcaccgtggaagggtttgggaggtttgaggtgttggagaacacagggattagagtttggcaataacagttattggagagaatccctggatttctagtgttgagtgagtttcacagggacacaaagcatgatgcaaccacatcacggaaggccttgaatggctgccccaggcatgactatttcaccccatcggccaaggccatggggacagtggtggcgttttggtccaagtttaagcagcaaactgtcttggtcaaaggcaggctttaggaaaattaattttccagccatgtgaatgaaagagactcttagaaagctactgcaataggccaggcttagtctccgttcagggtatgaacactgagaatgctggaaggaaatcatggttacaggaaatgcggttgaattttgagacacacgggaaaagagcgagcaatacaagatgcctcccatgtttcaagcttaagtggctggaagaacagactttggagggagattgatggttttggtgtttggcaacccatggttaaaggttcataagtggctgggcctaaggcgggagcagaataatgacaggtgagacagtgggcgcgtcccctgttgccaagccaggagttaactacctggggcttcctggattgaggataatcaaagagcaggcaggatcccggagagcaacccggtgattctaatttagcttcagatccccggggtagggctggagctttcgattaccatctgctgtaaggtgtgtgtgcaggtgcgagttatgagtcgctgggcagggatgccttcgggccattccacaggctgagttcagccatagcaggcgtgctgtcattcattttagtaaccggcataaatgagggcacagtaggaccccagtcagtcctgctaggtgccttcttgtctagaagaggccgctttgactttctttcctcttcatccctgagttgaggccgggcaggggtaaccagcaaggggttcacttgggaagcgggtttcatcacccctctgagcccaggtcgagaatcacagttgagctctggccaagaatctaactaattcaggtgcaaaccccaccgtcttttgcccgatttcctatattctgctgacagcagctctctccttcctttggcctgaaatcgcggggtgcttgtgtgagctgagattagccgaggctgacctgcccctccgtggcttcccgctggcctcatcgttacttcgtgtgttcaccgccgctctgagcagagcgggcccctggggaaaggggtgcgggcctgggttgcggaggcgcaggagcctcgcgggattggggcgagccgtcccatggcgggaaggcaggaggccggactcggaaggctctcccagactcggtccctcgctccagcccttccctgccggtgcgcggagccggggctcgggcgggtagcggtcgcgcgccggcgcgggcgggcggggagaggaaggggcgcggcctctccggggcggggcgcggggcgggcgctgcgaggggaccggaggccgcggcgagagcgcgcccagccccgccgcgatgcccgcgcgcccaggacgcctcctcccgctgctggcccggccggcggccctgactgcgctgctgctgctgctgctgggccatggcggcggcgggcgctggggcgcccgggcccaggaggcggcggcggcggcggcggacgggccccccgcggcagacggcgaggac

SEQ ID NO: 35353 - DNA, 2300 bp, Homo sapien
tagctgtctgagccgcagtgtaaagatttatataaaagcggagagagaacagaggcatatgctggacctcaccatcccagagaacaatacaacttaatagtgtataatcaaatggctagaacacatattcacaggctacaagcaacagacttgcagaaaagtaattgtgtacttattcagtgttggctcccctgcaggctgcatgaggaaaggaaaaggctgcattagtcttgttcaccactgtgtcttagctcctagcactatgctgggcacgtagcagctgctcaataacgtatttgttaaatgtttttgaatgaaaaaatgaaaagcccatgtggcctgttaaagttaatatggcttctctctcccttctctccaaatctcccttccccactctctcttcacccaccacctatgcttaaacacatacacagagacacagaggcagttgtttctgccacatacaagtcaggcagtcatttaacctctctgtgcctcagcctcctcgtctgtaaatgaggacattaataataactacttcaaaggccggccatgaggattaaatgaatgcaaatttgtagaccacttacagtattacctggcatgtagcaagtgccatgtaagtgtttgttaaactgcagtgctatccgaagttagcacagacttcagaggtcaaagcatggtcctcctcaagactccccttcagacacctgccacaagctttggggttcccaggccacctgcacttctgaccagctgtctctgtcatatgcccagggcctgagcactgtctgctagggtgcctcagttctcacccacgcagcttctctctacacatgatgtttcattgctattcgctttactccctcaggtttcacagaatgactcatagaactcaagaaagtgctttccttgctattacagttttattataaaggacacatatcaggaccagccaaatgaagagatgtatagggcgagatgtgggagatttcccaaatagaagcttacgtgtcctcaggaacgcttccccctcctgacactttgatgaatgattatcgaccagtaagctcacctgagcttccacatccagagtactcactggggttccattatgtaggcatagttggttaaatcactggccacatggctgaactcagtctccagccccaatctgctccccagaggtgggcctgcttatgtgactcaaagcctaagccctcatggttggccggcccttctggtgtggccagcctccattctgaaatcatcttgggccctccatgagccatctcattagcataaactcaggtgtatttccagaggcccaccatgaataacaaagacacttctatcacttgggaaattctaaggattgagggtacctcccaggaaccagagtcaaagtccagtcaaattctttattatacaacgtgagtttactgacttgaacagaaagagggagcaagagaagcattctaggaaacaggtgtctaaaaagaaaggcaggaatagtcagccacactcatggcatagtagggaaacagcccccagctaattggctttgctatacagtagtccccccttatctgaggtttcactttctgtggtttcattacccgcaggacggtacaataagatattttgggagagagactacattcacataacttttattaaattgttctaattgttcatctcttactgtgcctaatttataaactttatcatatgtatatacaggaaaaaacatagtatatacatggttcagtactatatgcagtttcaggaatctactgggggtcttggaatgtattctcagcagatatgggaggacaactgtactggaatgcaccagctttgagccaaataaccagggctctgagtttagctccaaagttcaagcaccttcctattctagcagcatccgccctgatccagcatggcggcaagagcttctgccagttcacagcctgactacacggcaggcgcctttccggaaccgcccgctgggtagattaaatttctccggcgccctgtaatgacacacacacaaaaaaaacccgggcgcgccttgtaagagggcggccgggtttgcgcaggcgcagcgtggccgcgggtgggcggaactggtcgggatgagtggcggagggacagagacccctgtgggttgtgaggccgccccgggcggtggcagcaagaagagggactccctggggactgcgggctcagcgcacctcattatcaagggtacggagtgtcagggctatagttcctggtggatcccagcacagcctcat

SEQ ID NO: 35354 - DNA, 2300 bp, Homo sapien
tttgttcttgttttttttttagtatcattatgaactcatagacttaaacatattcaacatgtttcaattcattgcaattattcttatcgactctcagcttgtaatgactattattgaccctcaagtgatctgatcctaccctttgactcccctcattactcttagatactttcttttctttctactataactagatggtccagactgatctccccgcaaggtttggattcagccggtctccaaagagcccccatttctttttgtgggaaatagtatttgaaaccagaatctgggtgctggggtgctcattgctactgagttgtccttgtttctaggccttttaagtaaacagagctaggtaggaaatacttttcattttccttaagataaaagcgtcataagttcatattgatattacaattcaaattcaggaccagaaagttttgatttaacctcatctaccttacaactcctcttttgggcaacaccaaacacccaactttccagcaacaccacatgattgcatctttgctttattccacagtacatatacagcaccataccaatgctgacactgccaagatgctaaccaaaccaacaaacaaaaagaaccaaaaacaggttttcatgaattttgtccttaaagcatatcttactaagagtatacaattaaatgactgtgctataaagtcacttaaaagaggtccacactgggtgatgatgtcatcaatttgatgtacaatatgctttgttctgctttcagttttttagggatttcttttttaatttgatatttctataattatgcaaaggccaaaccttattttcaatataccacccattggcattggataaatgttaatttttttaaaaaatgttttattacaagcaaaaagtgtacctaaaccctgaaaatggatatgtgaattatcttagagggttggtcttttaaaaagtagtagaatagtcattccattatctgaatatggaaagtaaaacagataatttagtgcctaacaatccacttatactgaaatttcttttgtattttgttatgttgatttggcaaaagtttcttttccttatgtttacttctgctgacagagtaaactcattaagtattctgggatagggaaggtgtaacacagtaacaacattccccactaaactttgatatttctgattcaatgatgagttaccttgtaggattgttctatttctctcagactaatacacactttgtttattcattcttcaaagtggaaaatattttgtattttcacaaatcttttggaaatattcaacatatactactaattttctttctttcttcctttctttcttttttgaagatacaagaatgtagcaagttagtggggcaaagttatgcaccttgtttatttatataccaaaacttcataaattatgtaaccagccttctggtactgcaaaaaaagatcattaatgccattaatggcttatttccttgagctgtaattatttgacccctatctgacatactccgtgttctgtgaataatctttaaatgtataattctactgctagtgttgagctgtagatcaacagtagaaaaaccagtttttcgaattcaccactacaacacaattaaaatcctcatgaattatgctacacgttagaaactcctaatggactgtgaactttttgctattcaatttgattgttcaaatttacagattcctgaaccaaactaaggcaaatttcagttcccatcatatataaattctcttagactagcaaatgagttaacgagttaccgctggcagccatgtcaatagattgccatttagagatccagatccagtctactgcagccaccgaagcccggccttggggcctttctaccagtaactagctccccaacagttcgagtggaaatttaccatcacttctccacctgtctcacaccccgccctcagccccgccccttccaccggccccgcctcctgtgctttggcgcgcgctctccacgccccttccgttcagccaatcgccgctgaagtttgcaggagtgggacttctgtttccaccaatgcgggaggttcttgttctgcaggtctcgcgtctgccaggagctacggccggaagatggcggcggccgcagagttgtcgctactggagaagtccctgggactgagtaaggggaataaatacagtgctcagggcgagcgacaggtgagaaggagaggcggcgcggaggggaagaggtggacgggagcggggcctgccgagccctggcaggacccgggccggccaccaga

SEQ ID NO: 35355 - DNA, 2300 bp, Homo sapien
cagaatgaaatctctctagcactgtcttttctacatgtatgccaaaataccgacattgctactgaaactccccacaaaacatttgaaatgaacatgaaaataaatttgtttcctctgcctgaggcatcagtctcataaaacttgcccaccaaagccttgcatttagaatgctgttttattaataagaacatcactggtgagaaagtgtgactgataaagacctctgatacctaataactgtgatcattggggaatgtctgccatatcccttccacttcaaacattaatgactgatactaaccatcatctaaaaaaaaaaatgggccaaactccttgtgatgcaaggagcaaaaatgaagcatggaattaaaattagttttcagactaaatgatcaacattgtgctttgcttttgaagctcacagtaatcagtgaaactaaaatatatatatatatattttaaaaatcacaggtgtgtataattgcctgaggcctcttcctaaattcaacacagatattcaacttcaactgctaaaatggaataaaaaggtagcatttccggcatacaatgtatatttaaaaattaaaattagtgataatgttgagttacaatgacctattgaagtcacaattatttcagtttatttttgagttttccgacctgaaggacaaaagtcccacaccaaaaaaaggtagaatatgaaaaaaaagtcattacggtgtcattaacctgaaaaaacgtgattttaactatactttgccacactcaacgttacaaataaaagaatcttaccatgccattatgccttgattaactgcgctccggaatcaatcatggcctatggtgtacgattataaaacagaaaaaacaaagttccatctcatttctttgtacacacatcattacacaaaggtggagaaaccctgtgctaatgtttgaagactattcttttttttttccaagagaaaaagttaacactaggactttatatattaagtaattaagtaaaaataacgctgtctaaattattttgaaatgctgcctctcttccaagttccaaactatctcaattcacttagaaaaacgtttaatcaaaaaacaattctaggcttctgatatcctaatgtagaaaaaatgcagatactcaacacttaagattttgttagcgcaccaaatcattccatcttttactttcaatattccttaaataataaaaagacgggagagataattcagttgcaaagactggaggaaacttgcagaacttctagtggaagtttatgccataaacttaatagcccagccagaacaatcacattctactgcaagccaaatggagaaaagagtaccttggagtgcccctatttaataaacacggaacgaggaaacagttaactgtaaatacagtctagaggtatccaggtgactgacagttctccagagaccccgagaacagcgtaaaagaccccttgaggtcacctcacccctgcgagtccacggattgggacctgagggagttctcgccagcccgagggcgaaaaacgggcgaggaggaacagatgctcctccctggaaaccgcccggccggtttccgctctttcaaaaaagggaatcacccgtttcttccatcccgacctcatccattcctcgaacgctccttctggatgaggaagatgggcagtgtcaaggttttctggaggagaggagatctgggtcccaaacacaggaaaggccccgaaggcacgcgtaccccaaggccggtatgtcacccggaagggtgacggcagcctgcgtggcgtctgagctagacggagcatctccccctcccctggtccgtcgccatcacctcctcttcctcctcctcctcgcccactcctgcactttccaccgcggcggtcgcctccccggaaagcactctcaactccggcgcccgcaggccacttccgcctatgtgtccctgcgcgcgtgcgcagacgcgtggccccgcctcccgacaggcctgtgtggccggtggcgggcgggccgttacctcccgcgcatgctctatggggtagagacgctaggccggcactgcctaggtgggccgggcggtgcgagggtcgcctttcagcctttacctctacccactgaaatggagtaggtcggtgagcgccgatctgctggagaatctcattatcccatcggcgctctgcctgctcctggcctccaagcctctgaagcccctcgggtttcagctgccggctaccctcgagcccgtggtgcccacgagagaggcgactttacgtcagcggccctgggct

SEQ ID NO: 35356 - DNA, 2300 bp, Homo sapien
aggtgaaaccccatctctactaaaaatacaaaaattagccgggcatggtgacaggcgcctataatcccagctactcgggaggctgagacaggagaatggcttgaacccaggaggcagaggttgcagtgagctgagatgtgccactgcactccagcctgagcgacagagtgagcctctgcctcaatcagtcaatcagtcaataaaaaacaattcatagctgcaagtctttaattttgtttaccacgtggttatcacaggagtaaatgggaagtattgtaagagagtcgatatttattaaacacctactctataataagtactactccagatagtctctcctacatttcacatttgacatgtaaaaatatttcactgacatggtagtcagagaagagccaggtgacatttgagcagtgactggaaaaaaatgaggaagcaagctctgtggacatctgagagggcagtgttccatgcagaaggaacaacagctacaaagcactgatgcttgctgtgcttgggggcaattagaaaagctctgaagtgtagcttggatgtgatccatcaagaataagttcagtcttaaaagtcagggtaagaattttgaactttaatctgagtaaaatggtaaaccgctaaaaggttctgcacagaggagtggcatattcaggttctaatgggatcactccagctgctgaatgcaactatgtagagaaataaagggaatgcagaaagctatgctcacggctactgcaattgtccaggcatgagcagatggtaccttgtaacacctcttgtaccttaagttgttttatactgccatttactttctcatggaaacccctaatttcttcaggacagggagctcatacgcatagtttacgatatgagctatacatatgcccatttaataaatacttgataaataaccaccatataaatggctaacagtagtactaaattcacattatacagtgacgatatggcatcactgaaaggttttgtcatttactatctctttaggaaatttaagttctctaagccttaattccaacattcctaagtgttgctaacaccagcctaacaacgttggcaagtattaaacgaaaatgtctacccagacctttttttctcaccaccaaagtaggtgccttgctttcttacaaaccctcgatcccaatacaagacacaaatgctaccctttctgaagagtgcctgtaaaattttaaaagttgtccataactgactggattctaacatacatattaatccaattcatccctttctggtattcaaggcatgctttcaaaaattgtccatcttcgttacagtaatattttccttaattattctctgaaaacagctcatccccaaaccgtcttggtttttacgttattacatctcagtggtgatggatgaggccctaaacgcggggaaaaccttttacaaaagttttgatggctggtcctcaagctttgagatttaccttccaagaattaagcagcactatcgaaacaatgctggcaacatttttatgaggttgcaaggaccacggttgctgcagctacaggatgagttataacgtcagaagcaacccaagcgttacttcaggcccatcttcaccggagaagcccgtatgaatcaggcaaaaacataaaaacaggttctgtgactttgccgtatctcatttagatcaagtagcacgcagaaggaagacaaggattttaaaatctggctccaacattctccacttggtcgcgttctcaaatctcagcccagggccgctgacgtaaagtcgcctctctcgtgggcaccacgggctcgagggtagccggcagctgaaacccgaggggcttcagaggcttggaggccaggagcaggcagagcgccgatgggataatgagattctccagcagatcggcgctcaccgacctactccatttcagtgggtagaggtaaaggctgaaaggcgaccctcgcaccgcccggcccacctaggcagtgccggcctagcgtctctaccccatagagcatgcgcgggaggtaacggcccgcccgccaccggccacacaggcctgtcgggaggcggggccacgcgtctgcgcacgcgcgcagggacacataggcggaagtggcctgcgggcgccggagttgagagtgctttccggggaggcgaccgccgcggtggaaagtgcaggagtgggcgaggaggaggaggaagaggaggtgatggcgacggaccaggggagggggagatgctccgtctagctcagacgccacgcaggctgccgtcacccttccgg

SEQ ID NO: 35357 - DNA, 2300 bp, Homo sapien
tctgtattgtctttcttgacctcttggtgtctgtggagatgttccatagttgcacctgtgacaagtgttgtactcatgtgggtgcatctgtcctcagtcctaaattgaaaaccagagcctatgtttcattactgctcaatgaagatttgttggatgaatgacttgcaggatcttctctgaccctcttgagttttgattggttggatacattgttagataatgaggcaacagaaatgttgcagttcctgagttaccaaagcaattttgtgaagataactatactgagcaggataagcttaagatacgtaaagtgcaaccaaagacactgtgaaaggtaacatgataggttgtgcatagaagtggacacaaattgaaccaggacacttttactttaagctaaactattattttcttagatttatttacaagaaaatgattagagtaaaagttttgctttttaaaatcacttgaaaaatttcccagagtctcttttatttcttttttcctcacaaacaaaaggagctagctttttcctaaagaagttttatcctgatgatttactaagtgagatattagataattacttttactttatagatttttacctggcacctcaggacttggaaataaagctttctttgaggggaaaatgttttgaaacataaaacttccaagacaaagctgtacccattttctagcacaatttatagcaacttctagaatctcatatacaagatgggagttgaaagaattttataaaattctcatttagcaatattagaaaaatatttaatgcattaccattcatcctttctttcatagatgttagacaaaaaaaatagatctagatgtattctgacaatagttcctttccttcgacactatgctccatgaattgttctgtggttccctattttttgaaatgtaggtaagacctatcttgtatacaccataaattatagttcattataaactatagcttatagcaaactttaagcaagaatgatgaactactgcaatttggaggagagaaatcctctgcctgttggtaggactacatcaaggtaggtagttatctatgtttctttggaagagtctcaaatcatgtcattaaaaatggcagtactatacatatacctgatggctttgtcccttggttaggctcttcattcattagtaaattcatcaatttatttcctccatcattcaacctatgtttcctatgagcttgctgtgtgcaggatactttgctacattaactatgcagtgccttattgtatgcagttatttgccccatttattttcatgataagatttcaaaagaaaactcttaatacatccggtgagggcctttccacttgaaaaaaaatgccaaacatttaacctgactgaaaatgtatcaccaaagtgcttggcttctggcataaagcagggactatgtataaacacatcataaaaatagataaaacaagaccagagagcccagaagggtaaagttgtcctttagatacagtcatggtgacaacccaagcagtgccagaggataaagcaagctgcaccagacttcaagtcaacagacatttattgaactccagttctgcatggggcactgtgatagttgcttttggggatacaaagatgagtgagacatcattctgccctcaagaaatttacaaggggagagagagatacacagaactgccatacaaggcaggatgcattaagtgcacaaagagagatataactaaagtgcttagggacatgcaggagaaagtggttaatttttaccataaatatcagggaagacttcatgcaaaagataggctttgagtttttcatgtaagtttagatcagattctgagagatagaggtatgggaaagagtgaagtaaacagcacataagaacagtcatgaagaaggcaatttcagtgtgcagcatttagagcttgggtcagaaaagcaggtccactacaagtgggagctggttgctatacactgaatgtttgcagtccacaaaatcaatatgttgaaaccctaatctccagtgtgatggtatttggaggtggggcctttgggaggtaactgggcttggatgaggtcatgggggtggaactcatgatggaattggagcctttacaagggaatgaagagacaagagctctctttatgccacgtgaggatacagcaaggccccaatctgcaagccaggaagagtcgtcacgagaaccagaccatgcaggaactctgatcgtggacatttcaacctccagaactgtgatccagtaagtgttgtttaagcc

SEQ ID NO: 35358 - DNA, 2300 bp, Homo sapien
agaggtgagaaactggtatcccagtcaacttgcctttcagaaccatggagagtgagaatttttttagtagaaatcctttagcatctaattactgaagctcttggaggaatcagatccaaacaagcaaacttaacagggaccaagctggagcctgcacagctagtcctcataatgtggagcttctggggccaagaggtagacacatcctttatcaactgccagcacaacagacttggtctcctttgtattcctatcatgctagccatgttaacattgccatgttgacagcactaatccagaagtccagaacgacttacagttgttgctctaatatattgattaaggatgctaacctaaatcagtcaaacatgcagaaatccacactggcattttccactaagatgagttcttatgacttctgtgtctcttggactattattatgccagagcaaaaccccacctcaatgaccagatgcatctgctggggaccatgctggcttcatagaggaactgggctgcccagcatgccatcatttcagagaaagacactttgcaaacagcagtaaacagagacttttcagctgatatactggagggacttatttattcagatggaaaaaaacagatatttttcctgtaggagattactgtcattttatcaacatctgaaggaaccttaagagcatctgcttctaaaatataagaaaaccctgcttggggtaactaagcatgcctagtttagacagaacaggttaagcatggaaaacaacgaggactaggttgagagagtgaacaaaatttgtttatttctcctaaattattccaagttcattctctatgatggccaggcagaccatctatctttgttttgtccctaaattatttctccatccattacagagcttcccactcttcctacccataattacctgtggggtaatctttctattttaattcaaatacccatttactttaggtagcaaaacattaagtcatagttatttggtgcataaattctgtgctcactttttttttaactttacaaataatttagataataaagttgtagacctcagacaatgaagagtatgactgtaaacattcattttgttttaagtgaaaagggttatattgatgtgggaataaatgatacaaaacattatctgataatatttttaatctcagaaaagtctaaactacacgtcatgctattttatttttttaacttctctggtcattttaaattatagagtaattattattcatgtagatcctgttataaaaatctacacatacatgttattttcatcatgctatacacacacacaaacgcctaaaatctagcaaatgaacatctttgcctagggccacatgacaagtttatggtcaaatgaaaactgagtgatcagagaagactttctgcccttccctaagacagtaagtgctctggaaagatgacatacagtgcttatgacatgtcaaaatataaaccaagcctgtgcctaaacaacacacatcccctggagaattaggcaattttacaacagctatgttagtgacctaagggccgcatcagagaatgatcagtctactgaaggaagacttgaggagtgagttcacctcgcatttcataaaaaataacgactatcatatgtgtactccctaggcacccagccacaaacctccaagcagctgcgttcacccttaccttttttccttatcacatcaagagacaaaatcttcttccaaaatctgaggtttgtctccatctgagttctacctcatgtcttcagagacttccctcaaatatactcccttgcttaactatttacaatatttccgtaaattttcatctctgcatagacatatgttcaaaccacgcccatatttaaaaatcattttctatttatagcataactgtatttttaaaaagtcacaaagtaccaactctacatccacatccttggctcagttagcccactgcaatttagtctctaccaaatggcaatgaagcttaaggtttcatccatatatatctatcatctatattgatttccctgagctctgcacttacttatccaacttctcataacatattttcccttggcaatgtcaaagatagctcaacatgaaaggaaagtgagttaacttattatccatcttctgtaattgttcattttcaatctaatccatgcctctgaggattctacagccattcctcacctgctcaactccaaatcttgagactatactaattaccatcctgtcctttaccttcaacttccaatcagcccacaagt

SEQ ID NO: 35359 - DNA, 2300 bp, Homo sapien
aaatttattaaaactatgcacttaatcaattaattttattctttactagataattgtcagacctaagtcacttcataacatctttcttacaagctttccaatgtcagtgggatataaaaagtcagcacaaatatttctaaagtagctttctatacttaggcaactcaattggtcctatgataagaataaaaatgatattgcatcatttggatggcccttgaagtgggatgctgtcagttgactctgagagtgttacctccccacttcccctctcatcctcctcactcttggttttgttccttctactctcatcatgttctgggatactgtattagtccattttcacactgctataaagacagacttgagactgggtcatttacaaagaaaaaaatgtttaataggtttacagttccacatggctggggaggcctcaggaaacttacaatcatgttggaaggtgaaggagaacaaggcgtgttttatgatgtcaaagcatgagagagagaaagagctgaggggaactgccaaacccctttaaagcacaagatcttgtgagaactcactcactgtcacaagaacagcatgggggaagtcgtccccatgatccagtcacctcccaccaggtccctcccttgacatgtggggattacgattcgagatgagatttgggtggggatacaggcccaaaccatgtcaggtgataccctgctgccttgatggccttagacaggaagcatcagccacagcaccttttcaagatacttacagaacccgcctatcccatgtagactgatacctgtgcaataaaaagtggtcacattaagtgaccagatttttttaagtttctgtagtgttgtggttatcatgttcacctatcacattcgtcttacctaaggccagatgtctgcctttatcatgagatctcagccagcagagaagttcttctccaggtacttctggagtcttcagtgggtgacttacattagctcacatattagtcctggctgatgcttcctatagcttcaggaatgattacatcactgctgacattgctgtcacccctgctaactaaaggtcgactccagagtgattttctcatcagttctatgctggatacttgggaattcagtgatgccagtcccactggactctgcaacactctctgccccaacacacacatccacagccacgttcatgcacacacacacatacacaaagatacaaccatacaggcatagacatccacgcacccacacaaccatatacacagacatgcacatacacaaccacacacaatacttttgcaaagtgagaaggcaaactcttcatttttctatgttctactctgtctacgggaaaaaaaatgggggtcccacagtagatgtgcttggatactcatatttcacaaagtttactaacagcatcctttcgctatgcaatagatgtatatatgagatttttctctttttattttctccaagatgtacatcaactatcaggatctctaaatctaatgagtgttcaaataataaccactgtactagacaattcccagctcagtctcactggtaaccttagtcaagggccccatctctttttacaatctgaattcttctatcatcccaggttctccatatgttaggatgagaagcaatcactccagtcaccatataaatcaacagttatagataagtagtttaggagaagagactcagccaacaacactcaccccagctgggatggcccgcatctccatttaaacatcttgccttatgtaattatcagttcaccattacaatagcaatagaaagtaagaataggtaatggtctcaacaaatatagaaaatgagtagcaagaaacataaaacgttaactgccacacacttggacacatctcaatccccacacacccataagaggttcaaattatttagcgctattttacaaagaggtttaagttcacataaatatctgaatcaaggatgacagctctgagttctaacaccaaatctgaaggtttttcctacttatgatgttgccttgtgtgttcatggaacttcccgacacagtgaacataagaacattgcgagcactgacctgagaatgggttttagaatctttgctctctatagtacctcctgcttctgattacagcagttactttgagcaagagtatccatggatgactcatctcatcctccatacaatgcaatgaagtagatctaatttcctgtgaattacagaggaggaaactgaggtcaaggaagttaagtaacttgcctatgatctgacaccct

SEQ ID NO: 35360 - DNA, 2300 bp, Homo sapien
tccaaataaaaccatatttatttaattttggagctgaaataatgagctttcaaaatgcaagccatccagaaatattccatcaagttttcaaaatttatactttgctcttctaattttattgtggttattttctgttcctttcttgcaccctttccatataatgagaatgtgaaaacacaagcaattctctatggaaaacagatccatcatcctgagctggaagtcttcatgaaagcaaaatttaaaaaaataggagttgtgttggtaggatttccccttaggctgtttcttttatctgtattagtcttggaaagtaagggacatcaggcctcccatcatcagtaagcccaaagggttcaggctctgttcaggccccacttaagggttcatcaccagtatttgaagcaagtgcattagaatcttgaaggaaaacatcaatttggttcacctggctccagtatacctctttattaatatttaattaaaaaacccagattagctggaaaggattgaaatttcaggaagaaatgaagtacaagttctgtatccctccagatgcagtgtttccactgttacaatgtttacaatgttagctaggaatctctagtccctcttttttcatctttctcattttccactggctgtggtatgtttctgtattcctggtggtggagggcagtttacactggttaatatccaaccatgtacaacaggtactaccctcatgacaagacaaggaagagcagagaacatatacctgacaataaactgcctgagttcaaatgattctcctacttacttcgtgtggtaatagacaaggaagtcaacctcctctaattcgtgtttccttacctgtacaagtggggataccattcgatggcttcatcaaaggctgtgttttagaacagtagcaaaattgccaactgcctcctctccacatgctgggtcttgcttgacttaaaaaaaaaatgatgcaataggcgtttcagcagagaatgagacaggcgacagccgaagggtttggggtgtttcttttggggttcctataaatacggtattactcatcctgccttcaggcctctgccaaaggtgtgattcttcttttctggggcaggaaaagacttctgagctggctctcatgctggtgatggtagcccctaggtgtttgcccacagcccacagtcaagctctatagggaggtcctgaacttagatgttctagacttactgctaatgaaacccaaactgtggtccctgggtgacttataactcagatcatctgagaaaggatcaaaagtgacatcctatcacaacttattttcctgatgcagaaaactgcagggcagattttagtttttccttttagcttaattccctaattgaaacattaaaaaagcaagcaagcctaattttaaaaaggaggctttaatcaagagattctgcagttactatgttttctcctctccatgcagtttatctattggaaatgggacgtgcatatcttgaacttcacttgcttagtagtgcccatgtattaaccctgggtgttctgcaagaaaaaaaaattgcatgatatcagagagttcaaataagatgtatttagtgttaaatgagattacatattcccagcagttcacatggtgcccggtccctattcaacacataaagacccctaccctcaccccctctgcccaccacgacagagttactgttttaatgccaatcatagtaggctcacaagctatctgctgttcctccaaatttagtctttaaggagtacaaattattcaactactatttttcttactatttctttttgaatttgctatatcatttatcaaatatagttatagcatatggctatgctataactgccagaatgtaaatattctgggcataatacctgctccaaaccaccttgtcgaggctgttgtggagagaaaagttttaaaagccatttggttttagtccaggaacaaaggttcatttaaaaataccatgtactacttgcctgtgtttctaagactctgttatccattaattcctcccccacctccctgcttcatgctgcctggttaaaggcttcctgtttaatcgtttcatgtttacttctgtgtgagcttatattaattatgtggatcaccagtctcatcaccatgaaggatgaagatatatttgatttggcaggggatccccaagacagcctcattcctgggccttctcccacccccaagcaaaacccagtttgtaatgaggctttctttggacaccagactttctccttaaggtaattaaagcctg

SEQ ID NO: 35361 - DNA, 2300 bp, Homo sapien
aaagctcaacttccagatcacttttttagttgtcttctctgaccctctaaattagtttatcctataccgaattctcatacacaaatcttagtttactgtgtacagttaacatttacactatttttttggtgaaaatttgattaagatctgctttctacagtagatcagtgttgtgatggtgaggaccttgcatttgcactcaccattttatcctctccacattacatggcttaatatcattcaaccatactcaaatgtaggtcttctgattccaagaactactttttaaaattccattttttaactgagatatatttacttttagaatgctataggcaatgaacaaccccagaggatttttaatttggtatccacagtgcttacttttattggagataaacacattaaaactatcctggatgttggctgaattacaacccagcagtatggggttataagtgcaatatgtagtgatgacatattttctccacttttcaggtaggaaaaagtaaaactcaactcaccccagtgaacaactataaataataatggtggcattcttcttttgtctctttctttgcaactgctaatgtgctttgacagttatctctattcttttatgaactttctgccagctgtaataagtgatggggaaatcaggcagcaaaatttttacgtgccaattctcacccaacctttccaaagaaaacaaaaaacaagagcgtttgagtgtagaaaacatttttgaatgggatttttttaacttacaatatataatttcagctttaaatatactatcgtaggctttgaatgtaaggttagtttttacatcagaataagttgatgatggactattttacaaaaggaatagtgcaactttttgagaaagatactatgatacaatgttaaatgactatttacttttgtacacatataaaacataaatagaaaatcttatgtggtggaaatatatgtggttgcctttgctgctcaagaatttaaccacttttacagaagttgttaaaaaaaatatgggtgatttttccagtccagactctaataggaaactgagtggtaaagtaatactttagtgaatgttgctagctcaagctcagatttatttgctccaatgtaaggtattaaaacttgggcaactagtgagttatttcaaaattgatgatgagagtggaagtttccttgaagaaaaaaagccttaagagaggtcaagacctcactgtgacctcaaatgtaactattaccctactggttagttgaaattggagatcaaagttctaatgtgctaaatgtatttggctgtgaattgtttcatggaaagggtaaaaagaagtatttgatagtatgactttttttttaggaaaatatgtatactctttaaaaaaaattgtaaacagcataataaagtaatattttataaaaatggactttctgatctcttacattctttttataagttaaatgatctgcacagattctattaaaatagatttttaaggtgtacagtgcttagttcatgtttatctgaattttaacacattttgggtttttacatatatttttaagaacttcaggtttgggggaagaaaagaaaagtccttttaacaagtaactttttccttttatctttcgtgctttttttttccctttctttccaaaaatgggcagttttattgcaaaacatagtttttaaactgtaatcctgggattacctaaatcagaatcatcacacaggcgcttgttagaaatccaggctcctgaacctcaccagagacttgttggatcagtatctctggggaggagcttggaatctgaatatttaaccagctccccaggtgattcttacaatatccttaaatttaggaatcactcttttagaaggtattacaaatataggatgaaagttaccagaatttgggtggcaagccctattcctacgaaatccctcatctcttaagatgagtgctaacatctttgcaatgaaagatctgtcattcttttttcccagatcatcttcgtctcacccagaatcccatttggtctgtgtcctcttccctactctgtttatcgtggccttggctgtagcagggggaagagacaagtctggaaagaaccctgcccttgggtacgttctcattcttatttttctcttgtcatttatttctccttgttttgcttcatcttcttcgattctatttttgctcttgggtgtctggaatttaggagcgtggagtttggagtaagtaacagacattccttcatgagtaactacaaagaatatagca

SEQ ID NO: 35362 - DNA, 2300 bp, Homo sapien
aataggggactcagctaagccatgtccagattcctgacctgcagaaactgtgagacattaaattatgatggttaaaccactaagtttagaaataatatagtatatagccctagatagttaaaagcacagaccattgctttacctttcagagtatgtcgcttgggttggagaagcgtgtgctgttggctttgcttgagatctgcagtaaagggtgtcttttctcaagctgactgtcattgcatttggcatgtcttccttacattgtgggttggtgcttgttttaaaaaaatagcttagaggtttattaaagaaagagttcaacgtcgcttttctgtttctcattttacttatggagtttgggtaaatgtttcataccgttataaaaataaaattcaagctctggctttgccctctgcattttatttgtatatgcctccagaaagtccctgctttagacccttgggataataataatgtgaaaaacttaatgaaccctatcccaatgacttagtatgaaaatgatgccagctttgtgtggtcctactttgaccaagcatcctcctttcacagtcctggtcttagatgttcaacccaagaggcaacaaatgtagccaagagcatgggttctggcattagattgtctatgttttttttttttttttttttttttttttaaccgtagctctggcacttactactgtgtgaccccaggaaactatcctccctagattttatttccctagcctctaaatacttcacagtattgaaaactaatattgacagtattatgaggctgatgaaataatgtataccaagtttttaacatagtacctgccagatggcaagtcctcaataaatgttaactataatgcaaaaaaaatcatacttttattgaatacctattaattgcctggtattgtgctagggtatggggacactaacataaatgtaacttggttcattttctcaaggaaattatagtctcgtaagtgaaataatttttgtacaacatcactgcttccaaacattgtcaggtactttagtgctgtcatcctgataaattcccctttgaggttttatttctgagaatctgctttggtttcctgcctggtatcccagtaactctaagataaagggactttttatatccgtaggtccttctagggaacagccaaatgaaaattgcctatctatctgatctcactcctggaatctatttaaattattctcataatatgtccggatcttttacaaaattctgttgatgaagcttttggatgtaagggaaacatttagatatatcagttggttagagtgcatgaagaaactgctgtcactcttatcttttggcctctgattgaccagagccagcagtccaactttggcaacccactctatctagctacagttccagcccacagtctaggtcccagggcgtcacttgataaccttacttctctctagatctctctgtacgttttgtgtgtgtgtgtgtgtgtgtgtgtgtgtgtttgtgtgtgttgtggggtgtgagtcaatagcacagttatagaatactagtcagagaagtggagcagaatggaaagccaggtgagaaggttggtgagactaaggcacaaataagacctgattatggtggaggggtagatagtgaagggattatccattgcaacttttatcaagaatcaagagggtcccagctactcgggaggctgaggcaggagaatggcgtgaacccggaaggcggagcttgcagtgagcggagatcgcgccacagcactcccgcctgggcgacagaacgagactccgtctcaaaaaaaaaaaaaaaaaaagaatcaagagggccaattggcatgaatgctcaaagtgagttgctttggtatgaataacaaaatcaccaggcatacaccatccctatagacctatccaatctacctggtagatatattttagaaaataaaactgtttagactaccaccctgccaaaaaccaaaaataaaaacaatgcctctttctgtttaggtcacaaagtagagctattcagaaccaaacaaacaaggaagcaaaagcaaaaattctcattatatctacttctgtttgcagacacagatgggagtgtgtcaagcaggaaactgaagggagctggtgagtttctggagctcctggccaaagctgggagatcgggtgcctgtggcttatttttgctggtgttaatctatgatgcctacggtgttgtcaaatgtatttcattagtgtttttcccttattaaatatgaaaatcatgtcaaaggtaaatgtca

SEQ ID NO: 35363 - DNA, 2300 bp, Homo sapien
agaagttgaataacaggggaagagagatgcttgatttggggacaaacaactcaaaaaagctgtaagtttagttcctcaagggtttgctgagcattttctagaagctatgcatcttgtaggcccgaagtactgggcatgggggacatacaaagaaatacatgttttcatccttgacttcacagagctcctgcaggtttgaagcacaaagccttcacgggggataaataaacataagaggggggtccgattgaaaactataaatgcccaacatgcagggcagtgaaaacctatactatgggctattagggatagacaagatagacgttcacctggaatctgacatgggcattaaaataacggggacaatttgggcagataaaagacacagagtgtcccaggaaggggtgagcctaggcataggtttaaagatggggatgagcttagcaagtgtgggtgcacggccaggagacctgcccggcagggatggaggatgtgccttgtggccagactgaagattgtgcagagtgatagaatgaagggtttggccatgaaacaattggcagcagaaactaaaaagtcacagttgtagtgacacttgatgcaccataagggtacaatgtcaaatgacgaaaactgagctgaaaagtggcataaaaacaggtgcttgtagttttaagaatcagtgggcaccgaatgcatcatgtgatcaacagcaaatcattaacttatttgggcctcaatattctcacctgtaaaatggggctggtaacttatatcatagggttgttcaattaataaaactgggttaatatataaatgtgcttataaaatgtaatgcaaatataaataattagggcagggctgtggtgaaatgtaaaagtgtgggctttgaagtcagataaccgtgggccaaaattctggctcctccacttactttttgtccttgggcaaattatttaaccccctgaaacctcagatttatccatttaaaattgagggtaatattataatatctgtttgcagaatggtgggtgattagaggaaacatttagaaagtgtctagcataaaatgaccccttagcagaggtaactcttgttataatttagcccttggtagagggaacctccttattaagaaagattagtcccctggctttacatgaatggagggaaattgaacagaggttggataaactgttttagatggtggagtttcagtggggagtgagtcaggttagtacgtgtcccttaaacaactggaggaagagagctgaggccagctggggaggtcagagcacagatgactccagggtctctatgttgaaggagagtgggatggcaacttaattagaaaagggagtgagaattggaggacttgtcttgaagtagctttcatgtagaaatcatgttgacttgacttggatgtatatttatttagggggggcggcttggaaggctgacaaagatgaaaattctaaattctccaagagatacccttggtcctgacaccttccagagtggaaatgtacacatgatacatttcagttattgggaatatgctgtttaccagtatcaaagtacagttaacccttgaacaacactagtgtgaactgtgagagtccactggtgcgtgggttttcttctacctctgctactcctgagacagcaagaccaacccctcctctgcctgctcctcctcagcctactcaacgtgaagataacgaggatggagatctttatggtgatcaacttccacttccacttcatgaatagtaaatacattttctcttatgattttcttatccttttgtccttgagtttactttactgtaagaatacagcatataatacatacaatatataaaatatgcgttaatcacctgtttatgttattggtaaagcttttagtcaactgtagtcattagttgttaggttttgggggcgttatgtgtggattttcaactctgttgggggatttgtccctcttgtctccccattgttcaaggctcaaccataatacgtgtatatggtaacaatatcgtggtatcagtggtaacaatgtaaatggtatctaagagcttgagattcctaagatctcaattcagcagccttctgctcctttgcttcctttcttttttttttttgagacaggttcttgctctgtcatccaggctggagtgcagtggaggtgcagcctttaactcctgggcttaagtgatcctcctgcttcagcctcccaagtatctgggaccacagatgtgcctcaccatgcccagctaatttttaaattttttgtagag

SEQ ID NO: 35364 - DNA, 2300 bp, Homo sapien
aaatgtggtatacatgtaccttggaatactactcagccataaaaaggaacaaaaaaatggcatttgcagcaacctggatggaagtagagaccattattctaagtgaagtaactcaggaatggaaaatcaaacatcgtatgtgggagctgagctatgaggatgcaaaggcataagactgataaaatagactttggggattccgggggaagggtgggagggcagtgagggataaaagactacacactgggtacagtgtacacagcttgggtaatggtgcaccaatatctcagaaatcaccgctgaagaacttattcatgtaaccaaacactgcctgttccccataacctattgaaataaataaaacaaaaacaaaaacaaaaaaaaagataaaaaagaataaaagcaaagtaatgtcaaaaaatatgtcaagtatccttaaaaattgtatagtttttaagaaaggcatttgtcctcaaaagcaaagttctgttttcagaaatcaaaagttcagacaaagatttatgtaaaagctgtttaatgcattgaatatagtaattaaaagtagaggcaaatcaactggccatatacctctattacatgtatatcaggtggaacacaagtaattgtagaagagaacggaaaattctcgaaatattttgttgaataaatgcagcatgagatggaattgtgtaataggattttacaaatgcttatcaaaataactgaaaggaactaactactagttatctctggttattacaaatgaatttaaattttgttgttatgtttacctgtcttttgtaagttctctacaatgaaaatattatacaatgagagagggaatataagtgagtaattgagaattagctcctgatgccagttctggccctatcacttactatttaacctggggcaagttattgagcctctctgtgccttggtttcctcatctgtaaaactggataacaatagtacatccactcaataggggttttatgacagtaaacgattcaatcacataaacttttaggacagtttcagggacagtgtaagtgtcaaaagtgttaactattcttaattttttagtaatcacacaaaaaaatttaaattatgcaatctgtctcttcctcaaagaacactttagtaaacatgtatgcatagaagtccaccttcccaattttaagttttttccttgggataaattctcagaaataaaattcctagatccttgataatttttgctgaagttctttccaaagctgctataagacattttcatgccaaaaatatgtgacatcacctgttttagaaaacccttactaagttattatttaaaaaataggtatgtgatgagggaaaatggctaatatttttaatttaaatttctttgataatttttgagattaataattgttatgcttactgttgctaaactttgttttttgtaaaatcattcctatccttaacttaattattggtatcgtagtgtttttcttattgacatgtataaactcctcatatggtagaaatattaagcaactttctgacacagcagctgtgaagatttttctcatttgtggaattattactgttttttggtttgatataaagtaatttaaatatcttattgtcaaatctatcccacttttgcttggcaaatgttgggattgattttaaaatttaacaacttcagatgagaagatttttgacataattctatattattgtattagctcttaaaagcttttcggcgatcgctatcgggaatgacattttttaattttggaagagaacttttgctcactaaggtgactgaccaggaagcatgagtgagcttggttcattaatcagtctgaaagatttctaaaaattctgcgtcatcaggcagaatcttcaaggtggtagcttacaccctcatccccttcaaagtacaaaaacataggttcctctcactaatcactaggttcatgttgtccccagggtaggcaaactatgactgaggccacattgacctctaccttgtcagattaggctagaaaccacatggcatacctcctttacagtggtttgatcaaatggtcaagtcccacagcacaaaactgtggcatgtgatgtttacatgatcctaggaagaaaatggatgagccgatgttgacaagagcttaagtaagtctccatgtacatcaagtactttggagacgccaaaggtgtaactttaaagggcaaagacctcaggacaaagcaacttgaagaagccaggaactaaagacgggacatttggttcaaaacttgaagtggct

SEQ ID NO: 35365 - DNA, 2300 bp, Homo sapien
gcacactcagcctgagttagtgagtcaagttctcctacctagcccagtggttctcaatttctcactattatcactccctcaatataaagtctaacaagagaaattgaatacgaaggagttacattttgtcaggtagggttagtttgaaggaccacagaccattgtaacatctgagatttgtttcatctcccaggaaccaatttttgccctcttgaagacaatatcaccccagttgagaatgcatgctgtggcctaattccgtatatcaaaatgagtaaccagtccagccctactctgtgtataaatcttttattggaacttacttcactgttctgtaattatatttgtattcgtctgcctcccaccaggcaataaaattctcaatgggatttttttttacttcctagaaaagagctcaaaagcattgaataaatgaatgaacagatgaataaatgaaatataaagattgattggcacaatccagaagccagtatgttcttaatagctctgcctcttcattccttgactaactgatctgaggttcaaacagtaaaggcatctgcaggtgttgcctcagacaagtgactactgtgaaatggcactaggtttccaaacatccacaaagtcttgcccactttttggaggataacaggtgcaggaggcagtgacagagatttgatgtttgtttgatgtctttgtgaccatttctctaccagatacaatagggtgtaggaagtagtaattatgttgtctcaaagcagcattgtaagtttacttacaaaaatgaacacttaacctttctcactgttgtgcctggactggctgcctagagtgatggccgagagcagggctaatggtccaggcaaggcagaacagggcaccctgcaattaggaggaaggatatccctaaagaagatggtggtgggggatgccagaaacccactcctgccagaccctgagatcccacaggatgcagggagactcagtgggaacagccaaatcttctccaacagtatttcctccattaaaccaggagtctctctgtctcattctcaacagatccatcaccgctcatgttccaaaacaatcactcagccaaagttcaatcaatttcagtggttgctgctgcagagtaggttattgtagctactaacaattacagataagaaacagcatataataataataacaacaaaaacaatagtatattcatgcagcattctaacatttgcaaagtgttttcataaataaatggaattttaatttcaccacaccgtgaacaatatagactagatgggtattaactgcattttatagacaagaaagctgaaggcaaatgactggaactcctagggtcgtaggctcttcattctagtgtaacagatacctgagttccagatgaggcactgccgattactcactggtggcctaagccccaacacttacctgctctcaaccttgtttccctcatttaaaaaataaagataggaaaaacagcacgtatctcaaagggttgccaagagtttaaatgaggtaaagcctatgtggcactgagtgcagtaactggcaaaagataatagctaaaaaaaaaaaatagttattagtattagtacttgtatttatttttttattccctattttgttaagaaagtacttgtgaccgggcgcggtggctcacgcctgtaatcccagcactttgggaggccaaggcaggtggatcacgatgtcaggagttcgagacctgccttaccaacatggtgaaaccccatctctattaaaaatacaaaaagtagccgggagtggtggtgcgcgcctgtaatcccagctactcaggaggctgaagcaggagaatctcttgaacccgggaggcggaggttgcagtgagccgagatcgtgccgttgcactccagcctgggtgacagagggagactccgtctcaaaaaaaaaaaaaaaaaaaaaaaaaaaaaaagaaagaaagcacttgtatttagattacataaaatattaagcaatatgtgcaaagctaaaatgattcaattccagcagctctcaagggcaaaagaaaaatattcaaattgtcctagctatttacaaaaaatatatatatttttgactcgtaacaaataaagacatagagaaatgatcccattaaggaaatataaaacatcttccttaaaaccatattctttatatgactttcatcaatagacttcgcatctcctttcctcaactccatttcataaagaggaatctggagggtaacagtcattttcccaaagttaggtaagaggccatttgcc

SEQ ID NO: 35366 - DNA, 2300 bp, Homo sapien
gctggaagtcggcattgggggtgtgggacagcggcggggcgctcgtgtagggagattgacctacagtgcccagctggggcaaccgtgccgtcccgttgctggtgccgtcgtgacggtcctagaagagagcgagaggaaaggtaaagaacaaggaatcaggcgtcgagctacaactatccacacaaaatccacttgacaagtctgcgtgggaaatcgcccgttcccgttggctggccgccgggaaaaaatcagctctaagttcttttcaggaaataccctcaagtgaaacagaccgaacaacgcagagaaactgtatatggagggggcacaagagactatttaggggtttctttcaaagagaggaaaagatagaaaagggtctcctggaacacagcccattaaactgcagcgtgaaatctctcttaagcaaaattaaaattcctcctaaatactaaacagcagaagcggccttttcttttcccccgatttgaacctgtctgccactgcgttattgtttattctcttccatttatttggagagaaaaaaatcataaacgttcaaagactgttaccgtttcatgactacttaaatagaaacatatttcgcagaggggctgtaacaaaaacacacgtttaaattaccagcttaaagaaggttttaactgcaggatcggggtctgtctttttcgcttcctctgttaggagcctttttctcgacagagtcgatttatggtttggatagggaaagggggacgtcaagtcaaggtttaaaatagaaagattcagccttattgggtttaaaagagagaggtgcaccccggggctgtggccccccccccccgccccttccaccccagccccaaagggcagaagaaacgcctgactttaggtttctctattgcaattcccttgcaaaacaagcgaagagagttgattccagagaccgcgaaccctcggcggttcggccgcaggtcccgagggtagggggcacaccgcgctgcacttttcctgcagacagtttaagcatcaaatgttgagaacatctcggggacaagtgaagactcaaggaaatcaagatgaacgtggggagaaacacgccttgggaagccgcggcgaggtaggtctgcgtgctcggagaggtcgagcgggggctggggtagggggtaatgcactcgatttagggatggaaaagagcgagagaaaggcggaaggtggggtgggggatgcaaatggagagggtgtcctgaaggaaagctgggcgtgaaacccgaggtttcgggcagctccacggcaccaggtttccagaatccaattcctaaagaaacagcaacgggggtggggatgggactcaccatggctgaaaaactgtgaactaacatctgcgaagagtctggggtaacgagtcagggtggaaaaaaacaagcaagcctggagcgcccggctgccccgccgcccgagcgcgccccacacaaaaggcgccgagagccccgcgccacccaggactccagtcacggcgccgacgctccccggagcgcgggagcccggctcggatccatccgaacttgaaccaccgattcgcgcggcgccttcagctggtcgaacccacggtctctatcctgccgcgactggttatgattcaaagttctttaaaaatgaaaaaccccaaaaaaggaaaaaggaaaaagtatgtgtgagtgtgtgggtgcgtgcgtgttccttaatccgtgtctccccctcttttcttagcggcggcttcgcttgagcttctaataaccgcgctgggcagcgttcctggagcctcctaatagcagatattcatgactattaatattacacgaatacttaataagggaagaatgcctggaaatcgagcgtgaagcggagaggcaactcgcgccggagccggctctcaatgcagtccattgacgggagtctcagtgtagcaaatcggagtggggagagggagcgcgagagacaaaaagcgagcgagagagggagcgggcgagcgcgcggggggccgcggcgcggcgtctggcgaatcacagggaaggggcaacattttaaaaggttgcagggcatgcaaaagtgaaagagaaagaggcagagagggagaccgaaggagagagcgcagagagggagaatgtgtctgcgtgcgtgtgtgagaaagaaagtgtgggcgagggagaggagccccgggtggggagaggggagggagggaaggagggagagcccgagaggaggaagggagggaaagagggagggaggaagggagggagggagggggagggggcccagccgga

SEQ ID NO: 35367 - DNA, 2300 bp, Homo sapien
cggcttcgcttgagcttctaataaccgcgctgggcagcgttcctggagcctcctaatagcagatattcatgactattaatattacacgaatacttaataagggaagaatgcctggaaatcgagcgtgaagcggagaggcaactcgcgccggagccggctctcaatgcagtccattgacgggagtctcagtgtagcaaatcggagtggggagagggagcgcgagagacaaaaagcgagcgagagagggagcgggcgagcgcgcggggggccgcggcgcggcgtctggcgaatcacagggaaggggcaacattttaaaaggttgcagggcatgcaaaagtgaaagagaaagaggcagagagggagaccgaaggagagagcgcagagagggagaatgtgtctgcgtgcgtgtgtgagaaagaaagtgtgggcgagggagaggagccccgggtggggagaggggagggagggaaggagggagagcccgagaggaggaagggagggaaagagggagggaggaagggagggagggagggggagggggcccagccggagcgcacggagggggaggccgcgggggagggggaaggggagaggaagcgagcgaggacaatcagacctaaaaggctggggcagacctcgggatgcagcgggggtcgtgcgtagcgggtaggagctgcttgggaccgcgtccgggcgctcgtggggctctcggcgcggcaggcgcttcccggccctgtctggccgcgggctccgccgcttcgcagccgagtctgggactcgggactcggctgcccgctgctgcgcggctcctccatgacccggcgccctgcccgggaccggcccgctcgctgcactggtcctctcctcggcctcctcttgagctttcctcggacaggggcaccgtgcgctccccggccaccgtcgctctgccctcggctctctggggccggggattccggatcgggagccgggatgcgggccggggcgcgcacagacgctaggcggcccagcccgggcgccgctggcaccggctcgcggctcccggcaaaaacccgtccgactggctgggccactcccgcctgacgcccccccagatgacacgactagctctcccggcgtgctgcctttgccagtctacccgccaggttgtcagaacaagcggcacctcgcctcctgcgtgtccctacagagccccggcacaatcagactgccccaagccagctccgaaacccgaaatccccgctccggcgcttgcccaccacggccaaagttgtggaaacagctttgactttattctcctctctctctcatctttttttgcctcgcttacacacgcattcacacttgcccccacaggatccctctaggggtgcaagttcatcccccacctagccacccaccccatccagtcggcacctagagccgcacggaggttcggaccccgcccgccgagggcgcccacacctggagctgggtttcggcctctgcgaaagtgaaatgcccaagcctccggccaaagcccagaccagtacagtatgaattgtcctatgagactgaggggttcggcttcattcctacctgcccgcaaagctcgcccccagcctcgaaaacaaagcgactggtctgacgtggggtccctgcgcccctcctctagcgcgacaggacccccccagggaagagccagtacccgtgggatgtcaccccgtccccatctaccggggtggggggcctgaaaggagaacgatttaaaataatcttcagaaagaaaagggaggagggagcgggtgacacatcgttcacataaacccaatttctggtttcgagtgaagtcaagatctccgcccctgcgcctgcacacacacctcctgcctaacattctcagctgcaaatgccaaaaaagaaaaaaaaaaaaaacagcaaaagttgggactgccacctatttatttaggtaatctccagccctacacaccccaacccctctctcggactcattgctcattacagtgttggttgtaaccgttcccagcgcctcctgcgggtggacaggtcgcgctagggtctcccttgctgcctcaagaaggcgagctcaggggactctgcgttttaaaatgggttccaaagcggcgcgctctgtcggcccagcgggcttgcggcaccagaggtggtctgcagccgcgcaaggattcccacggtcgttctgggctggtgcagaagctggtgctcccgcacccagcggccagcaggctcggcgcagcacatctccccaccccacccccacacacccccgtggggtgcgtcga

SEQ ID NO: 35368 - DNA, 2300 bp, Homo sapien
tcattcattctttcttccccccacccccacttctaaagcggttcccttctcggctttagagacggcccccccacacttcgctgtgagctgggctgcatcttcctgtaagcgggttcaacttaagaccactgatcccagctgcggggctcgctccagatcctctgtgcttcacgaagttctaagtagcttctccctctgagctacaggatcgacgcaccccacgggggtgtgtgggggtggggtggggagatgtgctgcgccgagcctgctggccgctgggtgcgggagcaccagcttctgcaccagcccagaacgaccgtgggaatccttgcgcggctgcagaccacctctggtgccgcaagcccgctgggccgacagagcgcgccgctttggaacccattttaaaacgcagagtcccctgagctcgccttcttgaggcagcaagggagaccctagcgcgacctgtccacccgcaggaggcgctgggaacggttacaaccaacactgtaatgagcaatgagtccgagagaggggttggggtgtgtagggctggagattacctaaataaataggtggcagtcccaacttttgctgttttttttttttttcttttttggcatttgcagctgagaatgttaggcaggaggtgtgtgtgcaggcgcaggggcggagatcttgacttcactcgaaaccagaaattgggtttatgtgaacgatgtgtcacccgctccctcctcccttttctttctgaagattattttaaatcgttctcctttcaggccccccaccccggtagatggggacggggtgacatcccacgggtactggctcttccctgggggggtcctgtcgcgctagaggaggggcgcagggaccccacgtcagaccagtcgctttgttttcgaggctgggggcgagctttgcgggcaggtaggaatgaagccgaacccctcagtctcataggacaattcatactgtactggtctgggctttggccggaggcttgggcatttcactttcgcagaggccgaaacccagctccaggtgtgggcgccctcggcgggcggggtccgaacctccgtgcggctctaggtgccgactggatggggtgggtggctaggtgggggatgaacttgcacccctagagggatcctgtgggggcaagtgtgaatgcgtgtgtaagcgaggcaaaaaaagatgagagagagaggagaataaagtcaaagctgtttccacaactttggccgtggtgggcaagcgccggagcggggatttcgggtttcggagctggcttggggcagtctgattgtgccggggctctgtagggacacgcaggaggcgaggtgccgcttgttctgacaacctggcgggtagactggcaaaggcagcacgccgggagagctagtcgtgtcatctgggggggcgtcaggcgggagtggcccagccagtcggacgggtttttgccgggagccgcgagccggtgccagcggcgcccgggctgggccgcctagcgtctgtgcgcgccccggcccgcatcccggctcccgatccggaatccccggccccagagagccgagggcagagcgacggtggccggggagcgcacggtgcccctgtccgaggaaagctcaagaggaggccgaggagaggaccagtgcagcgagcgggccggtcccgggcagggcgccgggtcatggaggagccgcgcagcagcgggcagccgagtcccgagtcccagactcggctgcgaagcggcggagcccgcggccagacagggccgggaagcgcctgccgcgccgagagccccacgagcgcccggacgcggtcccaagcagctcctacccgctacgcacgacccccgctgcatcccgaggtctgccccagccttttaggtctgattgtcctcgctcgcttcctctccccttccccctcccccgcggcctccccctccgtgcgctccggctgggccccctccccctccctccctcccttcctccctccctctttccctcccttcctcctctcgggctctccctccttccctccctcccctctccccacccggggctcctctccctcgcccacactttctttctcacacacgcacgcagacacattctccctctctgcgctctctccttcggtctccctctctgcctctttctctttcacttttgcatgccctgcaaccttttaaaatgttgccccttccctgtgattcgccagacgccgcgccgcggccccccgcgcgctcgcccgctccctctctcgctcgctttttgtctctcgcgctccctctc

SEQ ID NO: 35369 - DNA, 2300 bp, Homo sapien
ggaggaagggagggagggagggggagggggcccagccggagcgcacggagggggaggccgcgggggagggggaaggggagaggaagcgagcgaggacaatcagacctaaaaggctggggcagacctcgggatgcagcgggggtcgtgcgtagcgggtaggagctgcttgggaccgcgtccgggcgctcgtggggctctcggcgcggcaggcgcttcccggccctgtctggccgcgggctccgccgcttcgcagccgagtctgggactcgggactcggctgcccgctgctgcgcggctcctccatgacccggcgccctgcccgggaccggcccgctcgctgcactggtcctctcctcggcctcctcttgagctttcctcggacaggggcaccgtgcgctccccggccaccgtcgctctgccctcggctctctggggccggggattccggatcgggagccgggatgcgggccggggcgcgcacagacgctaggcggcccagcccgggcgccgctggcaccggctcgcggctcccggcaaaaacccgtccgactggctgggccactcccgcctgacgcccccccagatgacacgactagctctcccggcgtgctgcctttgccagtctacccgccaggttgtcagaacaagcggcacctcgcctcctgcgtgtccctacagagccccggcacaatcagactgccccaagccagctccgaaacccgaaatccccgctccggcgcttgcccaccacggccaaagttgtggaaacagctttgactttattctcctctctctctcatctttttttgcctcgcttacacacgcattcacacttgcccccacaggatccctctaggggtgcaagttcatcccccacctagccacccaccccatccagtcggcacctagagccgcacggaggttcggaccccgcccgccgagggcgcccacacctggagctgggtttcggcctctgcgaaagtgaaatgcccaagcctccggccaaagcccagaccagtacagtatgaattgtcctatgagactgaggggttcggcttcattcctacctgcccgcaaagctcgcccccagcctcgaaaacaaagcgactggtctgacgtggggtccctgcgcccctcctctagcgcgacaggacccccccagggaagagccagtacccgtgggatgtcaccccgtccccatctaccggggtggggggcctgaaaggagaacgatttaaaataatcttcagaaagaaaagggaggagggagcgggtgacacatcgttcacataaacccaatttctggtttcgagtgaagtcaagatctccgcccctgcgcctgcacacacacctcctgcctaacattctcagctgcaaatgccaaaaaagaaaaaaaaaaaaaacagcaaaagttgggactgccacctatttatttaggtaatctccagccctacacaccccaacccctctctcggactcattgctcattacagtgttggttgtaaccgttcccagcgcctcctgcgggtggacaggtcgcgctagggtctcccttgctgcctcaagaaggcgagctcaggggactctgcgttttaaaatgggttccaaagcggcgcgctctgtcggcccagcgggcttgcggcaccagaggtggtctgcagccgcgcaaggattcccacggtcgttctgggctggtgcagaagctggtgctcccgcacccagcggccagcaggctcggcgcagcacatctccccaccccacccccacacacccccgtggggtgcgtcgatcctgtagctcagagggagaagctacttagaacttcgtgaagcacagaggatctggagcgagccccgcagctgggatcagtggtcttaagttgaacccgcttacaggaagatgcagcccagctcacagcgaagtgtgggggggccgtctctaaagccgagaagggaaccgctttagaagtgggggtggggggaagaaagaatgaatgaatgaatgaatgaatgaatagaaagaagaaggaatattaaagatcggagaggaagttcaagagagaaaagagttttctctttcctttctgttcctggtgacttgggccctcaatctcgatgaagataacacgaggagtgcacaggcaagtgcccagttgccagcaattgcttcaaaagcccatgttcttcttttcccccattcttaggcacagccaaaattggtcagaaaggggagtaaagtgggacacgagcttcaaagtagggaaaccaaagaagggagcatccacgtcctctctctgcagc

SEQ ID NO: 35370 - DNA, 2300 bp, Homo sapien
atacaacaacagtttagcagccccagcgggtgcggagccggagatctgttgggcgcggggcagcggggaggtggaaacgggggttgaaatggggtggcagaggatggagggcggcctttccaagcccgcagagggcaagaaagcgaaacttggagttcccttaagcacaccgcggcgacgtctacggagtgtaaaaacccatgctctcaggcctagggtttggcctgctcaggctatggccgctgctgggagggtgtcggtgctcctggcagcccagatcctgacttcaaaccactgcactggcgacaggctgggacagccctgcagggtctagccctggaaagtcgaccattttctggacggagggcggcgccaagcctccagcccggttcagccgaggaattgtgctcagttcaggtagggcaagggaggcccagagcatggggagggcttcctgggtctgtaaggccccttgccagctccggcttctccctagctttttggagccttctgcctactctgctaggtttggggagtttgctgaggtgtttggagggagaattccccttctgcagccttgggtggaatggggagttctcccagctcctgccttccttccacctgtgagggaatgctccaatctgccacagttcccatccccttttaggaacgcccggtggaaatatgggaggcctggagattttcgagaaacaagcccagatgaatcaaaggtccttactagagcaactctgaggcgggacctagtgtagttaaggagtttgtacatatagcagagagaaaagacagaggtaactttcttttggaggacaaacgaggaagctcagccaggaaaattaattactctgtatttcctagtgtcacattaggtccttttcttttttttttttcttacttaaaaaaaaatcccaaaaccgaaagggataaaagccccagaggacccagcaggccccggtgaggagtccaaaagcccggactgaccagtctggacgagtaggtggctcccaggcctccaggttccgcggcagccgggctctgcctcgcgagcacgcccgcgttagtagcatcaccaaatcatgaaggaactctccctgctttaattaaaaaggggaatcttgggaaaactagagcagattaacacagctaaaagtcggttcccggtgatttattttgatgcacgcacgagacggtatctagacttgcaggcacacacacgtctgtttttaggctcaacttcagaagcgggtgtgcagttccataggagttctgtattcgtgtccacgttgcacccaggaaaccttagcctgaacaccaatttgaactgtcagttggccctagcttcacacaaacaggagaaaaattgtttaacccctggagctgtcaagtaacctcttcagggtacaacttttattttacacgctgcaattaagggattgcaaaccccagcagagccaccggagccgcttggcagaatctccaacctgggggaaagctcaaagccaataaaactcccaaggcgctgcggcccgagggggtggctgcctcgagcggaggcgatcccttgttgggaaaaaatcctggagtgacttcgccggtcttggtttggtggttatgtttaattgcgaaagggataatgatttctaataaaattgcacggggccaaaagggcagctcggatcgtggtagcagggttaagggagaagtgctagaagctgggccccaggcgtggcgcttggaccttgagcagtgccgggctttgcagaaggcatctctggagaaaaggaagcggagaaagaaaggaaggggaatgtggcggaattggggtaagagagggggtgttggggcagggcctcgcggcggagctcgaggaaggttttatcagttcgcaggctggagtgcgctctagaagcaagttcgcggcgtagagaggcctttatacctgtgtcggagcggccggcggcagattgtggtactggcgagcaattggactattgttgatatgctaatgaggcgattaggctgttggtaaagagctggaaaagggaaaagtttctaccattagagggagatctccgagcgcacacgggagctctttcccttctctcctcctcctcgcccttctcctcgccctcctcctcctcctcgccctcctcttcctcctcctcctccttgccctcctcctctccctcctccttctcctcctccacctcctctccctcctcctcctcctcctgcgctcaccgccggcagccagcactttgcgctcacccagagagtagctc

SEQ ID NO: 35371 - DNA, 2300 bp, Homo sapien
aggcaacatagtgagacactgtctctccaaaaaaaaaaaaagtaagaggggacataaatgtagaagctgtagacatgaaagagataataaaatttttctatttacaggcagttttataaaaatgaattacaaaatatagatgagatatgttctattaaacatataaggtatggtatactacagtaaaacacaattcttaacacatgtgtataccatacctagtgcactacaccttgctttcttccttaacaatatgtcttggaaatgaatctgtagagtacatagagaactgcctcattccttgtaatgactgaatgttattcctttatacgactgacccatcatttatttaaatgtgtcttattgatagcatttagactgtttccagtctttgctattattaaaaaagtcacgatatataaacccatcatttcgcacacttgcaactccatctgtaggataaattccaacaagtggagtcgctaggttcaaaggtgtgctcatatttatttggatcgatttcacaaagaagctataccatattacactactcccatcaaagtataagaatgcctactgcggccgggcgcggtggctcatgcctgtaatcccagcactttgggaggccgaggcgggcggatcacgaggtcaggagatggaaaccatcctggctaacacagtgaaaccctgtctctactaaaaatacaaaaaaattagccgggcgcggtggcgagtgggcgacggagcgagattccgtctcaaaaaaaaaaaaagaatgcctatggagtctcctaagaacagcatcatcaaggccaccacattccaatatctgttgcacttctctcataaagctgagcacctttttcttgctgcatagccttgtaaccaactctattataatagaacttgttcctcatcatcagcaagtgagcatttgctagcttcagatctgaaactttcattttccactagtaggcttccgaaagcaaccctcttggttcacggattaggtgagccagaacgccaaataacttataattgagaaataaaaataaaactaatgcgaatgagaatttgtctccaaaagtagaaatttttccatcaatgtctctctttccacaacttgcatttgtgaaatttagaatgaatgtcgcaagtaggaaaagactcattctgtcatagtagaatctttgtgtatttcttagaatacttattgtaggtttaaattgaaaacaaaatcatccaattttacacttattagggaagaaaataatcacagcaacatataagatgttgacaaagggccgggcgcggtggctcacgcctgtaattccagcactttgggaggccgaggtgggtggatcacgaggtcaggagttcgaaaccagcctgaccaacatggtgaaactccgtctctactaaaaatacaaaaattagccgggcgtggtggcgcgtgcctgtaattccagctactcaggaggccaaggcaggagaatcgcttgaacctaggaggcggaggttgcagtgagccgagatcgcgccaccacactccagcctgggtaacagagcaaggctccgtctcagaaaaaaagaaagaaagaaagaaagaaaagatattgacaaagaatgagtaaagtccaacacatgagctttgaccaaaattccaacagatggcagtattggccaactttttccttaaaaacgtaggtgtttttttttttttccaagatgctaattaaaccttgttagacgcgatagatatattttctgtaattcctcaatgagaattcgtatgtgtagtttattatacgttgtgctctatattgtaaaaaataacaaaaaccctgaagtggtaatatcgtaggcaataataatggaataaccgaggtatgaatgaacagttttgagcactaaaacacactaagggctttgttatggactgaaatgtgtcctctccccagagtcacaggattatgaagccataatcctcaatgtgactatatttggagcaggggcctttacagacataattaaattaaatgaggtcataagagtggggccctagtctgataggactggtgtccttacaagaagagggagagtcctcagagagtcctctctctcggcatggacacaaaagaaaagccatgtgaggacacagagagaaggtggctgtctacgagctaggaagaaaggcctcaccggaaaccaaccctcacagcagctccatcttggacttccagcctccggaactgtgagaaaataaatgtttgcaattcaggtcggttgtattttgtgaa

SEQ ID NO: 35372 - DNA, 2300 bp, Homo sapien
ctacaggcgcccgccaccaaccccggctaattttttttgtatttttagtagagacgggatttcaccatgttagccaggatggtctcgatctcctgaccttgtgatccgcccgccttggcctcccagagtgctgggattacaggcatgagccaccgtgcctggccaaattcttgaaattcttaatggatttttaaaacttttttcatttggagaaatttgcattatttcatattgttcttatagaaattttattgacattctcagatctcaaacttttcaaatgcgtgtaatatagattcacagaaaatgagattataatgaataatccaatccatattgaagatactgaatttctagacaacatattatcattgcttaaaaaagagttttgggggctgggcgcagtggcttaagcctgtaatcccagcactttgggaggctgaggtgggcgaatcacctgaggacaggagttcgagaccagcctgaccaacatagagaaaccccgtctctactacaaatacaaaattagccgggcgtggtagcgcatgcctgcaattccagctactcgggaggctgaggcaggagaatcgcttgaacccgggaggcggaggttgtggtgagccgagattgtggcattacactctagcctgggcaacaagagcgaaactccatctcaaaaaaaaaaaaaaaaaaaaagttttgggtgtcatatcagagattcaaagatctcagaaagacaaacttcacatattctcacgtttgtgggagctaaaagttaaaataattgaactcatggagttagagagtagaaggatgatgagcagaggctgggaaagggagtaggggtatggagggaaagggggagggttaatgggtacaaaaacagaaagaatgaataagacctagtatttgctagcataacataagtcaaaaataatttaatcgtacattttaaaaggaataaaagtgtaattggatggtttgtaacacaaaggataaatgcttgaggtcatggagaccccgtttaccctgaagtgattatttcacatttcatgactgattcaaaacgtctcatgtaacccataaatatatatacctactgtgtaccaacaaaaaatttaacaaaacataacatacaatgacagcagaaatttaataaggatgttctataagctaacagtctatttagtgacacatagaagcataatttattttatttatttattcattcattcattgagatggagtcttgctgtgccacccaggctggagtgcagtgctgcaatcttggctccctgcagcctccacctcccaagttcaagtgattctcctgtcttggcctcctgagtagctgggattacaggccagtgccaccacacctggctgatttttgtatttttagtagagacagggtttcaccatgttggccaggctggtctcaaactcctgacctcaagtgatctgcctacctcggcctcccaaagtggtgggattacaggcatgagccaccgcacctggccagaagtatattttatattaatttattgaaacatatggaaagcagtcaacaggatattcattaagtctagaaacacagatgggtatacataacttcatcaagaccattttcaatgtgtaacacacacgtgtgcgtgcactcacagagtttagactttatgtagattggaaatcaagttccacatacctggaatcctactgagtgtcacccagaaatgctcatcaggagagtcagtatcttttgaccactcaagtaaatcaatggcccttaggttttgaagaacaaaattagcaaattcccttgtaagggccacataggcagagccaaagtaaattgtcagatggtggggaggaggcatttttctcatgcaagtccacagcatgaaggaaaacaagctatctctgctccaagtgcatgtatttggtccttctgataatatgaggaggaggcggcaccccgggggtgatatttttccttttccgtaacctcagatactgaacgtatttccctgttggttttcaggggaattcttgcccacaggtgttgatgacgtacttccagggaacctcagaggccacaaggtctttcaggcagtgcaggtcagcctggagcctggagatccctgtgtagaacagagactccctctcagaagccacagagacgtttgtgaagcagctcagtagctttcttacagcgtctttgaaagtgactggggccttctgatccacatgaacacagtagatgttttggggagtgtagatggccctcaagagtctttcaa

SEQ ID NO: 35373 - DNA, 2300 bp, Homo sapien
tatacaccctgccagttattgagcaaccaaactataagtctttgctggttcccaatttgttcagaactctttatttatcccacctgatcagtgcctccgacttagaattggggggtattaattttgatctgaaattcaacctgggatgaacaatctcgcgtccttttggtcactccctgattaccatctcctcccattatatcacacaaacgcaagagcctagagcccagaattgaggagagtgattactgatagattgtacaagggcattgggaaagctggagggtctggaagaccagcgtgtcccatgtgcctaccaaaataaaatgcaccagctggcactgggttgatgaaaaaggaaataggttcatattaattctttttttaaatgtctagcattgtcaaagatactattttacagaatcataaatattccagagctcaaaatcaagggaccgtcttagcattacaggtaaggtacaagtaaagacgtatgaactttgcttgtacttgcagcagagcacaaaatacaagtgttcgttaccctgcaactaaatccagtgagttgtaaattcgaagagcaggcaaataattcaagatgcttctatgtctgcaatgtctggagggatagaactaggccaagaatgaggtaagagtcaaacaaacacctgatgtaattgtctggataaattaggagaaaatatggtaaaaattacttgactagtttagataagcataattcagcattgacattttcatttaatcattcctatagtatttcatttgatatggacagggtctaaagagacgttaaaagtcaactaaaaattagagaaattttagtcatttcagaaaagattgattttgtatgcgttctgtattgaagaagtgatttgttcaaaagaattctggatagacgcatgaaagatagttaagaaaatagatatttgggttgattaaattctattttgggggccctataggcacaactgggtgtacctgagtcacgctgtagaatctgattccagaagcaactgagaactgactcactgtgttctagagaattttccctgtgtcctttcttgtcatcatttcctgtgttcctgacaccgtgaaatggggttggctgccgtctcaatgtgttcgcttttagctgggttagcggaaaaatcaacaggaataactccaggttctaaagtagtgattgtgaagataatacccaaggcacaccaagaagcactatggaaaatgttattgtataatagtaagtgcagaatgcaggatttaagcttgcatcttcctgcgttcttttttttttattagagatggggcctggctgtgttgcctaggcaggtctcaaactcctggcctcgagctcctcccgccttggcctcccaaaagtgctgagattacaggcgtgagccactgcacccagcctcccctgtgttcttgataaaataagaatgtgtatttcctataggcaagaggtaaatgaaagtacaggacgtggaaacattgtgtttagaaactatctacgatattatgtcgtctttgtgattaagaaaatgagccaggtgcagtggctcacagctgtcatcctaaagctttgggaccctgaggtaggaggatagcttgaggagttcaagaccagcctgggcaacacagtaagacccccatctctacaaaagagtaaattaattaattaattacatttaataaaagttagaagatacattggaaaaattaggtttattgactgtaccacattcacagatacaaatatatatctcctacaaatcagtattacctggaatttctcactaatgtgatcagggaagcagggaaatgaaaacttgagcattcaatcaataaatagttgattgtgcggtggctcgcgcctgtaatcccagcactttgggaggccgaggcgggtggatcacctgaggtcaggcgtttgaaaccagcctgctcaaaaatggtgaaaccccgtctctactaaaaatacaaaaattagccaggcatggtggcaggtgtctgtaattccagctacttgggaggctgaggcaggagaatcgcttgaacctgggaggcagagatttcagtgagccgagatcgtgccattgcactccagcctgggcaacgagagcgaaactccgtttcaataaataaataaaataaaataaaaagttgcttgtctactacatacagacaatgctaggagccagaaacatgaggaatacatgagctcggcgccaatggaacatgctttcacaccgggtgcagctaaccaccacatcata

SEQ ID NO: 35374 - DNA, 2300 bp, Homo sapien
tgggtgtacctgagtcacgctgtagaatctgattccagaagcaactgagaactgactcactgtgttctagagaattttccctgtgtcctttcttgtcatcatttcctgtgttcctgacaccgtgaaatggggttggctgccgtctcaatgtgttcgcttttagctgggttagcggaaaaatcaacaggaataactccaggttctaaagtagtgattgtgaagataatacccaaggcacaccaagaagcactatggaaaatgttattgtataatagtaagtgcagaatgcaggatttaagcttgcatcttcctgcgttcttttttttttattagagatggggcctggctgtgttgcctaggcaggtctcaaactcctggcctcgagctcctcccgccttggcctcccaaaagtgctgagattacaggcgtgagccactgcacccagcctcccctgtgttcttgataaaataagaatgtgtatttcctataggcaagaggtaaatgaaagtacaggacgtggaaacattgtgtttagaaactatctacgatattatgtcgtctttgtgattaagaaaatgagccaggtgcagtggctcacagctgtcatcctaaagctttgggaccctgaggtaggaggatagcttgaggagttcaagaccagcctgggcaacacagtaagacccccatctctacaaaagagtaaattaattaattaattacatttaataaaagttagaagatacattggaaaaattaggtttattgactgtaccacattcacagatacaaatatatatctcctacaaatcagtattacctggaatttctcactaatgtgatcagggaagcagggaaatgaaaacttgagcattcaatcaataaatagttgattgtgcggtggctcgcgcctgtaatcccagcactttgggaggccgaggcgggtggatcacctgaggtcaggcgtttgaaaccagcctgctcaaaaatggtgaaaccccgtctctactaaaaatacaaaaattagccaggcatggtggcaggtgtctgtaattccagctacttgggaggctgaggcaggagaatcgcttgaacctgggaggcagagatttcagtgagccgagatcgtgccattgcactccagcctgggcaacgagagcgaaactccgtttcaataaataaataaaataaaataaaaagttgcttgtctactacatacagacaatgctaggagccagaaacatgaggaatacatgagctcggcgccaatggaacatgctttcacaccgggtgcagctaaccaccacatcatacaaaactcgtcgctgacgttttagatgtataatctgattggcatggactcacagaggagggagtaagggaagagtaagaagatttcaaaggagaggtaattgtgtcatttattagaagtatgagtgtggggtaagagatacgtgtgtatgcatgcgtgtgtgtgaacggacttcttgtttagtaccattttgctgctgctttaccaccccaatctgttcctggacacggcgatggactctgtatatgttatctcattttattctcacaattgacctctggtggtaaaattattctcattttttacagattaaaaaaaaagcctcctttaaagcatttgtaaatctggacataagagcctctctcctaaaattcaagactgagatgctcttctctccttcctctaagcatcagggttctctgtctgcatcctatgcggaccagggcaaaataaacttgaaattcactatgttagcctgtatgcaattttgggtgatgatgggctattggtcgttttgttgttttaaaaaaagaagttagcctttattcatccgagtgccacagtcactttgtgcagtaagttaggtggtgaggtaagcttgctaattaatgggcattttaaaggactttacccagcagcagacaaaattaagccctggaaagaatttagcccagtagccagtcatatgccatgtcgtatagcatacccagccaatggggagagcgaggtgtggctgtggaaaaagacagggttaagcaatttttttaaagcactacatatttattgatagaatatctctccaggcagtattcacatgctttaaactgaagctcgtagcttggcagtgcagtttaagcaaataaactcaggctgttgaacacaatgattaacaggaagcaggggaggggacatagttactagactctggccgggacaagaggctgaggttaaggtcttagagccgatgacttgcagaatggtcacctcaccc

SEQ ID NO: 35375 - DNA, 2300 bp, Homo sapien
tccgtttcaataaataaataaaataaaataaaaagttgcttgtctactacatacagacaatgctaggagccagaaacatgaggaatacatgagctcggcgccaatggaacatgctttcacaccgggtgcagctaaccaccacatcatacaaaactcgtcgctgacgttttagatgtataatctgattggcatggactcacagaggagggagtaagggaagagtaagaagatttcaaaggagaggtaattgtgtcatttattagaagtatgagtgtggggtaagagatacgtgtgtatgcatgcgtgtgtgtgaacggacttcttgtttagtaccattttgctgctgctttaccaccccaatctgttcctggacacggcgatggactctgtatatgttatctcattttattctcacaattgacctctggtggtaaaattattctcattttttacagattaaaaaaaaagcctcctttaaagcatttgtaaatctggacataagagcctctctcctaaaattcaagactgagatgctcttctctccttcctctaagcatcagggttctctgtctgcatcctatgcggaccagggcaaaataaacttgaaattcactatgttagcctgtatgcaattttgggtgatgatgggctattggtcgttttgttgttttaaaaaaagaagttagcctttattcatccgagtgccacagtcactttgtgcagtaagttaggtggtgaggtaagcttgctaattaatgggcattttaaaggactttacccagcagcagacaaaattaagccctggaaagaatttagcccagtagccagtcatatgccatgtcgtatagcatacccagccaatggggagagcgaggtgtggctgtggaaaaagacagggttaagcaatttttttaaagcactacatatttattgatagaatatctctccaggcagtattcacatgctttaaactgaagctcgtagcttggcagtgcagtttaagcaaataaactcaggctgttgaacacaatgattaacaggaagcaggggaggggacatagttactagactctggccgggacaagaggctgaggttaaggtcttagagccgatgacttgcagaatggtcacctcacccacttgtaatttcatggtgggaacaggtggaccccctggaatcagaacctctctgaggacatctgtttttgtgtagacacaggttgcaggttagcaggagaacaggcaagccaaatgcaaaggagccacttcagaaatgtgtcacagaaaagtgaaaatgcaacctagtggtaagtgaagaggggaagaagaaagaaaaaggaccagaaccgtgaactgaagggacagggaacagccagacgagagcttcagccatcacgaggatgatttcggaacctggagaaaatgtaagttaaatatatctacactctgatcctatctcaagagagagatattttactcatttcctggttgtgaatgatgggctcttggaagcactgtctttttagcgcgtctcttatctctgccctgatttttgtatttgtttacaatactgagttatgggagaataaacgttttctgagggcagctctgtccaatgcttcactgttagcagaagcctgtcatcagatttttgaggggaaagttttttacccaacagaaaatgcattgaaaactacccttgatgaagctacctgctatgagtacatggttcgaagccactatgtaacagaaacactctctgaagaagaggctgggttccctttagcttacacagtgaccatccacaaagacttcggcacttttgagaggctcttcagggcgatttatatgccccaaaatgtctactgtgtgcacctggatcagaaggcgacggatgcctttaaaggtgcagtgaaacagttactcagctgcttcccaaatgcttttctggcttccaagaaggagtcggttgtctatggggggatctccaggctccaggctgacctgaactgcctggaagaccttgtggcctctgaagttccctggaagtatgtcatcaacacctgcgggcaagactttcccctgaaaaccaacagggaaatagttcagtatctgaagggatttaaagggaaaaatatcacccccggagtgctgcctcctgaccacgctgttggacggactaaatacgtccaccaagaactgttaaaccacaaaaattcctacgtgattaaaacaacaaaattaaaaactcctcctcctcatgacatggtgatttactttggcacggcctacgtggctct

SEQ ID NO: 35376 - DNA, 2300 bp, Homo sapien
gggcgtggtggctcacgcctgtaatcccagtactttgggaggccaaggtgggcggatcgcttgagcccaagagttcaagaccagcttggccaacgtggcgaaatcccgtctcttctacaaatacaaaaattagctgggcgtggtggcacatgcctgtaatcccagctacttgtgaggctgaggcaggaggattgcttgaccccaggaggtcaaggccgcagtgagacatgatggtgccactgcactccagcctgggtgacagagtcagacactgcctcaaaggaaaaaaaccaaacatacctcaaataatgtctgcaaaataaaagactatgaacggaatatggagaaagcctctaagatggccccaggggagtgttaacatgtctagcctgattaattggctagtttgggaataattctatccaaagtgagtgacaaggcatggctggctagtgtcaactttgtcctcagctatagttaaaggcaggcctggagggctgacttgttcagtctcagtagcaaaaaagtgcatggtgtctggataagcaggttgtacagcctattagaaaagaaaggtaacagtcttcctctaatgcaataagggattttttttaaagttctcctgtcaagattttttaataccagaatctgagagtggagaaaattggcccaaggacagacaaaagagctgggaggaaaatcgactatatttttcaacacacaatgccatttgaagtactggattgagtacggaagtattacgaacattcctaatttggttagtgtctatatttcttaatatagtaatgctattaatgtctgtctcctaagtttgtataaatccaaacccccatgttattggccagttggaaacaataatgtaaacagactctgttgcccaaattaagttatgtgcaccgaatgctttgtcaaactgtaactattttaatgttcattctaagccacaaatctttgccaaagaagatactgaattactctcttttgtttaggagtagaatacacaataacctaatatttaaaagtattattcagaagaagaaaaacttaggattgaatttttctttatcataaattttagatcattctctttgctcgattccatagaagacactaagaattagactgaactgctttctcattgtattgttttctacttgacctaaaaatccaggggtgggttatatagagagtttatttaggagactttggtaagggagagagaaaaataatgtacaagctggaaacgcatgaaaaatgtaaacaatgaaagttagaagaatggaagcgacagtgtgctcaggaaatgatgtgtcatttggtcggagttcagggtgcccctgaatcccaggagggtagcacttgctttcctgcccattgtgaaggcaaggaatccgcgtgttgtcctatcaattccattcatggcagggtagagacttttcaaatggaagaaaatgtgcattaaaggacattctttctgcatggggtggggtagtgaacgtgttggggttgaggcacggagttgtttaggtcaggtgaatagtgaggggaaatgggcaggcagtcaatggttaagttggtgttttgcaagccattttaagaggataccaaataaaatgcattaatctacatttcattaaaaattagttggtgggaaagtggaaagttgaagatgagaactttccaagtaaaacagcttcatactccttggccagaacaccactatatttacaaataggggataaaaacacccacttcctaggtggtccataagcttaactgggcaggcatatgacacttctgagcatttgatgccgttctctgggggggttaaagcctgaatgcccaccaaatcccctgtctgagcatcatttgtgaccaagattcaaattatttcccatgaagctctaaggtctcatataactcagtggatgtagctcacgacttcttcttttgaccccagtattctaagacaaacaccacagccgaagctggaagtgagaggagaggggttcgtttcagagtcaggagcccaaggcgccccagcaatttcagaccccctgggacaggaactcctcctccagtaagctcttgttttgaaaaacagtggggtggggccaaaaaagcattacaatggagctgggatggatgaggctttcttttatttgagatgtcacttgtgtcacgtttcctgaaacagcacgttggaaaacagaagctattttctatcccgtgggttgcgctggaagagctgagaggccaggctgtggatccttgccacg

SEQ ID NO: 35377 - DNA, 2300 bp, Homo sapien
ctgggaggaaaatcgactatatttttcaacacacaatgccatttgaagtactggattgagtacggaagtattacgaacattcctaatttggttagtgtctatatttcttaatatagtaatgctattaatgtctgtctcctaagtttgtataaatccaaacccccatgttattggccagttggaaacaataatgtaaacagactctgttgcccaaattaagttatgtgcaccgaatgctttgtcaaactgtaactattttaatgttcattctaagccacaaatctttgccaaagaagatactgaattactctcttttgtttaggagtagaatacacaataacctaatatttaaaagtattattcagaagaagaaaaacttaggattgaatttttctttatcataaattttagatcattctctttgctcgattccatagaagacactaagaattagactgaactgctttctcattgtattgttttctacttgacctaaaaatccaggggtgggttatatagagagtttatttaggagactttggtaagggagagagaaaaataatgtacaagctggaaacgcatgaaaaatgtaaacaatgaaagttagaagaatggaagcgacagtgtgctcaggaaatgatgtgtcatttggtcggagttcagggtgcccctgaatcccaggagggtagcacttgctttcctgcccattgtgaaggcaaggaatccgcgtgttgtcctatcaattccattcatggcagggtagagacttttcaaatggaagaaaatgtgcattaaaggacattctttctgcatggggtggggtagtgaacgtgttggggttgaggcacggagttgtttaggtcaggtgaatagtgaggggaaatgggcaggcagtcaatggttaagttggtgttttgcaagccattttaagaggataccaaataaaatgcattaatctacatttcattaaaaattagttggtgggaaagtggaaagttgaagatgagaactttccaagtaaaacagcttcatactccttggccagaacaccactatatttacaaataggggataaaaacacccacttcctaggtggtccataagcttaactgggcaggcatatgacacttctgagcatttgatgccgttctctgggggggttaaagcctgaatgcccaccaaatcccctgtctgagcatcatttgtgaccaagattcaaattatttcccatgaagctctaaggtctcatataactcagtggatgtagctcacgacttcttcttttgaccccagtattctaagacaaacaccacagccgaagctggaagtgagaggagaggggttcgtttcagagtcaggagcccaaggcgccccagcaatttcagaccccctgggacaggaactcctcctccagtaagctcttgttttgaaaaacagtggggtggggccaaaaaagcattacaatggagctgggatggatgaggctttcttttatttgagatgtcacttgtgtcacgtttcctgaaacagcacgttggaaaacagaagctattttctatcccgtgggttgcgctggaagagctgagaggccaggctgtggatccttgccacgaacaacaagagagggcaagtccagccgcctgctaggggactagcaggaagcggcacgcctgccagagctcatcacttcaactctggctttcactgcgctcattccctgaatggcagtaaccagggggcgggggtggcatgggaaatgaaagaaagagatatgggaaactaaatctgccgggggaaagagagttaccggagttttagcaaaacagctagcagatgcaaacggggaggcagagggaggagggaaggctgggcttcagcaacctgccacggggatttaaacaaaggaggtttgagagaggcgggatctggctgtaatatcggcacagggacagagacagcagctggactctcgggatgaaacggaatcgattcccagcgtctccaacagggcaggagtgagtggagtatgttgcaaaataagaactcagagaaacgagtgagtttggaaaaaagacttacagattttgacggtctcttgacatttcacccttctttgaggcatgcctttatcaatgcgttacctcttcataatttctgtctctagtgtaattatttttatcgtcttctctgtgttcaattttgggggagatccaagcttccaaaggctaaatatctcagaccctttgaggctgactcaagtttgcacatcttttatcaatggaaaaacacgtttcctgtgg

SEQ ID NO: 35378 - DNA, 2300 bp, Homo sapien
cctggtggttttgttctttcttcagaaaaggaagttggagagggggttgggtgggaaggagaatgagaatcctttaagttctttgaaatgacctcaaatctgaggttgtcaggcttttaaagagagccagtaggtagtcactccacatattgtagataatactgtgtcaacagctcaagttatctgaagctctctttgtgaaatgggacccaacttttgctctctgggaacactatcacatttctctctggcatgcaaacttaggtgtgtttgatgaagggagcctgcctctccactcctgtgggtatttcttgcaaggtggagatgagagactgagaaaagaaataagacacagagacaaagtacagaggaagaaaagtgggccctgggggaccggcgcttagtaagtgaggaccaacaccggtgctcacttactctgagtctctgagttctctcagtatttattgatcactatttttcctatcttggcgaggggaatgtggtggggctatagggtgaaggtggggagagggtcagcagaaaaacatgtgagtaaaggaatctgtgtcataaataagtttaaggaaaagtgctgggcctaaatgtacacgtaggctagatttatatttaactttacataaacatctcagtgcagtaaagagtagtattgctgccatgatgtctcacctgtatccataaggcgattttctcttagagtagaatgtatggttggttttacatttgtcattccattcccagggacgtgcgggagacagacgccttcctcttatctcaaccgcattgaggccttcttctttcactaatcctcctcagcacagaccctttacggatgtcgggctggggggctgtaaggtctttcccttcccacgaggccgtatctcaggttgtctcagtggggggaaacctggacaatacccaggctttcttgggcaggggttcctgcggccttccgcagtgcattgtgtctctagttaatagagaatggagaatggcgatgacttttacaaagcatactgcctgcaaacacatttttaccaaggcacatcctgcacagccctagatccattaaaccttgattcaatacagcacatgtttttgtgagcacaaggttgggacaaaagttacagattaacagcatctcaaagcagaacaaaatggagtttcttatgtcttctgttttctacatagacacagtaacaatctgatctctctttcttttccccacatttacttcatcatatgatatcaacactgactctttcatgtaaaatgtcagtcctaggttccttccacccttgtgtcctgcctgtgcccccaagggtgtaattctttgttccctcttcccatagtcagtgtgtgtgtgtgtgtgtgtgtgtgtgtgtgtgtgtgtgtgtgtgtgcgcgctatattctgacacatcattagaatctaaattaatctaccttgttatatttttctgccactgataatcttctacttagtcatgttacaaatgtattttttaaagtaagtgtttgaagagacagggtctcactgtcgcccaggctggagtgcagtgctgccatcatagctcactgcagccttgatctccttggctcaagcaatcctcccgcctcaacctcctgagtagctgagactacacgtgcgtgccaccatgcctggcacacattcatttttcattatctgtgtctgtatgtgcccagaggtacagataacactaaaatgaaaagaggtggcagagaacaggaagagaaagaaaccagaggagccgatatccttaaatgctgtggctcctaaggactgccagcaggttgtggggctagccagaaaaaacagagcctctgattctagaaggcttggagaaagcgtgagaagggagatcagatcagaatagattgatggaagggaaaggcggtgagggtgaagcaagagaaactcggctccagtgaaaaggacccatcattgcattccagaacgtaatttgcatttcatatgtaaatgaggaggcttcctagaggctggactgggctgggcttagctgagcctttgcaaacagcagggattcaaccctggggaactgcagaccaaagtgagagagggacgcaccgcatctccaggcacatccaaaaaggatggacgagacaccgaagcagaggatacaggaggattaaaggattcaggaaagcaagcagccctccggagaagctgtcgaaattcaagactggcaagagaagcaaattcaacctctcacaccgatcatttctcattccctgaaaaga

SEQ ID NO: 35379 - DNA, 2300 bp, Homo sapien
aggatttccactagactgagaattagtttgtcaacagcatttcagtgtcttgagaagtgtttacatttggcgtggacaaagctggcagatgacgtagaaagtaaaaagttgcctcttcaaagtttcccttcttgttaaagaataaatcataaatgttagaaacaatagtttcttttaaagactaacttacttcaagcctccttgctttgtgctaataactctgttaagccctattgtatgtaactgcgggacatgctcacaggcccaggcacgttccagctcacagcctgtttagcaaatcgggtatcagtttaagattatgaggtccagccccagccaacggatgcaggacacagcagtaaggacaacccaaaggcgtaagggacaaatatgtctgcttttcctttgttcaggagtgctctcaccatcgttccatctgcaattgagcaccctttctgcataaagtaaaaattgccttgctgagagatcttttgtctccatgctgacttttcttcgtgtcaccaattatctatttctaacaataacaaggtcttttctgcactgcagtgacaaccaaagcatcccaaatgaaatcatttctgcaagacccaaactagcctctattaacacgtactaacaattcagaacaccagagaagaaaagttattggaaacaaaagggtctaagcgctgaagcactgtatcgcacttgaaatggaggctgaagatttgagaaggatggactatgcatcttgtttaccaaatgacctactacggtgtttatgagaactatacgaaccaagatttactctgttgggagcttgtaggaaagctgtaatgtctaagacatacctgaatctctaaaccttattaaataaaactttttttttctttgaaagggggcctggctcgtcccccagactggaatgcagtggagcgatctcggctcactgcagcctcgacctcctgggctcaagcaatcctcccacctcagccttccgagttgctgaggccacaggcgggcgtcgccatgctgggctaatttataacatttttgtagagacggcatcaaaatatgttgctcaggctcactttgttttcccaactctcaaatgaaggctctggccgggcgctgtggctcacgcctgcaatcccagcaactttgggaggtcgaggcaagcggatcacctgcggtcgggagttcaaaaccagcctagccaacatggagaaaccctgtctctactaaaaaatacaaaattagccaggcgtggtggcgtatgcctgtaatcccagctactcgggaggctgaggcaggagaattgcttgaacccgggaggcagaggttgcggtgagccgaaatcgcgccaccggactccagcctgggcaaaaagagcgaaactccgtctcaaaaaaaaaaaaaaaaaaatgaaggctcactgctccctccccaggaggtgccgcaaccttggccaatacagccccagagttagacaagcagacagagaaagtgtgcagggctggggttctggcccgggcagacgggaacgcggacacatctagcactccgagtccgtcaaggcagcgcgagcgctgcgccgctggaacaagtcaccgcgaaccctaatcccacccctccttaccctattaacgacagaaagcctcgttccgctggtccctgaacaaaaactcctaccctactagtacacagcccacaacaatgcacgctgccggcgctacagcccctaagcaaccggccggaagtcggccccacctcctcctgatgtcacggaaatgaagggcttcgcagaggatgtcccgcccgctcccttcagacgggcgtagctggcaccttcctgagatatgcctgcttgcccccgatttttttctccttgcagtgagaacctcctcatgtggcatctttacttattctcttcttggaaaatccatgtgacctccccgcgcttaaagtgtttccacgttacaggcgacttaaaggcagccctggagcctgacgtataattcgagcgccgatgcagaaaggagtcaggtgtttttttttttttttttttggtttccggttctgtcacctccaggctgagccgggctggcggaagaggcacgtgcgctgctgaatggagctggtcgctggttgctacgagcaggtcctctttgggttcgctgtacacccggagcccgaggcttgcggcgaccacgaggtgagataccgcgtagttagagacagtcggaggcggggccgggaaggtcgggtttggttcctacacagcagaggtgaacattgga

SEQ ID NO: 35380 - DNA, 2300 bp, Homo sapien
ctcccaaagtgctgggattgcaggcatgagccaccgcgcccagtggacaagtcttataaagaaaaaccaacagagtaaaggtatgtttccatgagtaccaacgtaagctctagagaatcaccaataacgaaatctcaggaactctgtgcttattgccatgtgacaatagcattaggaagtctgattggatgagtgcgaagcatgacagcaaaatacacagacacacacacacactcactcactccttaaactgaaggaactgcatcaaaaagtatttgcaaaacaaaccgaaaaagaaaaaaacccatcaaacttctttgaacatgtgttactgcaaatcaggtccttagttacagaagatactccttccatcatttaagaccaagggggcctcctttgaatcaagcatttttgcgggtctgctatggccttaaatcaaataataaccttttaaaattcacataatgtaggttatctaggctattgcttagatttagtagaagtatagggtaatggttaagagtttcaaatgtcagagaccctcgggggctcctgacattttggggtcagctgtgtcaattattatctgtgtgtccttcagcagtcacttaacctatctaggaccaacattttggtacttcatctgcaaaacgagaataactgcatcctcctcagagggttgctgtgaggactactgtgtgtctggaacacagttaagtaatttcactacaaaaaaaaaaaattaaatagcatcatctttgactattcaaaacacatcacttttcagccaaagacaaagagcaaataactggagtaggaaacaaaataaacgaaagcaataggccaagtgatatacttccaaattttctggataattaaagaccgacgccttgacttcataaagaagtactgtactcaattttctagaaaatgcttagaattgcttcaagaataaaagtgagctagatgttaggaggtcggattcctagtcgtgagtatagtcctatctacctatttgactactgataatttatttgacctttttatctattcacacatctagtaatatcatattctgctgtaatttctctccatctatgcgtctcctcagtcctccaccccttatgtaggcaacgtctctaaggcaagatccatacctccagcatctttgcatctccaccgcccagctcgccataagttcccaacaaataatgaattggtatcgctttacctataagggatttatcctaatctagttctagtaatttgtaaaattccagggcagaaattcagcaaaagagcgagatcttctttcattaaattctgaatactgtcaacttatgggatcgatccttaaatccacaatctacgactcatttgtccgtatgcagaaatgccggtttcctttgtgtcccgtggaccttttgtctactagaaaaggcagatattgcctcattttgataaaatgtccattctacggtttaaaaggttagcttttctcttaagtctcttaggtttgattcatcaaatcatccagtgaacagcaggcgctccaatgttcacctctgctgtgtaggaaccaaacccgaccttcccggccccgcctccgactgtctctaactacgcggtatctcacctcgtggtcgccgcaagcctcgggctccgggtgtacagcgaacccaaagaggacctgctcgtagcaaccagcgaccagctccattcagcagcgcacgtgcctcttccgccagcccggctcagcctggaggtgacagaaccggaaaccaaaaaaaaaaaaaaaaaaacacctgactcctttctgcatcggcgctcgaattatacgtcaggctccagggctgcctttaagtcgcctgtaacgtggaaacactttaagcgcggggaggtcacatggattttccaagaagagaataagtaaagatgccacatgaggaggttctcactgcaaggagaaaaaaatcgggggcaagcaggcatatctcaggaaggtgccagctacgcccgtctgaagggagcgggcgggacatcctctgcgaagcccttcatttccgtgacatcaggaggaggtggggccgacttccggccggttgcttaggggctgtagcgccggcagcgtgcattgttgtgggctgtgtactagtagggtaggagtttttgttcagggaccagcggaacgaggctttctgtcgttaatagggtaaggaggggtgggattagggttcgcggtgacttgttccagcggcgcagcgctcgcgctgccttgacggactcggagtgctagatgt

SEQ ID NO: 35381 - DNA, 2300 bp, Homo sapien
agctgagaagtgtgggcgcagggcgcaggactggaaggcagctccacctgcagccctggtgtgggatccactgggtgaagccagctgggttaagtctggtggggaggtggagaacctttatgtttagctcagggattgtaaatacaccaattggcactctatatctagctcaaggtttgtaaacacaccaatcagccccctgtgtctggctcagggtttgtgaatgcaccaatggacactgtatctagctactctggtggggaccgtggagaacctttatgtctagcttagggattgtaaatacaccaatcggcactctgtatctagctcaaggtttgtaaacacaccagtcagcaccgtgtgtctagctcagggtttgtgaatgcaccaatccacactctgtatctagctactctggcaggaccttggagaacctttgtgtggacactctatagctaatctggtggggacgtggagaacttttgtatctagctcagggattgtaaacgcaccaatcagcaccctgtcaaaacagaccactcggctctaccaatcagcaggatgtgggtggggccagataagagaataaaagcaggctgcccaagccagtagttgtaacgcacttgggttttcttctatgtggaggaggctttgttctttctctttttctttttgcaacaaatattgctgttgctcggtgcttaggtcctgtgttgtctttacaagtggtaacgctcactgcgaagatttgcagttttgctcccaaagctacgaagaccacgatcccaccggaaagaacaaacatattccagacgcactgccttaagagctttaacattcgttatagaagtctgtagctttgctccttgagccagtccaaagctagggagaccacgatcccaccgggaagaacaaacaattccagacacactgccttaagagctttaacatccaccacagaggtctgtagctttgctcgttgagccagtgagacagcaaacccaccagcagaaaaactccctgaatacttctaaacatcggaagaaaaactctagagacactgcttttaagaactaacactcatcgcgagggtctgcagctttctcaagtcagaccaagaagccatcaattttgaacacactggcacgttgtgatctctcactatctccactaaaaataacaaaaattagcctggcagccaggggtggtggtacaggcctataatcccagctactcaggcagctgaggcaggagaatcagttgaacatgggagtcagaggtagtggtgagacaagatcatacgctgcactccagcctgggcaatagagtgagactccacataaaaaaaaaaaaaacttggctggaattcgctttattcactgacaattatattggtcagatttgtgtatgttgatacttgtaggggatggagagggagaagtcaacgatgacagcaaattttagtgtagagcaactaagagaatggtggtgcaggaaacggaataggagtgactccaagtgggaatggagataatatgctgtggatattttgggtccacagagctgggtaaaaatcaggtttaacttactccccatccccctttaagatgcttctcaagcagcctcactccctaaaacaaacggatatttggctttgagccacattattctgcagcccccgtattttcttccaggcaggcccttcctggtgtagacaagatcgggcttgagtgacactcctccctgatggcctgcatctggtttataccctgtaacttgttcctctattaatggggtccttcaaaatccagcctcagattccctggtcccgcagcggtggcctcacctctggcgtggccgagctcacgtggtccggcttgtgcaagtcccaggtccaactccgggtctcctgcttttggccactcaggattggacctgggactgatactggtcggccctgcaggcgctgcggacaggggaagcacagagattccccgccgcgttccctggactcaggagctcgccgcgatgccccgccccactctccacccgctgaatgcagggcgcatgctgctacttggcggctcaagccccgcccgcaccgtccccattctctgaccgcccctctcccggtacactgcgcaggcacaacagagccgctcccctctcctcgccccgccaccgggacggagagcgcccgccgctgcatttccggcgacacctcgcagtcattcctgcggcttgcgcgcccttgtagacagccggggccttcgtgagaccggtgcgagtatttggggatt

SEQ ID NO: 35382 - DNA, 2300 bp, Homo sapien
aagttagttaacatatgtaaagcgcttccaacagtggcagataataagaactgcatatgcttctgctaatatttttatggctccaatgaatatgatccagaagtagatggcagataggttaggttaagaaaataggcggttttttttttatgatttcatttatttcttggggaaagagttattgaccttgctcttcaaacaaacctataaaatactcccaaagatgtagaaattggtattgtagacacttgatagacatgaattacctgggcagactgcaacttgggatttgtttttgacgtttttgttcagggacttcttaatttgtaaagtcaacacattcaggctccaaaaatgctaaactaatgcttacattgaagctcaattccctttcttcatgagctcttgtgttgtgggagatgatctctactgctcttgctgtgtgagtacacacctgtgtgtgtacctgtgtttgtctaccagacacaattcttactcaaagcctctttgtgggaaaaacaaaacaaaacacccaaacctactgataggcctcagtgaccaaagactagaaacttaacattccctgacataattttgattacacccttttgacacatttgtgttccagggttccgataattcagtgggcccccagtgaagagctaagctatctcctaacaacgttaatgccaactagaaatattcccaaacacaaatcattgattgttttactctggtactaattgaaatagagcagaaaccaatttctttaatttattttatgacatgttttgatggactttacctacacagaagagctatgtgttctggttgaggaacgacactgcaagaagcagcatatggtagaattaaggacgcaggctttgacattagaccttactttaaataatagctctaccagtgaccaggactgtaggtaatttaattctctgaggttcagcctcttcaagtataaggtggggaagggctcgaggatcatggtggatgatcctaattaaggtttgaggcttgcacctgcatagggaagaatgagtccctaaagccattccctgctggttaagacaagtctcattaattgttcaggaaagtcttcaattaaattgaaggtctggcatactgcaattcctgcaagttcttagttattatcagctctggctggttagaagcagctatgataaacacgggcttcaatttagctatctggaaggtaggtgctgctgcaagtggaaagtttgtctttaagaatatgcgctgcaatttgctttattcactgatgattatattgatcggagttgtctatgttgatacttgtaggggatgaaggagagggagaagtcaacgatgacagcaaattttagtgtagagcaactgagcgaatggtggtgcaggaaacacagaagaggagcggctcggaagtgggaatggagataacatcatactgtggacattcggaatccacagagctgcgtggaaatcagatttaacttgctctctctccccatttaagatgcttctcaagtagcctcactccctaaaacaaacggatatttggcattgcgccacattattctgcagctgccatattttcttgcaggtggaaggcaggcccttcctggtgtaaacaaacaagatcgggccagagtgacaatcctccctgatggcccgcacctggtttataccctctattaatggggtccttcaaaatcatcagatgccctcctcccgcagcggtggcctccacctctggcctggcccagcttacgtggtccagcttgtgcaagatccaattccaactccgggtttccggcttttggccactcaggattggacctgggactggagctggtcggccctgcaggtgctgggcctggggactgaggaagcacagagattccccgcccggttccccgccaacggcgctagccgcgatgccccgcctcactccccgcccccgggatgcagggcgcgtgctggtaatccgcggctcaagccccgcccccactgtccccattctccgctcacctctctccaaggacactgcgcacgcgccacgacgtcccgcctttctccccgccctgccgcggccccggggcgcagcgcgcacgcaatcgcgtttccggagagacctggctgctgtgtcccgcggcttgcgctccgtagtggactccgcgggccttcggcaggtcggtgcaggtctttggagagtattgtttttattttctgccacttttaacttttagggattatttaggagtttcacggccgtctgcttttcgtcc

SEQ ID NO: 35383 - DNA, 2300 bp, Homo sapien
acaacgtgaagatgttaagaggctaagtaacaacaaaaccctacctgtttttacatagccaacgatcccaccagaaacaaccagtgctgtgtagccaaagccaaaccaatgcaaaggcactctgaaaacacaagagaagtcagtgagaagtcagtgctaacctggatttaaaaacaaaccatattgtcataggatggggctaaaaggtaatcattccccacaggtcctatgtgcccacaggtactatcactgaaaataagcaccacagaggttggatgactttctgagagtcacacaactaagcaaagctagagctgggactcaaacccaagtttctggcccacaggtccagtgatcctcccatcccgcacgccatcccaggcagtctactcttagggttcttttcagctgaggaaaggaactctggtttccagaagctcctggctactctctaaccatttactgtctactcacaatgggaagaggggcttctccattcttctcttctcagtccagaaaggagactaccccaggcctgcatctggggaaaacaagccggatcagcagtggttaaaagcacagctccccagcagtcagaaagaagtgtgtccaacctgcaggctatgcaacctaagtctcagtatccttcactgtaccatgaggataacactggtaccaatttcctgggggtgttgtgagcattcaatggatgtcacatgtaaaggtgcttagcacctagtaaaccctgaacagatgccgatcatttcacataggtccacaggaaactcagcaagatccactgaccagctctataatcagggaatgtgttagtcatttcattaagcactcacattatcactaaatcggaaagcaaatactcccgtgcccttaatccaactactttaatgtctcttttgaggggtggtagggatgttgcttttcttcactgatgcaacagccaatttcaatactcaatttttttttttagaaacttctgcatccaactcacagttctcgttaggagggcagaaggggagggtaaaatacacggaaactcaagtcagaatcacatgtgacattgcacccttggaaaaacagctcctattttcttacagaaaagtattctgtatgcagtgaacctaacaagatggaaagcaatgcatacgccgtttattctgtttaaagaattaggccaggcaaagtggctcacgcctgtaatcccagtactttgggaggcccaggcaggcggattacctgaggttaggagttcgagaacagcttggtcaacatggtgaaacccatattctattaaaacacacacacacacacacaaatcgggcatgatggcatgcacctgtaatcccagctacttgggaggctgaggtgggaggatggcttgagcccaggaggcagaggctgcaataagacatattcaggctactgcactccaggctgggcgacacagcgagaacccctccccaccccccaaaaaaagaaagaattaatttcccataaaacggggaagggcagcgggcttgggatcttgcccacagttcttaactcgaggcggcactgagtaagggaggcttttaaagagctggagcaacaaaaccaccaggaaacgaggcaacactatgctacaagggtaagcctttgcctcaggagctcaggtgctccgagcatccacagcctcttttaagacaagcagaaaatacccaaggagaaaagcaccgaccacacggcataaaggcccgctgaatcggggggacgaaaagcagacggccgtgaaactcctaaataatccctaaaagttaaaagtggcagaaaataaaaacaatactctccaaagacctgcaccgacctgccgaaggcccgcggagtccactacggagcgcaagccgcgggacacagcagccaggtctctccggaaacgcgattgcgtgcgcgctgcgccccggggccgcggcagggcggggagaaaggcgggacgtcgtggcgcgtgcgcagtgtccttggagagaggtgagcggagaatggggacagtgggggcggggcttgagccgcggattaccagcacgcgccctgcatcccgggggcggggagtgaggcggggcatcgcggctagcgccgttggcggggaaccgggcggggaatctctgtgcttcctcagtccccaggcccagcacctgcagggccgaccagctccagtcccaggtccaatcctgagtggccaaaagccggaaacccggagttggaattggatcttgcacaagctggaccacgtaagctgggccaggcca

SEQ ID NO: 35384 - DNA, 2300 bp, Homo sapien
ggtgtttggaccatgggagcagatccctcacaaatggcttggtactatccttgcggtaacgagtgagttctcactctgagttcatgcaagacttgatcgtttaaaagagtctgggacctcctccctctctctcttgctccctctcttgccatgtgacaggctggatcctctgccaccttctgccattattctaagtttccaaaagccctcaccagaagcacatgctggcactatgcttcctgtacaacctgcagaaccatgggccaacacattctttatagcaatgtaaaaacggactgacacactctctacacacacacacagacacacacaccccactcatctgttaatactgagaactgttactgtgagaagattcttaccttttcagaagtatgtggaaagatttgtgttttgtggaaggcaccaatattaagcaaatttttttctttttttcttttttttgagacagagtctcactttgttacccaggctggaatgcaatggcacaatcttggctcactgcaacattcacctcccaggttcaagaaattctcatgtctcagcttcccgagtagctgggattacaggtgcacaccaccacacccagctaatttttgtatttttagtagagacggggtttcaccatgtcagccaggctagtttcaaactcctggcctcaagtgatcaacctgcctcggcctcccaaagtgctgggattacaggcctgagccactacacctggcctgttaagcaaacttttcttcttttagggtctacatgcatttatatttaatgagtaaaataaagttaatgcatggcaaaaatatttttctgaggaatttgaaatcttaccgaaatggagaatcttttttccttttttctttaaaaacacccatgcttggcttcttggaatgggaggctccgaaatcatagtcctccaactcttcccagctatctccagacttgaagatagtctgaccccaacgcctcctaccacttttatgactcagtgtgccatttggcttctgtggtggaaaatcagtcatcataatctttaatcatgtactgaatgcctttcatgcacaagctactatctatgtaagacactaacagtccccattctcaaggagcgttccatacatgtaagggcataacatatatacacatttaaaagcatgaacaaaaatgggcggtacatgccaaaaatatgataggtgttcagaggagagatctctgtgaactaggttggtgagagacttgaatatttaggatctgagttgactcttcattgacaggaaggatctggaaacctgagacttggctatgctctttgggcaagtgacttaacttctcaaagccttagtgtcctccttaagtggggacagccttaatgagaaggacactaaggctggcatgtgccagcatcttttactcttccccctccttgaatgcagacacgacatccaaaggaacaccagtcatcctgtggccacaggaatgaaagccacctgctcagggtggtggagcgggaagccagcagcagcctgcctcctctgcaagcttcatgagctccagctacccaccacccgatttcttgttatctgagaacaacaatccctattgtttaagccacagtggtcgagtttttgtcataagtccctgaatgtaatcctaacggaaacagagagggaagtatgagtctgactgtcacagaatggaggcatcattaacagaaataaggaatgggaaagaagtcctggcttagagcacacaatgaattggttttatacaaatttacagaaagtggtttgggggcacataaacagaaaaatccaaaaggcaactcaaaactagggaagagagcatggaaaattttcagaaaatacacctatgttgggtgcagggagattcttaaagaatggacatgctattgcttgaagctgacggtattacagtgatagtgatggatgataacaaaaagcagtatttgccagcttctctacactattactttctctgccaggcacaacaatctccagaataaagagaataaaaaaaatgttaagctccagatgagtagggttaataaaaggttacccttagctgagtttgagcctcccttctgttgaattgtattttagggtactgatcctgaacactgctgaacaatatcagtgatatgcaagaatctggtatggctgagaagactggaaaggggcaaatataatacttttaataaagtagaagatttatttttgcaaactccacatcagtaagtttggtagaggatgagggca

SEQ ID NO: 35385 - DNA, 2300 bp, Homo sapien
gggtttagctccagaccacggcaataaagtgaatattgcaataaagcaagtcacacatgtttttgggtttaaagtacatatgcaaattatgtttacattatactgtagtctatttagtatacaatagcattttgtctagaaaaaataacatacataccttaatttaaaaatatcttattgtggccgggagcagtagctcacacctgtaatcccaacacatcgggaggtggaggcaggtggatcacttgaggtcaggagtttgagaccagcctgtccaacgtggtgaaaccctgtttctactaaaattacaaaaaatagctgggtgtagtagcttgcgcctatagtcccagctacatgggaggctgtcaaaaaaaaaaatcttattgctaaaaaatgctgattatctgagccttcagtgagtcatagtctttttgctggtggagggctttgcctctgtgttgatggctgctgaccgatcagggtggtggctgctgaaggttgagatggctgtaaccatttctcaaaatgagacaacaatggtatttgctacattgacagacttttcataaaagatttctctgtaatatgtgagactgtttgatagcattttacttacagtagaacttctttcaaaattgaagtcagtcttctcacatcctgccactgctttgtcaactcagtttatgtaatattctaaatcctttgttcttgactgggcactggttcatgcctgtaatcccgccgaggcgggcggatcgctgaggccaggagttcgagaccagcttggccaacatggtgaaaccccatctctactaaaaatacaaaaattagccaggtgtggtggtgcgcacctgtaatcccagctactgggggtcggggtgggcacctgtaatcccagctactgggggagtgatggtgacaggggtgaggactcagggacaaaaatcacttgaacctgggaggcggaggttacagtgagccaagattgtgccactgcactccaaccagagtctcactctgtctcaaaaaaagaaaaaaattcttttttgtcttttcagcagtgttaatagcatctctaccagaagtagattccatctcaataaaacagtttctttgttcatccataagaaacacttcctcattcattcaagtttgattatgaggttacaacatttcagtcacatcttcaggctctacttccctttttatttattaaaaaatttttttttctttagagacagagtcttactctgtcacccaggatggagtttagtggtgtgatcatagctcactgtaaccttgaactcctgggctcaagcaatcctcgtgcctcagcctcccaagtagctgggactacaagcgtgccatcaagtccagctagttttttagtttttgtaaagaagggcatgatatggtgcccaggctggtcttgaactcctggcctctacaatcctcctgccttggcctctcaaatcactgggattacaggcatcagccaccacgcccggctatgtttcttatttctttgtatgaacctagtgtgacactaaatcctaattagtatttacatttttcttagtttgatgtaaaataaagtagcatgttatttaaatagaatatgaaattttaaaataatgctattcctttcatatgaaacaaaagtttgctttatacttaccttacccaattggggtacttatattccacagaaaatttacaagtagtacagttttaaacaatatgccaaattaaatatgatacaaaaattgattcaaagaatggatatcatatagacatcaattttccaaggtctgatttggaataatgtagattatatttagtaaaaaaggaatcatacaagccattatgccattattgaacataaatagcacagtaccatgtaaatgaggcatttaccaagtgagtattaccagtgagttatatgtgaacttcattttacatagacaaatgacttactgacaaatatttaacacaatagtatttatattatttataattttccctttgctctaagttgccagtacaatttttgaagagacttgttaatgaaaattcatgatatccttgttttctttctttagggtgtttataagaatggaagtgttgtttccttgcccgattccttcatgctatatctcatgaacctctgtaatcttgggggagagactatatttaatgatgacaaacctgtcaccagtgtagcaacaacagtgtgaggacaaaagcaaataaaaattaagaagcgttcaaatttatattcaacaaggaagtcatttcaa

SEQ ID NO: 35386 - DNA, 2300 bp, Homo sapien
atccaccctacccactgctcctcttgggatctttctgaaatgcaaatgtgaacatgtcactcttctgtgggagattcttcactggtcttcctcattgacacatgttaaagcttaggcttcataactgggtatataaagctgctatgacctatctaacttatgctttttactttgcctgcctacttcacttatttattggagagcaatgaatcttttatttattattattattattgagacggagttttgcttttgctgcccaggctggagtgcaatggtgtgatctcagctcactgcaacctccgcctcctgggttcaagctattctcctacctcagcctcccaagtagctgggattacaggcatgcgccaccacgcctggctaattttttgtagttttagcattttagtagagatggggtttctccaggttggtcagactggtctcaaactcccgacctcaggtgatccgcccacctcggcctcccaaagtgctgggattacaggcatgagccaccgcgcctggccatttattattattattattttgagacagagtcttgctcagtcacccaggctggagtgcagtggcacgttctccgctcactgcaacctctgcctcctgggttcaagtgattctcctgcctcagcctcccgagtagctgggattacaggcatgtgccaccacacccagatattttttgtatttttagtagagatggggtttcaccatgttggccaggctggtcttgaactcctgacctcaggtgagccactcacctgggcctcccaaagtgctgggattacaggcatgagccactgagccccgtctgtttttaaatgtttatttcaatagctcttggggtacaagtggttttttgttacatagatgaattatatagtggtgaattctgagattttagtgcacccatcatctgagtagtgtatatggtacctagtgcatagttttttttatccctaggctctctcccatcctcccctttctgagtctccaaagtccattatttcactgtgtatgcctttgcatactcatagcttggcttttgcttataagtgagaacatacagtttttggttttccacgcctgtattactttgcgtagaataaggacctcccactcttccaagttgttgcaaaagacattatttcattctttttttgtgactgagtagcagcctatggtgtatatataccacattttctttatccactcattagtcaatgggcacttagattggttccacatctttgcaattgtgaattgtgctgccataaacatacgcgtgaaagcctacttcactttaagctgtgagggccacaggcatgtctgtcgtgtctaccttggcgctattcttggtcccaagcccacatcctgacacctaataattactaacttgccgcaccactgcttcatcacttatgtttctgtttcgtagaccctttttgccagccaatctgaactatttgcagtaacacaagtgtgccttcctctctaaattctagactagttacaatttacccatttattcacacattcagtcatttttcttggaattaccactatctaactctgtggctgatactaggcaggttctctgaatgaataaatggaaacaaacttagaagggcagctcaagaggtaatacatacccaaggaattgaccaatttaaggaactgcatacaagaacagtttttccccaggcacaagtaaacaagtgcaagtatgaggcaaacagacttccttctcttgctctgcccggtctgggaaccatattttaattaatcaagactttgtagaatgaatcggaacaaaaccaaaacaaaataaagggcaaacaaaccaacttctgacaaagacctgactgaaaaggtaatcaactcccctaaaccccaagtctaaatggcacacttgctgcagctcagccgacagtcccccggctccatgaagccccgccccggggaaggcggggcctgcgggaattggcggggatttcccgcgaggccacgccctctctgggccggccgtaggcccgcctgctgcccccgccgtttcctaggagatgaaacacacaagacgccggagcttcacaagggagcgaacgaggtaagcagcaggcgcggacaggtaatccccagcgggctgcagggccaccaccctctgtccgacccagccggagcccgacctgcgaggctggccgggcatgtcccctcggcgccctgtgctaccagggccaatctccgcccggagaccggtccctgacgccggtaggggaaggact

SEQ ID NO: 35387 - DNA, 2300 bp, Homo sapien
cttcccgggtctggagggtcatggattcggttcatcctcctctatcaagggatctgccgtgaggagttggctcctcttctctggctggggctgggaatggaagcgtgcagctgcaaaacaaggacgcgggcaataaattccagaagccctttcccctggccgccaagaatccggccttggggtagtcaaagagtgactttagtcacttcaatcggttttgttttgttttgtttgttttttgttttttgttttttttatatatatatatactgagggtctccatgtgccggagtagccctgggcgagtcggctgctcagatgatgaaggtttcgtcccagccccggagaacccacattgtcctgcgcacctccgcaccaccgcgattctctagtcctccaaagcctcccaagactgtaatggagtaaattcaatttcgtcgtgatatttccaagactatatcagtgaagtttttttttaagagttgtgggccgggcgcggtggctcacgcctttaatcccagcactttgagaggccgagacaggaggatcacgaagtcaaaaaatcgagaccatcctggccaacttggtaaaaccctgtctctactaacaatacaaaattagctggtcgcgatggcgcgcctgtagttccagctactcgggaggctgaggcaggagaatcgtttgaacctgggaggcggaggttgcagtgagccgagattgcgccactgcactccagccgggaagacagagtgagactccgtctcaaaaaaaaaaaaaaaaaaaaagatttgtgttcgggtgggtggcaactgagagctcgccgaaccacaacctcttatttaacagataaacagataaggaagctgagacccagagggagccaaagcagtggagaaagcgagttctttgggacttttcccctctcccctttccctccttccccaggctcccacctaccccaggctcccacctaccccgggctcatttccgccccccacctcctccaggttcactttgtaggactccgttcctgcagggccaggtccctccgaagtccccgggagcgtgaaggcgcctgggctcgcgagcatacgcggaggcttggcgcaccctggcacgtcccaaacagcagagccaagactgcgagacactcacaatagttaggggaagagccggcagtggaggcccaaaatgggctgacccctaactaggaggcgtgggcgcggttattcaggctagggcgcacgcggacggcagaggggcccacgcacggttcccatgctctcctggaattgagtgttggctctcaggggactttgctggaaagcctccatctaagcccctttccgaaatcagggaagctggacgcgtttagaaaaaagaaaaaaaataggccggtcgcggttgctcacgcctgtaatcccagcactttgggaggcccaggcgggcagatcgtcaggagttcaagaccagcttggtcagggtttcgcatggctaaaacctgtctctactaaaaatacaaaaattagccagggtggtggcacggacctgtattcccagctactcgggaggttgaggcaggagaatcgcttgaacctgggaggcagaggttgcagttagctgagatggcgccactgcactctagcctgggcaacagagtgagacaaaaaagaagaaaagaaaagaagaaaataataaggttttaaacttaaaggatacattcctacttaccctctccacccccaccctctggctgcagtttccatttgcttccagggctgagtttaacctccacctccgttcctgggactgtggtggagggggcgaccggcccctggagcgtgggcgctagcgaggtaggcgagacagggcggagccccccggaggtatatctttataaaggagggggcagctgccagaggtcgatgctgccgttcgggtggagaacgttcagcaccgcggccaaggacaaggccccgcccgggtccataaccattgtccccagcttccagatatctaaacagcctctctctctttctctctctctgcacctccccttcacacaccccactttcttctttaaagagaagaaaaaaaacccacctggcgcacctgtccttttttcttctatttttcagaaccctgggcggaaagcgcgagcgagttgggcagatgccggcggccgcggtgcaggaagcggtcggcgtgtgctcctacgggatgcagctcagctgggacatcaacgatccgcagatgcctcaggtaagtgaaccgggtgtgtgcgggcacgcggggcgctg

SEQ ID NO: 35388 - DNA, 2300 bp, Homo sapien
ggtcctcctcccagtcaaagccgaagggtcctagcagaagaaagtgatttgttcattcccagcctcctttctcccgaagttctcccctcctaaaaggtcctgtcagtcaaggtttctgattaaaatcactctcaaatggtcgccactgaggtctagctgggaacgaagagatctgtctactcttcacccacgagtttcattcacagatttttcatcttattaactgtctgccaaaggtccccgaaactcctgttgattcagttgcttttcgtgttgttttgtcttccaaaattgaatgaaaatttattgattatccattttaattatagtatttcattaaatgttgtagtctaagataacttatcctttcaaatgttctaaaaataactttaaaatggtgatttaaagttacctctgaaaatgcatagaaattaatttttggtcttattgcagtgctagaatagttcttgtctctgtgcttttggaatgttcctagagagacctgacccgtcaaaaacataaataaataaaacttttttatgtaaaaggcaaatcaattaatttctaaagggattctggtatccaaagaaatgtcatagagcctctactatatttagtttgagaagaattagagtatgcatttcaagttgccataaattatattaagacaaaacatgttagtaaaagaagctaatcaaagtaaaaaaaaaaccagataaaaggtattttgcctattctgttatttttaatttctcttaaagatttgaatgcattgcaccatagactttggaaggacatgttttcccccaaagcctgaaaataatagatgattaagttttctatctaatattatgaaaactctaatttttaaatattctcttaaaattcatttaaactgtagtattttgtttattgcttcttattattcattgtttctttcttgccctggtattatatttgtattgactcacaatagcttatactcacagctgttcctgtcttgattactagtttaatattacaaaagtccattcattgaaaaggaaaaaaacttgcgtttgaatttccttggtttagattaaaataggtaaattaatgtaagaatgtttacattatactttccaggaaattgatatgacaggctttgacataaacattgttttgaacggactagaaatgtgtgcaagtcctgggctaacaggggttctggttttgttatgttttgctttggtgtagacaaatatcttccgtacatattatgacttgaaatactcacaggtctagttataatacaagttgatttttacacaaaggatgtttggattggaggggtcttttttttgttttttgtggaaaactctagtccaatttaattttgccaccgtgttcacacaactggccacctatccgaatcagcctagccattggtacgcatacttgtcaggttaaaggaaataggcaaacaaagaaacaaaaaaacaaaaacaaaaacaaaactatttgctttgattaaaaaaaaaaattccccttcctccccaccacggtacttaaaaaacaaccaccaaacacactttgtgtgtgtgtgaaatcaggaatgtattaataatatcgggtacaagtctggttaccataggaaagggttcggcttctgtctgcacacatcaatggaccaaaaactgctcctctggctgttttttttttgagacggagtctcactctgtcccccaggctggagtgcagtggcgagatctccgctcactgcaacctccgcctcccgggttcaagtgattctcctgcctcagcctccccaacagctaggattacaggcacgtgcaccgcgcccggctaattttttgtatttttagtagagacaaggtttcaccatgttgaccagactggtcttgaactcctgacctcaagtgatccaccagcctcggccacccaaagtgctgggattacaggcgtgagccaccgcgcctggccgcccctctggctttttaaggcggggcaaaaacttggaacagctaccacaaagcgaacgcctatctgtttggaatttcgcaaataaggaacgtttaaatgacgtagttcacatcctttgagtgctggctttctcttaaagggtgagtgcgtgcgcccaggtggtttggcctgtgtgcgctagttacttgcacgcgcttcttgagtctcaaaacacagagctctagtaaacttcagggggcggattcgtcaattacagttgcggaagaagactcgactcgaagagcggtccgccaccagggctctttcggcagcgcccc

SEQ ID NO: 35389 - DNA, 2300 bp, Homo sapien
ctggctaattttttatttttagtagagaccaggtttagccatgttggccagtcttatcttgaactcctgacctcaggtgatccgcccaccttggcctcccaaagtgctggaattataggcatgagccaccatgtctgtctaggacttctttataggagacagaactaggtgaatttgatggatccagttaaaaaaaaagtcttggaagggtgagcaattttcaatgaaccttgaatggtaggaagaattgaagaagaaatcagagcatttttgccttgcagaaggcagctgctgtgatggcaggaggctgaaatggacatggcctggcagaagagtattatggggtggttgtgttgtgagccatctggcctgtacaatttggagaaacaatacttttttttttcttctctgcaagctgggcttcctgtgattgtgtcctcaggctgcacaaaaatagcgtatggctttgctgtgtattcaccttcatcttaaaatagctagaacattttccctcttcttttaaaaagtttttaaaatgagggttagactcttgtaggaaaaggtagaattcttaataacagtactcatgttgacaaacctttctcgtcaaaattcctatgtaatcaagactcttatgaaatatggacctttatatttcctcagactctgagcctactgtcatatactgcataaagtaattctttagccaggattcagtataatctcagtggaaagaccatgagctttggggctatcccaaactgggttgaacctagagtttgagccccacctctccaatttatgggatgtatgcattttggcaaggtagttgacttgtgaagcctgagtgacctcatctgtaaaatgggactaaagcccacctcaaagtcttgagaactcagtgagagaaactgaaaggtccagggctgttgtaggcgctcacgtgttaatttcctttctgctctttgtcatttctcatttgcaggaaaatttgatgaaaatagagaaatgtaattatcttgtttccaaaatcatttccttccccagagctatcaacttctcaattgaatttttttttttttttttttttttttgagacagagtttctttcggtcttgttggtcagactggagtgcagtggcatgatctcggctcactgcaacccccgcctcctgggtgcaagcaattctcctgccttatcctcccgagtagctgggattacaggcgtgtgccaccactcccggctaattttgtatttttagtagagacggggtttctccatgttggtcaggctggtctccaattcccaacctcaggtgatctgcccgcctcggcctcccaaagtgctgggattacaggcgagagccaccacgtccggcccgaattgcttttttgcatgaaaggcttacactgctgaggtctatttactcctgaatggtagatcaggagcataaggagtgttgactgcaacagtcaattcttgctaacaaaagggaacaaaaacttggatctgtctctttgtttttagaatgttggggggcagcagatttcttcctgagagctgttggttaggagaactctaataatagtctttgttcttagaacatatgctaggagaagacagtgagatagagaactcccaaaaaggaaagttggccgtagataatacacccagatcacagttaatacattttgtaggtttgtggttggttagtgctgtgcaggtgttagggaggtggatgcccaatgggtcggtcaaatattgtaacctaggtcatcagtaagacgtatttatcttgcttacacttctgacccagtgaaacataaccaggcatttaacttttggagacctaagtattcctcagctgaaaatctaatggctgcagggagcaaaggttccttctggaaacatgatcctggagcctcctctttgtggcatgaagtattgttaacatataataacaaatccttgtaaagcctcattgatgttactgcctcctggtcatttagaagcaaacactggcctctgtatgctaaggtagtattaactaagacatcttgatttttttttaataaaagtttatatcatttgctttgaaggacagtagacgttttctcaatcacctaaacaacagacttggtgaccaaagaaggtaagttgtgtctctgagcattattgactagttgtattctgaaaatgtctaatattttaaaagaacagtttagggtctgtttcattttaggagagaatattgggtacatcatttacagagtatactgagttgtccattgagtggaaa

SEQ ID NO: 35390 - DNA, 2300 bp, Homo sapien
cagaaccgttcaagttctctggcacaacttctagggatgaagtggaaattccttctggaaaacaaaaacaaaacatggaataaaactaacaaagtgttcaaagtagacttgctcaattcatcagttgcccagaggatgagttatttggaagcacagatgcgaaccatggaagccccgctgactgcctggacatgacctcgctctctggaaagtgctcatttcttctatatcttcccagcactttaaatcggggcaactgacattttgtctaagaagcaggccaaggtgttgtaataggttctaaggaggacatatagctagggtatttctctggtgtaactgcttctgggtgccagtcttcagagggcttgcaaggggtctggtgctgttctgagggatttgcaagcatcaattaagtctcacaaaaattgtgtgaagtaggtactgtcaggattcccatttaacagagcttgcataagtcttgcatgctcataccagcagctcctggattcaaatccaggctgtctggaatcaatgctttcaaatctgttgcattggagccctttgtttcaaaatgcatggtaccatttgtccagaaggccagcctcaaacatgcagacattccagatcattcttcttaatcggtatagatatttctcacacaaaaatttggttgataactatcaaccatatcagagacctataactttaggaacccttgggccctgaaaattcccagaaggaagagttacgaggaagaaataaaaatgctaggggataatggcacttgcttttatctataatttgtgcaacaacttatttgtctccaaaagcacaaaagcttagtttttaggattttgtagctactatgatcttaaaactatacctcccttgtgattcatgttgttacatcctgtgctgacccatttatcccactcctacttgaaccattggctgggtgcatgatgttacctggcaactctctttcttctgttattgagaaaggggatcccggagcaacctcttcttccaatcttgattgttgtgacttagcaaaactaccttctggtatgtctacaggcaaacagagcacatttccttttgacccgaaattatcttgttcattttttggcagttaatgtcttactgtgaagagtaccatctgaaacttgtcccctgcctgttgctaatgagttatcattcggtgcatcgactaggcacaaaccaagtatcgaagcacgatgtctactgatacctgaacatgggaacaggcatccctttgatgagctcagttacatttaggaacactctgcttagcacagacccctcactaggcagagcgttcctaagttaagcagtaatggtagacatcaaaagcaacgcttccagggctctgagctaaatagcaagacagcaaggtttccaggcagatgggcctttggaagtgcttcagctcacaccccggagcgcgccatctgctggtgacacgggcacatcggcgctatgctgaaggctacgtcataaacgaggccatcttgcctcctcacagctcaagtgattttgagagactcgaacatagattcccatttcaattcagcataacactaaatattttctattctgatgttcacttttatcccagacatgtctggtcctcatcatcttatcaatggcaccaccatggttcacagagccctggctttatgctcaactcctccttttctttgctgcccgcttctcctccatcctcaaggttctgcctatggaatgaatccctccctctctgagttcctgcccaaagccatctccctagaggaaatcgtcaatccttcaccttcaattgtcacttccaaatctctctcttgcctgagctctctcaagcggccaacttgtgtctccaagtatttgacatctttacttcaaaccccactcgagtctatccctcccacttaaaaccactctctcccccgcactgtacctttagttgtgacatcatctgacttctcttttgtcacatgcctgtctagttgctgttggtttttctctctgaaagttctggaattcaatttcactaattcattccatgaatatgtggacgttactatgtgcgagaggcagggcgatgcggctggcagatagtgagaggtaaagacgaagtgacccttcctccactctgctcctgatatcctggtctccttgtagttccttggacatcccaggcacggtcttacctcaaggcctttgcacttgagactcctctgacctctgaccagagcacatccccatagatctgcaccaag

SEQ ID NO: 35391 - DNA, 2300 bp, Homo sapien
gccagttggtcctaaaaatgctttgtccactctgatgccaaggtgcaaagagcatgaagcgacagacaaggcataagagatagccgcctagactcgtcattgaaggctgccaaaatcgggtccctcctgtcgggagtatctccctcctcccaaacttcacttgagactctcatcattacaaatgtcaactgcataatctttgcagttactccccacctgtgcattaacataaagcagcttgctttattgggttaattcaaaagagttatcaagtacctactgtgcgccaggcactgctgtaggtactagaaatctagcaagcaatgaacgaaatgacaaaaatctgtgtcttcctgaaacctatattctggtagaggagacgttcaagaaacaagctaaagaaacaaaatatgcagtacgctaactaatacatgctcaagagaagacaaatgaagcaggcaaggggaatatacactgtggtgggcggggtaggaaaggttggaattttaagattaagtggtcacacataatcaggcagatggtacgtgcctaaaagggtagccagagcaaaatcagatggagtggggaagagaaaggaagtgcgcttattttaacaagtcctgaagtggagagaaaaccctacgggaagggggtgaggcaaacactgaatatggaccactgaagacaaacgcggatttcacattttgcctaaagaccagtcctttgaggatggcacaacagatgttctccctttgtaaccaaagaaccaggctctgctactaaaactgtcaggcagttcatcggacacgggtgaacacacacacacacacacacacacacacagcttactgtcaggcagttcatcggacacgggtgaacacacacacacacacacacagcttactgccgaggagaaagaagcgttactaatccagagtggaggactggcctgggaaatcgggcagagagaggagttgtcggaaagaacacaccagaagcccctccgagcccagacactgatagaaacccagccgcttcccaagccaatctgcaaacccaggaggcacccacgagtgcacagacacacccccggggtgcaggcgcggtgaagggaggagaggggcaagagcttgaccgttagggcccgaaccccagaactcccgaggcagggtgtgtgccgcgcgcgggaaacgccgttctccgctccaggcgtcggcgggcggtggcgagagcaggttcgggggtccggagggtcggagggtgggctgcgcgcgggaatggccgccgcgaaggaggggcggcttcctcgggcatcccgggcgcccggccccgtgcatgcaacaggggactgggcgcgagcgggcgcctcgaggtgccggggcgggaccggggagaggggaccgagacaaagttcccgagacccgcgggcctcgggccgacccgcgcgcccccggcccaaacgctcagctcccgctccccaggcccgcgcggacccggcccctccgagggtagcgggttccagcggcgaacccgcagcgcccgcgccggcgcccgctcggccctttcccgcccggtgcgtgggtccaggagagaaagaaagcgcggcggtgtcggtggcggcgcgcggccccactcaccatgatccgcagcggctgtggcgcggcgacccgggcgggcggcgatgcgctgtccagggtagccgggtccctctgcccggcgctatctcggcgcccgcgccggttacccccacccacacccacgcccggcgcgcgcacacccgcccgcgcctccccgccccctcgggctcgcgccgccgccgcgcggcgctccgagcctcggggccgtttcgtccccgccccctctcccacaggggcctcgccggccgccgcgccaggagggcgcgcgggggaggggcgcagggcaagtgaggcggcgccccccgcccctgcggcctcgcgcgccccctcctgggcgaccgacctcgccctcgcgtccgcggcgtcccctgccggccgggcggcgatttgcaggtccagccggcgccggtttcgcgcggcggctcaacgtccacggagccccaggaatacccacccgctgcccagatcggcagccgctgctgcggggagaagcagtatcgtgcagggcgggcacgctggtcttgcttacagttgggcttcggtgggtttgaagcacacattagggggaaatggctctgttcctgcaggtttgcgcagtctgggtttcttaggtttagggggttgggtgggtttctctgggggtgcggtgggaagcggatcagt

SEQ ID NO: 35392 - DNA, 2300 bp, Homo sapien
tgctacttatacacaataatgtcaaaaaatcactatctagattaagaattcacattatactgcatcagattagtgatacagtgaaattcaggtccagagtttttatcattcaatatccaaaagacgtggaagctacttttatagctttcaaatataacacgtatcaaatagaagaaagaacacaggtaaaacagaaagaataaaatcattccaaggaaaaacaatatttggggactattcgtgtgaatttccttcaagtctctcaatatcataatatagatcatcacaggttctaaaaactcctaacagcagggactgtgtttttcttcatcactgtaaccctagctgttaccaaaacgcctagcacatagtaggcactgaaatctttgctgagtgaacaaagtaagtgaagctgaaatcaaattgtatctttgatttgggccacacttttttataaaaatatgccagcattaaatagaatatcactttctgattctcaaatgcatcaaattgataacaaatcaataactagtacttttgtaccagatatttttctagagttttacccatattaatttaaccctaacagctacatgtaatgttaagtgctattttatcccaaattcgtaaatcaggaaactggagcatagacagtttaggtaaccaacccaataccacacacccagtatgtggcagagctgactcctgagatttttatcagactaggttaacctgtttatggtcataaaatcatccgccttttataaacaaatatatgcctaatatttaccacttcagctacagaaattctatattaggaagaaaaactctctattaggaaactatatattaggtgattgtatgacagttaagatttagccccggtacctacagttactcactctgctactgcacaaaactctgcaagggctcccacaccgccccaggtgtgggatgctaagtgtatggtgcaggtacctccgtgcacagccacacgggctgctctcaaccccaataaacatgtttaccacatgagcctcacatgtggtaaacattttttttttttttttttttttttgagacagggtctcattctgtcgcccaggctggagtgcagtggcgtgatctcggctcactgcagcctccacctccagggctcaagccatccttcacctcagcctcccgagtggctgggatcacaggcgcaggccaccacacccagctaatttttgtattttttatttaagaggcggggtttcgccatgttgcccaggctggtcccgaactcctgacctcaagtgattcgcctgcctcagcctcccaaagtgctgggattacaggagggaaccaccacgcccgccaacttcccatgcttgagggagaaatggaagaaagttcatgtaatactcaggcaagtccaattttttcgacgtctttcacttgggccacacacacaactaaagtaactagaagcgcaggctctaggaggccaccgttctgttcacagtgaagagggtgcgctcaccgttggtcgtgtccgctggaagccccgcgtcaggccgggagcgggacagagactcttgctcagggccgttatccgaactgatccgcttcccaccgcacccccagagaaacccacccaaccccctaaacctaagaaacccagactgcgcaaacctgcaggaacagagccatttccccctaatgtgtgcttcaaacccaccgaagcccaactgtaagcaagaccagcgtgcccgccctgcacgatactgcttctccccgcagcagcggctgccgatctgggcagcgggtgggtattcctggggctccgtggacgttgagccgccgcgcgaaaccggcgccggctggacctgcaaatcgccgcccggccggcaggggacgccgcggacgcgagggcgaggtcggtcgcccaggagggggcgcgcgaggccgcaggggcggggggcgccgcctcacttgccctgcgcccctcccccgcgcgccctcctggcgcggcggccggcgaggcccctgtgggagagggggcggggacgaaacggccccgaggctcggagcgccgcgcggcggcggcgcgagcccgagggggcggggaggcgcgggcgggtgtgcgcgcgccgggcgtgggtgtgggtgggggtaaccggcgcgggcgccgagatagcgccgggcagagggacccggctaccctggacagcgcatcgccgcccgcccgggtcgccgcgccacagccgctgcggatcatggtgagtggggccgcgcgccgccaccgacaccgccgc

SEQ ID NO: 35393 - DNA, 2300 bp, Homo sapien
gcatccggccagctgtggcagacaggatgagactgtctcaaaaacaaaaataaaaaacaaccatgcttaggccctactcccagagattctgttcatttggtatggggatgaggtctagccattcgtaatttataaatctccctacgtgatttgaaatgtgcatccagagttgagaaacattgaaaaggcttagagcaatggccaggtttatttccttcttgtgggttttgcactagctgttccctttacctggtatgttcttctctaggtctttccatgaatccttgttgtcattcaggactcagattaaatgttacttcctcaggaagaccttccctgatcccccaacaagctaaaataacacacctacatttatcacactgtcttgctattaatagcagttcctgagatttctctatttatgcttattgtctgtttttttccaactgtcatataagcatcttgagtaaaggcactttgtcttattcactgctgtatccccagcacttagaacagtgcctggcccctataggtattccaatatatgtgaatcaaagagaaaaaggtcctttaaaataaattattttagttcttccgatggctgttttcttttcttttctttttttttttttttttgataagagtctctctgttgcccaagctggagtgcagtggtgtgatctcggcacactgcaaccttggcctcctgggttcaagcgattctcctgcctcagcctcctgagtagctggaattacaggcgcccaccactacccccggctaatttttgtatttttagtagagacagggtttcaccatgttggccaggctggtctcgaactcctgacttcaggtgatctgctcgccttagcctcccaaagtgctgggattacaggcgtgagccacctcgcctagccctgacgcgtattttcaactggcttttaataaaatgtgttttaattatgcaacataattgaaccacccatgaaaaaagcacacactgattttttgtaaatatatcttaattgcactgggttcattctcttcacaggaatctatattaaatctgttgcaaagcaagtaattatcctttaatgtatttttatacatggtatttgttcctaatgttgcttcttagggaatacagttcacatagtagggcagctgggtatggcaggatacatttattaaatcaagggattgctgcttagaacttttgtgtttgtttttggagacagaagacaggaaactgtaatttttagaagagtaaaaaggtatctcagggagcaaaagaatcacaggaaaactcgaaggctctgattccttctaaaagagggacacatttaccctctattcttctgggggcacctctttaacaaatgaatgtaatctggcggaagtggggagtttcaattttgggtggagatacagtagttgagattactacagtgtcttgtttcgtagaggtgtaagccagtgcggcaaaatctccaagcttggtctcaaggaggcagctgggtctaacttacaactcaggcaggtgatttgagggcagtgcagctgtccttaagtcacccgcgggccatttctgaaatgctttacttacgaaaagatagaacataacatctgttgcagggggaaaatgagatttcgtgtcctgacccgcgtctgcggcagggacctgagttcttcctccaagtcccaaatagccaaccttcgcccccggcaacagggctaggtgcacgagcaaccagtttttcaggcagccgcctcctctttcctctctcgccgtacttcatcgattacggctagaaacaaaacgactttgtatacggagtaatggttgaaatctcactggcgcctcagcaggacgggcagccagatccgcggctttggagaaggccagcccacggtcgtccgactgaggcgacttgagcaagaccaaaggcagagccgcccgagaatgaaagcagcgaagcccgagtggcggtgcattctgggagttgtagtccctgcgagacaacgccgtcccgactccaccaggctctgcactccatctcccagccgaccccgcgccgcggaggaggcgagcttggtgatgagctgccccagcggtagggggcctggggcggagaagccgctacagccgcggccgggcgacgctgacatctggcatccctggggtctcagagacacgggtggacagcgacgagggccttgtggccgccgtgtgtacccgtgcttaccctctgtcctccctacaggcgcgcggcgtccgccatggaagcgcatccgaccgctg

SEQ ID NO: 35394 - DNA, 2300 bp, Homo sapien
gatgggtggaccacctgagatcaggagttcgaaaccagcctggccaacatggtgaaaccctgcctctactaaaaatacaaaaattagctaggtatggtggcacatgcctgtaattcccagctactggggagactgaaacagggcaaccttttgaacccaggaggcgggggctgcagtgagccaagattgtgccactgtactccagcctgggcaacaaagcaagactccatctcaaaaaaataaaaataaaaaggcaagctacagaatagaagaaaatacttgcaaaacatatctgataaaaacaaacaaaaaaaacttgtatccagaataaagaattgtttacaacttgataaaagtaacacaattttttaaatgagtagaaaaaacttgtaaagatgatttacacagaaggtagaaagaatggcaaataacacataaaagatgctgaaaataattagtcattaatgaaacaaaaatcaaaagcataatacccatcctctagaatggctaaattaaaaacagacaataccatcaaatgttggtgatggatgcggagtaacaaattctcactcatgactgctggcaatgcaaatgtttggcagtttctcaagagaaatgaagttactcaagagaaatgaaaacatatgtctacaccaagatttgcaactgaatgttaataatactactaactactaatactactactacaggctcacgcctgtaatcccaacactttgggaggcccaggcgggtggattacttgaggtcaggagttcgaaaccagcctggccaacatggtgaaaccccgtctctactaaaaatacaaaaaaatatataataaaataaaataaattagccaggcatggtggcaggtgcctataatcccagctacttgggaggctgaggcaggagaattgcttgaacccaggaggcaaaggttgcagtgagccaagatcataccactgcactccagcttgggcgacagagcaagaccccatctcaaaaaaataaataaataaaacaataataatactaacagccaaaagctggaaaccactctcatgtccatcaatgagtaaatggataaacaaattgtggtatatctatacaatggaatactctttcagcaatacaaaagaatgtattactgatatacacaacacaaatagatttcaaaagcattatgctagcagaaagaagtcaaacacaaaaagcatgttgtgtgatttgatttacattagaaaggtaaatttatgtttatggaaagcagtttgggccaggtgtggtggttcatgcctgtaatcccagcactttgggaggccaaggacagcagatcacttgaggtcaggagttcaagatcagcctggccaccatggtgaaatcttgtctctactaaaaatacaaaaattagctgggcatggtggtgcacacctgttaattccagctattcaggagtctgaggcacaagaatcacttgaacccgggaggtggaggttgcagtgagccaagattgcatcactgcactccagcctgggagacagagcgaggctgtctccaaaaaaaaaaaagcaagcagttctatcaggaggccattaggttaagctggttctgttagagtaggtagtcaggcagacatgagcagggcaggagagggcccccagctcaggaatgtcaggcgaccatcaggtgatgatcaggcggttgttacactgtttctctaaaataataataatgggttgcagccagtaccagggaaagacagtctcccaaaagacaggaaacaccggaagctggtgatcagcaacttcctgataagatctccgaagctgggcaagtgggctcaagcatgcgcactaagaagcaaaatgacagtttaaccagtatgtgaccttcctctaggaacacctgactgataagggaaaaatgtctcaagaaagcatgcgcacaacttcagtaaacaaatgcacatgtggctcctcccaagtgctgacaggccactgcacagcagacagcccaccccaaggaaaaaaatccaaggaggagaaatggaaaccccggaaccatgccgatgtataaaaccccaagtcaagggctgaacagggcacttggatctctcaaatggtgcagtgactcggataccttccctagtggtaagacacctctacgccttgccttcttcggctggaggcgttcaaccctcgtacgtggtttcgttctcctctttcactctcctgcttactaacctacccctggaacgattcctctcaaccacagtggctctgctccccctggctgctctc

SEQ ID NO: 35395 - DNA, 2300 bp, Homo sapien
ctacttatacacttattccttggcttttgggcttattttcttgcactggtgcagatctggtaaacattaaaggcttgaaaaaccatattttgttagccctaaaatgtacatttttcttcccattttaacttatctgaaattgggatgcatctcattactgtcaaccaggtgatagtcatgtaacgctcctaccgtgtgcatgtgtgaatttacagcttgtcatcgtgtcatccctttaaccaacatgtgttttgttggtatcaaatgtgtcaggtttaattgacattttaaaatgtcttcaaaaagatcacactatgattcagcattgaaacgaaaagttattgtgtatgcagaaaagcatggaaacagagcagcagggcgtacatttgatattagtgaagcaaatattcgtcgctggagaaatgatcgcaattccatattttcctgcaaagcaacaacaaaatgttttacgggacctaagaaaggtaggtacccacaagtagatgaagctgtactacgtttcgtcagtgagacacgtgcaaaaggattgcctatcacacgccaagcaatgcaattgaaggcaggagaagttgccaaaaccctaggaattgatgaaacaaaattcaaagccacaagaggctggtgtgaccgattcatgcgtcgagcaggactatcattaaggcatcaaacatcgttttgtcccaagctccccactgccattaaacagaagacagtgttggagcactctttcaagaagtgctgcataaccagtactcttgacaacaccgggagagacgttctgtggaaaaatgcagacatcaatgactgtggtttgaaaagtgattcagaagagttggattcagaatatgaagttataattataacttaaccaatttatttcacacattttctttacatatgcacaagattgatgtgataaaaatctgtttaactcaaagcgctgtttcaataaatataaacattttctgtgatatgaaagcattgtgtcatagtttaatgggcagtgttttttcttagtgatacatatggtgcatcttaacaattggtagtgtcttaggttaaattaaaaatggtagcttgtaaatttatttttctttttaagatagcagttatttattggggaatttgattctgactcttacaatgttaaacttgtaatcctgtgtgaaacacatgtttttgggggggagggggtaaccaagatttcagggtagtaacttaggaatctaagaactatcttctactttaggaagagtgggattagttactccctttgtataggaggactttatgctcaaggaatgtgttgtggagaaaaacacttcttcacaaacaattcagtgacaagacctcaaaggtaatgcgtattgaggaaaacagtagtgggtgaaaattcccgcttagctgtaaaatgactctcttgccaggtttccgtgtttgtctcaactgaactctgggctgagtgtttaccagggagaagagatgtgaattaaacaaccttcctgtttagtgttacctgctttgtacaagaatgaagtgcaaagccaacttactttattaatccaagttctttttatgtttttcttaacctttattaaggactagtcatcacaaaatatctatttaacctctattttatgatggtgtgttattatgtttgatacctcatacttcttgcttagagttttgtttaacagttcactggctctgtcccaatgtttgtgatgaacacctttttgctatattgtagctcttggagatactaaaagagaattcacagaacataactttagttttatgtgtttgctaggggaagatttcctagcagctgagagcaaggcacagtctctgtcttcatttctttattagatacaattttctatttttatgtgactctagggcataacaaaacagtgacagtttcaagcgttaattttaatgcttcctactagctaaatatcatcttaaaatgattatcagaaaaaaaaataatgcccccaaaaacttttgggggcattatttggtactgggaggatatttaaattagatttttcatagtctattgttttgaactatggattctgttttatggtggatacctaaggtttatataatagttgctggaaaacttaaagtagctggtgagcttcctgttatgtcactattaaagaatgatggctgatgtaactctgcccctgaaatctacaagggtcatgcccaaattaatacaggttaacctttgtagaggtatatatgttggcattatttattgacattta

SEQ ID NO: 35396 - DNA, 2300 bp, Homo sapien
ccagaattgtacatttctacataaagataatcctaatgtatatgaattgtttgcctcgatacatgggttttggggctatgcagagaactgtacttgccatctaaaatgtcacccctgaagtttcaagatacattttaatattacacaaaactggaggtcattcagctcttgaagggcaggactttatgagctcactttgaaaatgagaagttatcttttctcagacaagtcacccgagccaaagcaatgagcaaactctaacacccctccttaaaaattaacaaaggtcctttttgtttggccagtgccaaagccttcaaactcagttgcacttcgttctaaattttatagataatgcatatttctaagagtgcattagtaacttcttataaacccacaccaaagcaaacagaggttaaccctcctttttcaatgatttcatgctaaatgactgtgcttatcagagtgaagaggtaagagactgctttaatatgatgtctggctaagtaggagaacactgtgagagagagaaaacagaataaatttatttatttaatttcatgataaacaatattcgttgaacacatctttttttttatttttgagatggagtttcactcttgttgtccaggctggaatgcaatggcgcaatcttggctcactgcaacctccgcctcccaggttcaagcgattctcctgtctccgcctcccaagtagctgggattacaggtgcccaccaccttgcccggctaatttttgtatttttagtagagacggggtttcatcatattggtcaggctggtctcaaactcctgatctcaggtgatctgcccacctcggcctcccaaagtgctgggattacagacatgagccatcacgcccggcctggttgtacaaatctttaaaaaaagacttgcttgactacattgtgcaaaatgcagaactagaaactgtcagcaatcaaaagcacttcattctaactagctgtgccttaaacgttgtcaagataacttctagagagatgtgctgctcctgtttaaagtgtgtcagtgccactcacataggacaatgtgtgttcctcaaaagtcggatgtaggtcgggcgcagtggcgcatgcctgtaattccagcactttggaaggccgaagtgggtagatcacctgaggtcaggagtttgcaaccagtctgactgataccatgaaaccccgtctccactaaatacaaaaaaattagccaggcatggtggtgcatgcctgttaatccgagttacttcggaggctgagacaggagaatcgcttgtacctgggaggcagaggttgcagtgagctgagatcacgccattgcactccagcctgggcaacaagagcaaaactctgtctcaaaaaaaaaaaaaagtaggatgtaactccagtaacatttgaagagtgccaaggagtcctctctttaaagggatcctacagtatatcagttttttgaagcaaagaagcctttagcaatgccacaatcgcctctgatttatttgattaatttttgtaatacttggttttcttaaagcatggcacacttaaaccagttatttattggaatagtttttgttttcaaagtcactaccaattgaatgtgcagccttcactggtgtcattaccccatgcttccgtctcattttgcaagatagtgttagaactaaagtgggggtgaccccaaggcgccttgagccttggctccatgttagggatcccatagaggtactaccacctgatcctctccacagcctcgtgaggtgcacctcacagcatttgctgttcagaggagggaactgaggtctgagaaggaaattcacttgctgaagttaacttgctgcctccagtgagaggcaggattgatatttgagcccacgtctgtctgactccaatgctaatgatttttacatcccggctgaaggatgatattgccaagcccttaaagaagaaggcatatttggacacctcattagcaatttgggcgctaaatcataccctgttggccaggaagaattaaagttgctgcccagggctcccacctcaggtccagggagtagcctcaatactgagggaatctgaattaaggagcttggaagttccccccacctagctgtagtgggcagtttcagagtgggctgatccaggagtcctgaccaggtcagtagggtgatgtctagactccagtaccactgagaatgttgctatgttggctttctctgccacacagaaaagtcttttctttccttttcttttctttctttctttcttttttttttttttt

SEQ ID NO: 35397 - DNA, 2300 bp, Homo sapien
actccagcctgggcaacaagaatgaaactttgtctcaaaaaaaaaaaaaaaaaaaattaaaaatgttttgaggttccagcacaggtttacctgattccaacacccttgtgctttcctttaggcagctaactatatactgacccaagccttcttgaaatgaacttcgggtagattacatgtgtcttacttaccttacaggacagaaacaggaaagcaggagggccactagctagagaatgaaattacaaaaaaaccccagcacaaactttaggaaactgtttgaaaacattaaaataggatgggacagcactcacttactcaatgatattcatcaaacaaaacagaaaaaggattcagcttgaccacttaggaagccaaaggaatgttatctagatctcttggaggccgcaagactcatcttacagatgggaagggctttgaatcattgtcctcctttatccaggtagacaccaaaaacaatttcctgcaaactaacgactctccggtcagtctgcaggattcttaaggagatcgttacaatgcaatatgctgcgtgcttaatttgtgttcagaaaggccttgcacaatcactcaggcttatttttgctctaaggacaaatgaggagaagcaaggcctaatacaggctggaacaggtatgtcaacctcattaggatggcctggggggtcatgtccctggaatcagtgccacactgaactgcaaactaacctgccaaccctgtatctggaaaccacttttgtaggacagctgttctctcattccttttgcttagatcataaaagtagagttttcatccattgggaatttgtgtgttagacgcgaagggaatcagattctgatccaacttggtcaggaaaaaaaaaaataagggctgatttttccatccaagtcatgtagtctggttggagtgcatcccactcagggacagctattgtctggattcaccgagtctcagtcttgcccgggaaaaaggaatttttcgcctcactgctctgtccgtgagaagagttgcagaaggtgaccatttctgttttctgggtgattctctttctctatagaaatcctaaaatggaacctttatagaaattatgttctgtgcttcgctggagagagactggtctttttaaccaggctcatcaaacagtgggcattttcgttctcctggataataagtgttggtgggttaatgggtcatcctcaggacagaggtcagaaggaaaaacactgcagtgttcaaagctggagctagaaatgccagccgtcaaagaacacagaactcagtggacggtgatgatgtatagggcgtgcactggccaaccccatccgagaggtcacatctaacctttatcctcagcaaagccactgaaggtcgctcaatatgtgtgacccgcaactctgaggccctggtgagaagctgtccaggaaaacgctggtgcgtgtgctagagggttccttttcactaagggagaattgtcttccagctccttgcagactgacatcgcaaagtactttgaacgttgaaaagaacaaaaaaagcaaacagtcacacacacacaaaaagtaggcgggaggagggggaaagaaaaagggacagagagagagagaggtatcagcaggggtggttagtaaaaaggggcccggagacagaaaaccttttgttcccggagttcgtttcatgtagagattgtgaggtgaatggctttgaaacgaaatgggtttatgaaggagttgctaggtcacaggaagcgcgactgtcagactgcttttgtgaattcagtttctttaaaatttgggttaatcttaaaaagaatgtatctccttttcctgttctttctctttctgtcttcttttttggcgggggcgggaggacagagtaaggttcaggacggttccccactttctgttttattttccaccgtctgataaagcaaaaagaagcgatcacattacaagttctttgtcagtttttcagaattaggggtgggcagggcctgagcattaccttgtcccactagccaatggcggggcggcatgcaaatgaggtccgcgatcagcctgcctcagtcacaacagtgagctcagagacttgagggaggcgctgcgactgacaagcggctctgcccgggaccttctcgctttcatctagcgctgcactcaatggaggggcgggcaccgcagtgcttaatgctgtcttaactagtgtaggaaaacggctcaacccaccgctgccgaaatgaagtataaggtaagagagtgccttttacaggttaccttgcaagc

SEQ ID NO: 35398 - DNA, 2300 bp, Homo sapien
gtttgccaaaatgttgacatgcagcataacctgctactaatcaaaaagaaaataaaccaaagaagaagaagaaaatctaacactgtaagtaggaaaacagacatagaaaaccggcatctttgcaaatgggaaaaatatttaacttgtttttctaaaataagtctgatctgtttttggacaaagtctcagttcctgagtttgccttgaaggacatgctcgctcgctctctgttctgaaaaactcagcagtgggaggtccaggcagctggaagtgggaaatgaagccataggatgaagatgaaaaaacagagttcaggataataaggttgtcagtctcaagtattttatgtaaaaggagcccaagcttagcatttttaatatctctagagtgtaactgacttatgcagacaatttgatggcattaatattcaagtcatactacaaaattattaattatgttttctaaagtttgtacatttaaagttatactaattaaatgcctgatgaagaaaataattccttacctgatacggtataaggggaaaagcataaaaggacgttttgataaaacatgtactatccagacttctctacctccatcaatttattataaacactctgtattataaaataaaaacttcagagtagaataattctagctcaaatctggaatgatgtggatacatagcatgtactcaagaatggttttgtaaggagaaagaaagagaggaaagaagaataaaagcataccttgctgaatattgttaattgcacttaacaggtacaatatatgtatacaatatatacaatatatgatgattaatatcgatgttcttgtcattgatttcttcataagacccagtgtacatggcactgagctgagtgtttattgctttaagtgtggcacctttgtatgagcagaatattctttagcaagatttgaaccagctcaaacatttaaaaataaatgaatttcagagaagtcttacagaaaattaaaacaaaacaaaacaaaacaaacaacaacaacaacaacaaaagagatgccacaagagtgcaacatacatgagctgagtctgatgggtgggaccaagggcagccctttctttgtcttcatgatggagcaggaaggagttgaagcagaaacatcaagcaccacaggatcatttggggaacatccattatcaaaccacctctctctctttcctctcaaccctctatgtccccaagtcgtttgctaggcatgagcaaggagtggaaaatgaggaagggtaggaaaatagcaaagatctcagctgataataatacaaagttgccacgaatgatcacggcaaacacttatattgcgcttactctatttgtgccaggcattcttggagtgctttacatgtactaattcacttaattctcacaacaatcctgtgactgttcccattttacagatgaggaggccgtggcacagaaaggccagaagtgtttaaagagcagagccataattcaaacccaggaggcttgtctcagagccacttgtctgctacttgaaagcacagaatgaagaagacaaagggtttgggctttcgaattcccttctacatacacagatctaggcttccataccacattgtaagtaggaaactctctgagcacctagcctctagcatggtgtctattccagtgtacaagctcaataagtacttgtcataggaaagaatgtttcatgtcaattaatagtggaaccctttgcaacatactgagtccataaaaccataaaatcccaattcagttggcttggaaatagcctaacttttgcttcagtgcggcctaggagggagcttatgccacttagaagaatacattttgacaaatttccttgcaatacgaatttaaagatcacctacctttctaaaaatagcaaagaggccagatgagaacaagctttcttacctgtccctaaactacaaagtgtcctcagcgaatcagaaagtatgacagagaaaaaaaagaagaagcacagagaggaaatgaaccaagacaacatcacctcacagcaaccggaaggaaaaacacacacatacatatgccactcacatccgacgtgtgtggttgctcagtagggaaatgcttacagctgcctctagaagcaagtccgctcgctgcatggagagggaaacatgagcatgcagcaggactagctgtcacctcccgcccgcctgcccagagagggccagagcgtcggggaggcaagatgatccaccagcggttccatcctacacttgggtgagttctcagccacttgctgtg

SEQ ID NO: 35399 - DNA, 2300 bp, Homo sapien
tccttcatgaatattaccccccactgttggcttggaagcatttctatcattttaaggtatttcaattaccatctctaatcttcaactataatatttttcctaacatctaaatttattgagaaaattcctgaatgttacaaaacccctgggtatatttaactacctattaaataactacctcctagagattttaaagatttcccaaaattgctaaactagcttttaaaattgtcaacattaaattaataaaccgacaatttgttaatattgtgtttaccactctttcttgtatcctatgtgccttccctctgggtcgacttttctttttgcttaaatatatcctttaatatttgtgctcatgagcatcaattaatggtaaactctctaggctctttaagagtctaaaggtctaaagttgcctttgtcttttttttttttttttttttttgagatggagtctcactctgttgcccaggctggagtgcactgctgtggtctcggttcactgcaacctctgcctcccaagttcaagcgatgctcctgcctcagcctcctgcgtagatgggactacaggcacgtgccaccacccccagctcattttttgtatttttagtagacacaggtttcctccgtattagccagtacggtctcaatctcccaaccttatgatccaccccacctcagcatcccaaactgatgggattacaggtgtgagccaccccacctggcctatttcttctcattttttaaatcatagttggggaataaaactttagtctgagttaattttactgaacattttgagcatgattctttcctgaaatcctctggtgactgaaatcagtgggttcttggtctccctaacttaaagggtaaagccgcaaacccttgcagtgagtgttacagttcttaaaggttgtgggtctggagtttgttccttcagctgttcagacaggttcagggttttttccttctggtgggttcgtggtcttgctggcttcaagagttaaactgcataccttcctgatgagtgttatagctcttaaggtgatgtgtctggagttgttcattaccctttcacggtcttgctggcttcaagagtgaaactacagacctttgcagtgactgttacagctcacaagagcagtgcaatgctgacccaaagaatcaacaacatcaagatttattttaaagaaccaaaaaacaaagcttacacagagtacaagcacacccaaccaaattgccactgccgggctggagcagcctgcttttattcccttctttggccccacccacatcctgctgattggcccattttacagagagctgattggtctgttttgacagggtgctgattggtgcatttacaatccctgagctagacacagagtgctgattggtgcgtttacaatcctttagctaaacacaaaagttctccaagtccctactagattagctagacacagagcattgattggtgcatttacgaacattgagctagacacagagtgctgattggtgcatttacaatccgttaggtagacacaaaagttctccaagtctccaccagattagctagacacagagtgctgattggtgcatatacaatcctccagctagacatgaaagtttttcaagtcaggacttgactcaagagcccaactggctttgcctaggctccacctagtggatcccttggccgggtcacgggcgcagctgcctaccactgccgcaccgcacctgcgcttctcagcccttgggcggtcagtgggacccggcgccacggagcagggggcggtgcccgttgcggaggctcgggccgcgcgggagcccaccatggggggggctcgggaatggcgggctgcaggccccgagccctgcccctctgggaggcggctgaaacccggtgagaattcgagcgtggcgcgggtgggccagcagtgtttggggacccggagcactctccacagctgctggtccaggtgctaagtccctcactgcccagcacctgcagcgccgaccggccgctcttgagtgcggggcctgcagagcccacgcccacccggaactcgcgctggcccgtgagcgccgtgccgcagccccggttcccgcccgcgcctctccctccacacttcgccgcaagcagagggagccggctccggcctcagctggcccagagaggggctccctcagtgcagtggcgagctgaagggctcctcaagggcggctggagtggacgctgaggccgaggagacgccaagagcaaacgagggctgctagtacattgtcacctctcactg

SEQ ID NO: 35400 - DNA, 2300 bp, Homo sapien
attaaaggcagtattttgttctataatgcatccttcctggcagtgaaactattttattgttccaacgtaaaagccttggttagaatgttttgctttggatcctgtttttaagtgagcactacctttgtgttactcattcttatgattctcatttactaagagtgaatatgaagcacaatttatggccaccagagctctgatctatagtgttcacgagcataataaccacagataatttgtgcagactggattggtggtctccgttgcatgtattggtatctgtgacaggcagaatctaggtcacaagctaccagactcacagcacaatgcctggcattgtgtcaattacatgaatccatggaaacgaagaggagaagcttgaatttcacccatagcatcatggggaaaatgatgagttttttgacagaggccgaaatagtgtctggccattttctccttcctttgggacatcaggatgatccagagatacttcccaacaaactaagctcagttagccatgcttcattcaaactcaaaggcttggccttatctctaaataaaatacatggaagacaaccactcaggggggtggaaatcagagatttaggacaccctgggatacaacaacaacaacagtatagcgggggacaggaaggccccaagacaatgaggctttaagtttccctaaaactaaaagagctgtgcttttgaaagcttgtcatctgaaacgaacagaggattgacagagaaaattagtttgacattctgaggacacagtgttgaaaaaaaaaaaaaaaaactaagaaaaatttgctgcaaaaaaacaacagaaaccaaatctaaaataaaatgtaattgtaaatacttaaacgcacatcccctcataaatttcccagcggccctggatttctctcatgaaagcaggtgctggaagagaatcaacagatcagagatacaaacaccaaaggaaagaataagaccttcttggttaagtttaggtccattcgtccaacttggcttcacatagttaaaattcatactgaagtcactttggaatgtttgcaaccagtcatttgccccagctaggaacaaagctaggggtgagcataagaatgcaaaacaagcagaagtcattaagaagaaggtagcccaagagtctcaggcttttatatgaagctgtgggatcagggagtcattttcccatccattcttttctcatgattaactaagataatgtccctgtgtctttgctctctctatcatcctctctcctttctggaaaaccgcatcctttgtcaggggtatggtaagtgggaaggcctctaggctgagattggagacccttgaggcttgcacttagtgctaatacatgcagtgtgattctgaactcacattcttcaagagtgaagtgaaaagtttaggctgcatgctctctgcctgcccgggccgcggtaacacagtactgtacactgcgcagcctaagtaacagaaatttatttcctcactcaaggctttgatagggctggtttctcctgaggcttttctccgtggcttgcagatgacatcttctccctgtgtcctcacacagtcttccctttgttatgtctatgtcctcatcttctcttcttataaggacaccagtcgggttggatttcggcccactgcatgaactcattttaccttaattccctctttaaagaccccatctccaaatacagtcacattctgaagaactgggggttaggacttccacatataaattttggaagagatacacttcagataataatctccaaggttgctttccgttccagagtcattggatttttttttctctttcaagtactgacttttcattaatttatctttccagtactaaaagggaagattcagcctgctatgtttagaaaagattgcaaaggactgaagttgtacttttcagctatctgtaaccttggtctctttaaaataaagccattccaagcccagcatggaggcttatccctgtaatcccggaactgtgggaggctgaggcaggaggattgctcatggtgacgtgtgggtctgtagtaccccaggagttcaaggctgcagtgagctatgatcacaccactgcactccagcctgggtgtcagagcaagactctggtttgtttgtttgtttatttgtttgttaaagctattctgtagggcagagggcactattccagagtctgtgagtaaacctaaaatttctgtactttctcaaaaatgagaccattgcacctatggccattagagaatcttttgaaagaggcttgc

SEQ ID NO: 35401 - DNA, 2300 bp, Homo sapien
attatgtaaattattatgtatacattatatatgtgtacagaatattatttcataattatgcaaattatgtatacattatatatgtgtacacacacatataatcatactattatacatacacagttatgtgctgcttaacaatgaggatctcttctgagaaatgcttcattaggttatttcatcgttgtgtgaccatcagagttacacaaaccgaggtggcatagcccactacacacttacactatacggtagaccctatcattcctaggctgcaaacctggaccccatggtactgtactgaatactataaaccactgggatgcaatggtaagtatctgtgtagctaaacatacaaaagtacagtaaaaatactatcatcttacaggaccaccattgtatatgcatctgcctttgactgaagtgtcattgtgtagcaagtgaatgtatattacaatttaaacaatacatgccctcaaggaattttgatatctctttcaagtcatgtagatatatagcacatttccagctccccgaatagtttttttgcttattcaggaataattttctaacctgaccaatttacatcttttgatcccgtaaaccatagaagcttctccctgttttcggccccatcctgctgacctgtcttaaagctagtccatgctggctttcagccttcaactgccactgggagtgacaagggttctggaaggctgggctggcgtggcaaggggagactcccctgaaaggaagaatgtccccagggagtgcggcgtggccagcacatcttctcacactttattcctgctctgaaacccaagtcagaacttcagtttctggtttctttgaaagtacttggtgaacaaataagcaaataggggataaggaatgtccagtcattgtttgaggattttctggaatttggagcattgttattttagttgtttagaaaaggctttggttgcctgtttatcatacagtgcaggctcatgaataacttcctgggggactggcccacattcttggtccggttggcgtctcttgcccagcaaggctcatgccgggcgtcttcccaacatcctgtctgggaatgaccttcttttctctgcttactaagctccgagagtccttattgaaatgacctcctgcacaggaaggcctgctgtggcgcctggcaagagaaaacagccctggtttctaggaagtcccacaaatacacgcacacacacacacactctggaagtcttgttaggaagaggtgacatgtttatgttcttccacgcgtctgataaggaaaaccagcagacattccagaatgtacaaaacacgggtgaggacaggtgcaaggaccacagctggaaaccagcgaacacaacaaaccgcagctgtctgggccatgccacgctggtgtgggccagaggggaaaccaagggcgtgcgtgtgtctatgtgtgtctgcagatgcactcaggcttaaaaattagaagcctgcaaagccccctgcatttaagagaaaaaaaaataatcatggaatttttctggccatctagaaaaaattttgctcttgccaaaaatattcaaaagctatcaggatttttttttaacttatctaaatgatattagtgagtgcaggggaatcccaaacaaagggacagttgtgttctttaaattcactcttggttttaaacgagacctgcttgaacataataaagaacttcaagaagccctctcaccttggttgaatgataaagtgtttagaaataataccttcatgattatcatgtacaagacattcatcttataaggactctgatgactagagagttcagtgccttgcctctggttgtaatgcagaagcgtgattcccacttaggggtgttcaacatgccatggcctccctttctctgtgatcaaagttagcatcacagttgagtgacctacccagggccctgaactcacaagcatctcatatccggtttaacattctgctgttgccatggtaaaatctttaataaggattaataaattattaatccttaatgaatccttaatacctttgaactcggatcttgcaggtgtactccaacatgaaaacggagcatgcatgtgagctgagtagtgacatgcaacatgcatgtccattgatccttgctgctcattcacatacagtgttcgcgatgccccctggacacagaattccagtggacccaccacgtgtggggattcaggggagactcaaagcaaatacaaggtaagcatggacaaccaaggaaggtgaggtgaggaaggaggagggacact

SEQ ID NO: 35402 - DNA, 2300 bp, Homo sapien
tgacatcactgaagtaaatttcccagaagccatcagggagaattcatttggaaatccaattgaatgtcacttgcaaagggcaggctcctgaaagaggtgaccagtcatgcattcctgagttgtttgttataaaagcattaagcactgcgaactcatttactcctaacgcgaacacactacattattccacaggaattctgttccaaatgatcgttaatgtagaggacgggagctgctgattgtgggcagggttaataaaattcatcagatcaatggccagtataatgggcttgttaatggtttttaatagaggttggatcttcctggcttcagcagagtgaaggctgggagagaggggcaggtggctgtgccaggagacagctccatctcctgcctgctgaggtggcctctggatgaagagagcatccctgttggtcactgagcatcagcagggctccaaggtggccttgactgggaacgcaggcaccagctgtgggctggggagggagccccagggacaaccatactccagcagctggcatgccacagcctcttgcagaccacaggccagggttcatctaagcacctgaagccatggatatcccaggcccttgcttgcaccccaccctgggcccaccgatgagatgaaagacaacagtcacactgataatagtgacaaccccagcaaatgctcactgaagctctccagggccaaagactaagcatattacacgcactcacgtcaatccccatagcagcatcactagaggtatgtactatttattgtccccattttataactggggaagctgaagttcagagagatttggtcactagcccagggttagattagaaactgtgtgcctttagatgccatgctcttttattagacggagagacacagaagctgcagcctaaaatcagactgaagaaatatgcaaggtgcgacgggggcctgggagtctttccatttgtttctccaaccagtcagtatgttcaggaccaaccttgagcaaattatgtaaaagctgtagcttgtctgcaatgctgttcctctaggcatcgttagtaaaattcagggtgcccagggcccttgagatgcccaggtgctctgggccaccccactgtggccttaactggggcaccctgagaggtcctcttcacccagtgctgccctgtacttacagcttggtccttctcaccctgctcctgcctcaccaaaacttgacccatttctggtcatctgtgggtcattatgatatccgactgccgtagccagatcagctcggatgggaggaagctactgcttcctggggatgcctcctgagcacaagtcttttgtgaatgacagcaaagactgcccagagccagcacccagagttccagctgcactgctgggcatgggaacgcaatgacattcccgagctccagagactgccctaactgaggggccaacaccgctgccctggggctcaggaacaagatggggcgggagcttgcaggtggagactgtgggtgaaagaggcagccacgagctgaggaaattggcaagcaggagtgaaggaggaatgatagctggaactacaaaaaacgcaaaatactagcactactagatgtttccagtaagctcagagggtggcagaaggacttcataaatgttatcaataaatgaaaacacatggcacacatactccagtgacctttcccaggtcagcttctataacccaagatgggagcaggctgcagcagtctttgcatctgaaaacgccatcattcctaaagttatttccttgattatgtcattttaaaaactctactgttaagggtttggaggatgtaagaaaacagatggttataaggagggggtgatgcagggaaggagggggaggacataggggtttcagagggaggctcacgcataccccacacacttaccaccctcagcaggactgagctcagttacaccatgctaaatgcaacaagaaacgcagaactgggtggaacgtgttctccggccccccagagcgtacgaatatacaccataagtgctagactacatggcacaggatataaatgcagtcgagttgactgagagaaattagcaagaggaaaattcagagacagcatcatggaagattgcactggctgcaaagaacatagaggatttgaatcccagggagagaaggcacagtccacacagggagaggaagcagggacaggaggctggaagtgcgagcgagcatgctgagcacaacggagggtgaaggagacagcctcggtctaacaggggggttgtgtgt

SEQ ID NO: 35403 - DNA, 2300 bp, Homo sapien
agtccaaaagctgaagaacttgcagtccgatgttcgagggcaggaagcatcctgagagcatgggagaaagatgaagtccggaagactcagcaagtctagtccttccacgttcctctgcctgctttatcctagccacgctggcagctgattagatggtgcctacccagactgagggtgggtttgcttctcccaatccactgactcaaatgttaatctcctttggcaacaccctcacagacacacccagcagcaatactttgcatccttcgaaccaatcaagttgacactcaatattaaccatcacactgagttcagacggcagctctgcctcttacaaagtgttgaacacatccttttagcagatcgggcttcaatttcctcatctgaaaatgtacttaattcgtaatagtacttacctcatagtgttatttagagtgctaatcagctaatatgtgtaaagcaactggaacaatgtttagcaaacagtaagtactataaaagtattagcttctgttattatttgcaatttagcccaggctgtggagttttgtacagagttttatgtacccatttcccagatcaccccttcctttgagaatggtttgctatggtctatgtttgtgttccctgcaaattcctatgttgaaatcttaactcccagggtgatggcattaggagaggggagctttccgaggtgattaggtcatgagggcagcatctccatgaatgggattagtgaccttataaaacaggcctcagggagcttgtttgccccttctaccacatgaggactcagccagaaggcactatttatgaaccaggaaaccgacccacattaaacaccaggcactctgtcagcatcttgatgttggacttccagcctccagaactgagaaataaatttctgttgtttccaagcttcccagtttacagtatgttgttatagcagccccaacagatgaaaaaaaaaaaaaaaaaaaaaaacatggttacaatgcagaactccatggcgggctcaggtttgctctcctcccatctcccaatcctgatattgggagtctgttgactcttaggaggtgggtttgtttatggtttgtcctccttgtccagcctacagttctttctgctagtacttttaagccctggttaagtcattgaaaagcaccaattacagacttacataactgtgtcaggagcatttctctgagggatttgctcacccctcggagtcagttgcccagggaaacaagctggcgatgtcacaaggcatccacttctagttcttcctcagttcccttctgtggaacctgagtcagagcctagtccggcatgctgcctagcccagccacgtctcatcctattcatggcagagcggggactctcaccctctcccagcaatgtctaaagtcaggtattttggggtcatggccatagtaaggatggtctcctgtgctgcttcttccctcccagggcacagaaatgcctatgcaaatggagtgtctaggacagccctgggttactcttggttctctagggtatagttacaaaagtgaaaaaaaaaagaaaagaaaccattggagctgctccctggaggatcaaaggttgttgcagactttctagaatctcagagacctcaggagcaaaattacaacacacttttcctttctactgttcatgccctaagcacacccatgatctggtttatcaacctgctcctccttttctcaagagataaggttgcaacttccttgttatatgcaaatgaaaagaaaagagactacagccatggaagtatttcgctagattttcctagtatttcatgcttacttcatttaaccatgcccctgccccagtgccctagtgaaacagtacaatgtacagctcttgcattgctacctgcccttctcaaagcccacatgttgtattttatgcaaatctacagattatctatcattatctaaatgcaggcatctgaaaaccagcagtaatcctgcctctgaagtttatcaggaaaggagcttaaaagagaaccaaattcagcctgtgttggaactctcagtcccagaggggtgtggtttgtagctctccggcctgctgttggacttaggctgtgacccacagaaggacgccagaaagtactcaagacattcacggtgccccggtcagcactcgccatgacgaagacttctacatgcatataccacttccttgttctgagctggtatactttcctcaattattacatctcacaggaaggaaaagacgaggtgaaacccaaaatcttggcaaatggtgcaagg

SEQ ID NO: 35404 - DNA, 2300 bp, Homo sapien
agacataattgtacatgtacacagttggatgatctttgcttttataaccaaatttactttgtagtaggcatatttctccctttacatgatattatttttggctacacactcgccattactgagtattccatttttaatcattcccattctggtggtttgagcttttcttagctcaaatgagccagaggtacgatttcctcaggggaattttaggggtcaactccagcaggaaaaacctagacgtcgttatggaagcccaagggaacaaaacaattcaagtttgcacagatggccagctgtcttagtggttgtatggtcgtttagcatttttattccttaaaaggggaaaccagtttagtttcatcagggatttttttttttttgcatcaattttgtttcaccttattcctctcaagtttgaggtggcccgttaaaccagccacttttgcttcttgaggtggacctgtggaatttctgtgccccaaactgcgaacgttctttaggtctaaccctgaaaaccttcgttaccctggtccagcccctcttcactgctttgccatggatttccactccttgctttctctactgctttctagcagccggggtcacaccttggttcatgctaattactccctcttcccctttcacgctctcccctcttccctggagcccggtccgacgaccagccccgcaccccccttttctgtccccgaagtcccctcccgggttggccctataagctgtcaggctggcaggcaggggttaattgcgctcgcagcttcggcactgggaagcaccagcggggctttggagcggcctctggaataaccttggctttcctcgctcttttaatagaacatccgccaccaaaaagtggtttcagttcagggttaacatgtccccttccactctccaaaccaacaccctgccccctccgtttttttaaaagttgtttttcaaagttaatgagttttaagtttcacaatgactttccccttccttctacgcgttgctgaggaaacccccttggggtccccccccccccccgcctccccctcccccattctgcccgggcgaggggcggggccgggagaccccatgacgtcagcggccggcccacatcctgctgtagaaagtaaagagacggtaaagagaaactacggccccgcccgtcccgtccctcttcccggaccaaccgcccccaactgagcgaccccgccaggccttcccggggccgcgtgactggccgggcccgcccctccgcccccgccgtgtgctggttccccaggcgtcgcgacccagggctcccgccccccgcgtccctaaccccgcccctcccccccgggctgcgctgccacctcctcccgcgtccccctcccgtccctgcggcggctcggccgggcggggcggggaggggcgaagcggcgggtaggtggcggggccggcgcggtctggggcccgccccgccggggagacccggggcactggctccgggttcgtgccgggccgggcgcccatccagtccctacacccggtcagagctggcggccgcgccggcccagctgggccccggcgcctgggcgtcccgcgcccctcgccccggcctcaaccccagcccccgcggggacgccccctcccccgcccacgcgtcgccgcccgcggcctcccctcctcccgcccccggggatcccctgccgccccgcccacccgcgggaaagcctccgaccttcgccctgcctcccccgcgccgcccggcccgcgttcctcccgccggccccaaagacgctaaacgtgccctactctgccccgggggagaggtaaagcccgcgcccgtccttcccgccccgggccccgcggccccagggtctgtccgcccgccccgccgcggcgcgcgccccccagcccggctgcccggctccctggcggccgcgatcatgccgtggctccgggcgccggcgagcttcgccgcctcctccgcccggcggctgcggcccccgcccgcgcgccccgcgctcccccccccgccccccggcccgctcccctgtttaatatttcagtgctgggtggtgtgagcgccagtcgccggccttcagcgtggcggctgctgggcggcggcagggtggcggacggagcgggggaccggggagcggcggccgccggaggaggttatgtttgtgtttggggttgtcaagtgaaggagggatcccaggcgccgccgccgccgccgcgcgggggtcgcggagatcccgagccgcggccgccgccatcagcagcgcagctccagggccggctgcagcggc

SEQ ID NO: 35405 - DNA, 2300 bp, Homo sapien
taggcaatgaacggggtagcagaaagcctttacggacagggaatgtgcatattttacatttatgctccggatcccatgggatcacatgattggattacagtcagagttcacgctttaaaaacttccaaatatcgttaccatttaaaagctttaagtttaacaacgaacgtagttaagcattcatgcaatttatttggttcagctgtgtctcaattctttattgaatcagaaccttcctgaattagatagtggatgtttctttagagcaaggagctgagaaaccctatcttttatagatcacttagcacaatgctagatgaaatacttagaccatcatttttttttgtattattttaccatgtagttaaaaattgcaaataattttgtgctgagctgacatacagccagatcagggataaaatactgaagttaatcgtggccttctttaccttctgtttctttgctgtaatgaaaccataaatttctaaaaccttatactgggatgttagacacattccttcccatataggctttcttaaggagaattaatagttcagcgtttttgtgtgacaggcaaagcgtctacaatgtttagtttagtccttataacaaccttctgatgtggataatatttcctaattttacagttgggaaatctgatcttcagagaggttaagtaacctgaacaaggccacacagtaaggggtaaagcctggctttgaacccactccggtttgacaccaagataagtcgtcatgacttgctgcgcctcttgaaagaaatcctgaaagtagatgttatcagctccacaaaataagcactggatataactgagtcatgcagtaccacattctttagttgtttatcttggacaagttacttatccaatttttttttaatctgtaaaatgaataaatgatagctaccttcttagttaacagattaaattagggaatgtgtagaaagtacacaggcacatagtaggtgctcataagtgttctcttgtcttctacagtaccactaataacaaaagctttaagccttccttactgttctattcttgtgtctttgcttaatgactaaacattgtttcatgtttaacagtgacagtgggctttgcttctcagttttcttgcagtaagttaaaatttcagctttaagatccttgagaatcttgtggaagagcctgaggtggctgatttggggagataggtgattcggttttgggtcattcttatcttggcctattatatttcagatcactgtgttttaaaatctgtaagtcaggacaggctaggttgtgctgcagtaacaaataactctcaaacctcacttatttaagcaaacaaaaaggtgtttctggcgtatgctgtgtgatcacgtgggttagccagagctgactttgtggtggtgtcagatttgctgtctggagcagtgctgatcccatggcagagagagaagagctctggaggatcatgctgtggtaataactaaatgctccagcctggaagtgaagtctcatccgctcacaggtcgttagctacagctcctcacacgttcctgggaaacacagggaagcagaaagtgtggtcctaccatgaacctagaggtctggaataactggagtagccacagtagcaaccccttgtattaactgagttaactctaaaacaagatgaacaagacattgtccctgcccctatgaatgggcagatttactatacatgcctaacataatccttttgtagcctgatgcgatactttacttgttcctggtattgttgttttaaaacacaaagtgagtttttttactcttgtctgataaagatacggtgttttttttctgttttcttaatgagaagtcccgatactgacaaaatgacctctgtttaattaaaagttagtaatcttttgcagtggtgcccagcttggttactttttcttgagtttaggttagtgctctgctaggcagtaacttttaaagtatctttctcctctgaaggtagtaaaatgtgcttctccgtttttttctttttcagcacatggattaattgatgtatgttgagtttatggagctgccttttggtggcttgctttatctgcagtttttaagaagaaaaagaaggccctgagtcaaagaagatgcctcgaactaaacaaattcatcccagaaatctaagaggtaaagcattgcattaagtagaagtaaggcttgctgtaaatcttttaacaaagtatctctttggtgacaggaatggccgtttgttagatgttgaccctgcctggtgaggagcgctatt

SEQ ID NO: 35406 - DNA, 2300 bp, Homo sapien
taggacttacctcacatcttcagagtctctttagatttatattaacttaattccagtgaggtttatattaacttaattccagtgagatgtggcaacattatgcctatatagctctattttcctttttcctccttttgttatatacatattgtatttatacatgttatatacatattgtatttataaatgttacagttcaaaaatacactgttatcattacttaactatgtcttttaaacactccactaagagaagaaaaccaagtatatacttagagtatttgttatactaaccttcttatttgccttttcaataagcactttgcctgactcctgacaagtacttcacagaaagtggtaagaacaattttgtaactcaacacaggtcctctttggctatgatatagctgggttagcacaaaaggtaatagaaaagtgacaactgatgtgaagtgtcatgaaataaatacattttctatttttataacttgctctaatgttgtacagtatggtttgtacaaaagtagcagaaagctgaaagacaaaaatctaaatgttgctaacaagataactgacactgatgagaaaaccaaacacatactatctctcatccaaaatgcttgggaccagaaatgttttggatttctgatgtttttttcagcttttggaatatttgcattatacttgccggctgagcatccctattctgaaaatctgaaatccgaaatgctccaatgagcatttcttttgagcatcatattagtgctcaaaaagtttccaattttgaagcactttagatttcagattttcagattagggatactcaccctgtattctgctgttatttttacaggtttaagaaaatcacttagcagaaggttgattcagccttcaactaaaacactaggtttacagaataatagttacatttctctgccctgagtctttcaaatttatatcctcttgctccactttcatgagaaagattccaaagacttcagtgatttttctaagaaagttctaggatctctaaacttaggattagcgtccagtcagtgttatgtctgtctcttactgtatacagtagctgaatccacaagaatatagtatgataatgatttttccaagcaatgtgtgctgtggaccactccactactaaacaaatattcaggaattctgcaagccgcaaccattcggtaggttgaaatcatccatggtggggagtatttttaccactttgaaaaatgctataaattgttaactccctccccaaccaacccctctaagcctgccccagctagcagatagtttactagcactccaactgaccctacatcagcaagaaaaggttaaatccagggcaatactgtctattaccagaacagggaaatgtgaactccccttgattaacatttctaccaccaggacgtttgagttgtagtgttaacaccagaaatctggaatcctcagttcttcacactatcacaacctcccaccaggtttacaaagatgttatgatatcacaaaataactacactgagagtagtctgagtcttcctgattcaatgaagtcataagaaaggattcatttggagctgttaaagaaggaaccttttatttttgtgacgacatacacaaactatttgtatacatcactgcattagataatttaatatgacaaaagaaacaacttacttcagaaaagcaatctagattacatatctaaccacacttaagaaatcaaagcaataataacgcactgtttacaaatcctgcctgttaagtaaaggaatccatcctttctgacacctctaccatccatcatcgattcaataaacatttgtcaaatgcctactacatgcactaagaactgtagtaagtgctgtgctatgactgtgggcaaaactgtataggggaagatgtgaggagaccccaggcagaggtgagagggtgagggtgtggagaagtgagttgcatctatgttaccacgttttttcttcacatataagggtcatgttaaacagttactaaatggctaactacatgatgtggggtgggcctgctgaaataaacacactcctccaggccaaaaactcagtgaggccgggcgcggtggctcacgcctgtaatcccagcactttgggaggccgaggcgggcggatcacgaggtcaggagatcgagaccatcccggctaaaacggtgaaaccccgtctctactaaaactacaaaaaatagccgggcgtagtggcgggcgcctgtagtcctagctacttgggaggctgaggcaggagaatggcgtg

SEQ ID NO: 35407 - DNA, 2300 bp, Homo sapien
tggtcctgactgttgtcagtgtttggtcaaagttgccaaaaggttaaaaaaaaaaaagtagggggagtccctgccaagacatatttcccaggccacctttcttccgcgggagtgttgggggggaggcgctgcttggaacctgtgaatgtgacatcagctctcctctcctctcccaaggtcggctttggagagggaggtcagggcacccttgcctggcacaggcggcagcgctggcttccggctcagtgccgcctgtcctccgggagctgtggcctccctgggccccggggctaggctgaggtaagcgcacagcggaggccaggggccccggcagaggccctggggatagggtggaggcatctctgggtgtgggtgtgggtgtgggtgtgggagggagagttcttgcctctctctctcccatctccaactcttgcttcagtggctcttttagaggatgcatgtcattatggacctgtcgctgccactgtccctgttcccccagctgtgacttcgagggaggtctggggatctgagtctgtccaaacccacggctttgctgttgggataaaaactgtccttttgattttagaaggaggagggaaaaaaggtttcccagcatgtgtgttgtgccagtcttggaaattcatccgtgcttgaattccaccctccatccccagaaaaactggagtaaaacaaaaagaggagatggacaaagtgtgtatttgatggcatcccctgggaagagactctaaatttatcccataggtcttactgggccactgtgagcgctttggtggagaacaaacaaaaattctgggtgctcagttgtctaacctgaaaaatgggactagcggaaaaagccaatgtgttccatgcaccttttgctttctttattaaggcatgatgtcacctgtacagtaactgccctgtgtgtacttcagggggggatttcaaggttagatagacaggaaattgttttgaaaatgtaaacacattattaaatgtgaagtattatctgattccttgttcgaatggcatttccttctcagcaccaccttccttgcatattcacttaaccttgtacaagaacacctttttgccctaaatgaagacacccccccaaaaaaaagagtcccagaaaatatgtccctgcttgtgcggggaataaatagaatattctgaggtgcattcctccttcctatgttaggcaacattccttgaccctcctcggcccccaagccaggttgcgtttttttctgccatttagaagggttttcctttttgtcctagtaaaacatcagcccctgtagctcttcatctccccctggtgttcttctcccgccatgtcttaagattggtggcaccgaccaatcttaagatttaagttctgtgtgaaaaacacctttgcttttcaatcagtttatcagcctcctccgcaggggaagtgtggacacacaaaagaacttatcggggcttctcatcagtgatagggaaaagactgggcatgtgcctaaacgagctctgatgttatttttaagctccctttcttgccaatccctcacggatctttctccgatagatgcaaagaacttcagcaaaaaagacccgcaggaaggggcttgaagagaaaagtacgttgatctgccaaaatagtctgacccccagtagtggggcagtgacgagggagagcattcccttgtttgactgagactagaatcggagagacataaaaggaaaatgaagcgagcaacaattaaaaaaaattccccgcacacaacaatacaatctatttaaactgtggctcatacttttcataccaatggtatgactttttttctggagtcccctcttctgattcttgaactccggggctggcagcttgcaaaggggaagcggactccagcactgcacgggcaggtttagcaaaggtctctaatgggtattttctttttcttagccctgcccccgaattgtcagacggcgggcgtctgcctctgaagttagcagtgatttcctttcgggcctggccttatctccggctgcacgttgcctgttggtgactaataacacaataacattgtctggggctggaataaagtcggagctgtttacccccactctaataggggttcaatataaaaagccggcagagagctgtccaagtcagacgcgcctctgcatctgcgccaggcgaacgggtcctgcgcctcctgcagtcccagctctccaccgccgcgtgcgcctgcagacgctccgctcgctgccttctctcctggcaggcgctgccttttctccccgtt

SEQ ID NO: 35408 - DNA, 2300 bp, Homo sapien
aaatagccacacacacacatatactaatggcttcttaacaaaagcaccaagtcattccaatggggaaatgaaagacttttagacaaatagtgctagaacacctggatattgggggaaaaaatgagtcttgaccaccccccgccttataccgtgcacaaaaattaatttgatatggatcatagacaaaaacataaagactaaaaacctaaagtctctaagaggaaccttgagaatatagcacaacatttgggaagacaaagatgtcttaagcaggacataaaaaggagtaatttaaaaaaaatgatgtcagacttcataaatattaataatttctgttcatcagaagccatcattaaaaaataaattctcaagctacaaactggaaaatacctatgcaatacatatgtctaataaaggactcatatccaggatgtatagagaactcttaaaaaccaacaataaaaacacaaaaaagtcaatttgtaaaaacaggcaaaatacatgaacgtgcctatcacataggaagaacgaatggccagtaagctcaacaccgtagatcatcagggaaatgccaactaatgccacagtgaaatggcatttcacacaaatcatcatagctgaagtaaataaactgtgataataccaaatgttggactaagtaaaataaaaatattgacaataccaagcatgaagcaattcgatatcccaggcactgctggtaagaatataagaatggtataaccagtttggaaaaattttggaactttcatataaagttaaccataaacctacttatggccccgcaattctactctcagatatttatgcaagagaaatggaaaaaaagaacataaaaaagacttttacaagagtgctcacagcactcttagtaacagctccaaatagaaacaattccattgtactcatacaggagaattgataaatgtattgtcatatatttgtacaatggaatattactcagcaataaagtagaacaaactgctgacaaaggcaataacatgaacaaatctcaaaaacattatgttgagcaaaattagcaagacctaaaagaatatatactgaggtgctacattttatagaagcaaagctaacttatggtgaaagaaatcagaacagtgacttctcctaggctctagtggggctgggggtagggcaggagtgagtgtgtgtgagggaactgactggaaaaggaaatgaggggttttctgggtgaaggaggtgttttctatcttggtttggatgggtatatataattgtaaaatccatcaaatgggatcactgtctaggcattttattgtatataaattatacctcattaagatgattaaaaattttaaagagacccataacttataaaacatctttaaaaacccgaggcaaaatctctgaaaacatttactggaagggaacaaaataaaaacatcctgaaactaatgggctgcaacacctttgcaatctgacaaaaggatgactcttcacatctacctcctccgtacttcagtacaagcctttttggtgttgcaacattgtccaagttaggagaaatgctatgttcctctggccctgggtcagagagcgatgggattgaccaaaaggaaggaccagtggaattgaccaaaggaaagcaaatgcttagcttggtcttgatgtaaagggtcaaccaacacacacgtactgccaattgacgctcattgacatggtcagtgtcagacttctggtggagagaaaaatgctacttctgtccgtgcattccaagagtcaaattcgccaagctgcagaaggcagtcagcaacaacaaggaattgcttgcacacaggccagtcattcctgatgctctttcttttcctggatatttctgttggtgggcacgagcaagcaaagggagcttagagtgaaacccaagcattagtgagaaattagagttgacagatgagtgtgggagggtggggaaggagggagtgaggacggcatctccttccccatgtcaagcatatttctcacccgttacaatgctccttgttctctgatgtgtcctttcccatagaggaagttatttgtgagagaggaggagaggagctagctcatgggaaaaaaatgtctctcgggctgtgagcagtgaattggcttgtgcccaagtaatgtcctcaaggtgtgccatgagagatgaagtcacttggctcattttaccagcttcaggatggcattaagacctgacaaagccaggcaacacgtacaaggaaactaacctgaggcaggaccgtggcactgaaggagtctcc

SEQ ID NO: 35409 - DNA, 2300 bp, Homo sapien
atctgaaacaatcattcatagaagcagagtgtagaatggtggttacagaggctggaggtgaggggaatgcgaagatgatggtccatgggtacaaagtctcagacgcgggaatacctgtttgttttagatttattgcacaacatggtcaatatagttgataatagcatattgtacatttcaaaatatctaagggaggccaggtgcggtggctcacgcctgtaatcccagcactttgggaggctgaggcaggcagatcacgaggtcaggagatcaataccatcctggccaacatggtgaaatcctgtctctactaaaaatacaaaaattagctgggcattgtggcatgtacctataattccagctactcgggaggctgaggcaggagaaatgcttgaaccagggagtcagaggttgcagtgagccaagatcacgccagtgcactccagcctggtgacagagtgagactctgtctcaaaaaaaaaaaaaatacacacacacacatatatacacacacacacatatatcaaagagaataaagttcaaatgttctcaccacaaataggcaagtatttgaggtgatggatacagtaagtagcttgatttaatggctccacatgtattcataaatcgtaacatcacttggtatcccataaatatatacaaatccagtttgccaatttacagtgaaataaaaaattctaatatgcacataaattccactggcaggaagattttataacaggacatgacatgtcaggagactaatatatctcagccatagctcatagggcttctttacctctcaatcagtgtgattttattgttcacactttacatgagacacaggcactttttctcaacttacctatttcatggtggtggcatcaggttgtagcttcttggggtttgagactttggtatcgtgccgcttattcaaacttaagttccactattctagctgtttatctctttcttttttcctctctctcacacacaggcacataaattccccacagacatctctttactcttgctcatatgccttctcttccccagaatcttgcccaaatcctaccaatggctcaagactcagatcaagtactatttcctctgatcgttcttccactgttgtcttattcagcaaataaaggggtgactagatgcagggcaccatgctatggagacaaagaagacaacatgtgaatccttccacaattctaaattcaagagccaggaatacaaaaacatagatgtagtcaaatatcacagaatctagactaaagggattaggaaaccatagactgaaccaaatggtcaattcagcttggtcaaggtgatacggtgtagaaaacacttcatgggtatggggtcatgaatctgactctgtgtacacaagtatcccttacactcaagcagatgtctatcaagtagaatggatataaattatagtggagagggatattcctcaaagagggatgtgacatgtgaaaacacaagagattgaaggatcctgtcttatttggacctgaaagaagttgcatgagatagacacagaggggtgaggcaagagataatttagggaaagttaagggatgctaaatcctgatcattttctgttcattcaacagaagttaggcattgtcctcaagaaaccagggagcccctgaaggtttttaaacaatgagagcaaatgagaagatgtatgttttagaaaaatctttggaagaagcaggaggatagaggaaggtgaggttggaggcaaagtacagattgaagattgtatcagctcttggggtagaacatagctcacattttctacttgaaagttccattgtgctgatagtcagaactttattttgccgcttagttgttctattgttattacattcatcagattttcctctctactactatattgaaaagtattcctgccctgacacagcttacaatgttttttggtacctcctctgctaaccttctgcaacagcctcatacacacacacacacacacacacacacacacacacacgcgcacacacacacacacacacacacacatctccgaggaaaaagatacaaataaagaagatggacaggctttcctttccgtctggcggcagccatcaggtaagccaagatgggtgcatacaagtacatccaggagctatggagaaagaagcagtctgatgtcatgcgctttcttctgagggtccgctgctggcagtaccgccagctctctgctctccacagggctccccgccccacccggcctgataaagcgcgccgactgggctacaagg

SEQ ID NO: 35410 - DNA, 2300 bp, Homo sapien
taatactttatatttacaaagtaaataattattaattatttttctccctatagcagtatttctcctcaaattttcatactttgttttttttttttcctcctttgtttttctactttcctacttctcctaggaagctttcactttccctctctaaatgttaccggaaaggggtaacagaccacgagacagggttcttggatcttgcgcaagaaaggatttgaggtgaatccatagagtaaagtgaaagcaagtttattaaaaaagtaaaggaataaaagaatggcgtacagaagcagagcagctctgagagctactggttgtccatttttatggttatatcttgatgatatgctaagcaaggcgtgggttattcatgcctcccctttttaaaccctatagggtaacttcatgatgttgccatggcatttgtaaactatcacagtgctggtgggagtgtagcagtgaggacaaccagaagtcactcttgtcttgactgggtgggttttggcaggctttttttactgcaacctgttttatcagcaatgtctttatgacctgtattttgtgcgacctccgatctcatcctatgacttagaatgcctaacttagtaggaatgcagcccagcaagtatcagccttattttacccagctcctattcgagatggagttgctctggttcaaacacctctgagtcttctgacttacaggccgagtgttagagattcaatcttcatagatgggaaatcccctagagatcaattacatatttaaagcacctctttttgcagaggaaaaacaaaggggcagggaatgattatcccaatgtctgtcactgggggaggtaaaatttcctaggagttaatgggagagtcaagaccaaaacacaggtttcaggactcttcttacctgatgagtggaacttttaatttttatttagttaagtgttttggccagtaattagcaaccctttatgaggtagttatgcctataagacatccaacaatggtcctctattgagtctactagaaaaaaataacagttttattaaaaggcttgataactatgtgatgttagtccagagtacctatgaagtgatgaacctcaagatgcctatgaatttagaaataaaataaaattcagtcaataaaatacaacgctacattgcaaagccagatcttcaaaagccagtatggggcacagaacgtggtaactggataaaaagtatttcattgttgttatttattttgtcatccttgaggaaacagtccctaatggcaagtcacttgacttataaactaacagacttcattaaatcgatattgattgatttgacatcagcagtcactcactgaggttcattcagtccacgcatctgaaaacactgggggatcatgcttgcccctaaggtgccgtgactttggtacacaacacctaaatgtctccagaaagttcacagatgcctggctagccgccatcactccgagtgcaaaggatgcccagtgcccagctgattccatcacgacagcgtccttaacaatagctgtggactattgcttgtttaacctagcttcagggaccaacatcattcgtggagagggagcgagcaggagtctggtcagtcacgtccagccttggcgcctaaaattaggcagggctgtggagtaacatgagcggtttgggcgtccactgtccggctccagtatccccgagtccagaggcaacaggagtctctagtcattatgcatgtagagaaatcaaagaattcgagagcaagggcctggaatgcctggctgcctcccagctctcttacgaagaaataaattccattgttgtctcactctcctttccgtactctcagaatcagcagttactgtacgccagcacctttcactctccaaggagactgctcagctacagcaggaagcacagggatcttaaaacataaactcacagtgctccccacattgatctcccacacaaacccatctctcctgtcagggactgtgggcttcgtgactttctccatgtgctggactgtcgcatggtcactgttgccagggactctttgaactaatcccaagcctatgtcagaaaagcctgtgatcgattcccagtgccatcctgaaccacaagattggaatatcgcacctttcaactgcctgggctgataaacaatacagcatgtactcagcttcataaacactctgccttgttacaaagggcattgcaaactcgccgtgataggacttgaccttaaaagctatagacaatctagcggagcacagacggtttcataaag

SEQ ID NO: 35411 - DNA, 2300 bp, Homo sapien
atctctttcttcaatcacacattcatttgcactcacctaaaggtttggtcagcagcatagacttatactctctctctctctctttctctcatctatgagtcattacaatttcagtagaattacaataacgagttcagaacctgtcgcccacacctcacagtaagtaaaaggaaccagaagacagctttctcctcttataaatgtcaagtgttcagcatgtctccagtgggtgctgaatagaaaagtaaccttaaagaagtcagtccttgggttggagcaaagctttcagaattcagagtccatagttgactttcctacaagggcatatgattggtagtttcagcttcctttttcatgaggcttaactgtctgcagcaccggcttggtgtctgatctgttctgatcgggtgggagagggagaccccacaaaacaaacagcagaggattttcaggtttgtttcaagggcagccagccgagctgtgtatagggagtggggggacaggggtggtgttgatggtcttccttccgaggcttatcaaatgtaaatgctcttttcttaacaagctgacccactgtacaccacaccatactaatgagcaattctgcttggtcaacaaagggtgcaagaggttgtggaaaacccacagtagggcttgcatttggctatcactatgccctgcatgaagatctcaaagtactgtgcctaaaagtcattactgaggtttggtaggaagaatattaaaccagaataacttgagatactagccaaagtttatttttgttgttggtattattttgttacattcagacagagagaaatgcatttaggcagactggcatgatctgcgctggatatttgaccaggcaatcagaagcaaggaaaggaagaaagccaggcaagagggaaggggtgacatcaaacgtgccctctgtatttcgctccagaaaacagctcacaattatgactacctgccttgttttgcagctcagcataaaagtggtgttgcaccaaaccctactggagcagccttcatgattagaaagtactccacaccttggagagctgaggagacatgagaataattttaaatgcaaattaaattgagggggtagcagagaagaacacataaaagacagtaaaacaaaacctttcaattttcttaaattagcagtctaatgtgttctaaagagcagctccactcagatctcttcttaagggttgcatttcatcacagtataaatgggcaaatccatcacttccctctgctcagtgctcttgaagcgagattgaagggaaaattagaagctgttcatttgtgcttgcgggctcagaagcgtcgcactgctttgttttgtactctaccgtgtcctgttgaaaggggtcaacaagtgccggtgagtatccgctaacttccagactcttcctttcaaatatctttttggctaattttcctttgccggggatgggggttgtggggggagtggggatctcccacaaaatctatgctataatatgtctttcagaatctgggaaatttcagacagctttttaagcttcttccagtgactgatttgcagaagggaagagttattttcagcctagatgccggtggctgttctgtgtattaattataacaggggaatgtctaacgtatgttaagctaaaatggcctttccctaaactcccccattccctgccactcttaggccagcattagggtaataactggtgcccccacaaaaatttctagacaacttttctatatattaaatttttaatcatttcatattctattcttttgtagctgcaaatcaaactaagatttgggattatgaaaataaacaatgaagacataaatctgttttgttttttttttaatgactatggcacttctctgcctaagagatagggggctggggaatagccctgcatgatgtatgcatgtggatttgatgattttctgccaaagttttacacgggaaactggtaattttctcccttcgcaggggagggtgcagaggctgaggctggcgtcaccttccgttgctaaggtaacgtgctctggccattttatctgataaaggaagtccagtggactgtatgcattattcatcactgttctaatcaaacaatcaaaatcgtttactttcaccgggaatatttagcaagatcaaagacactctggctggaacggctcttgttttaccgctgacagatagcctttgatttttattttttgcagtaagtatatttgctattggggtacctttgggtatttttaaaagttttgtcttaccg

SEQ ID NO: 35412 - DNA, 2300 bp, Homo sapien
agtcattactgaggtttggtaggaagaatattaaaccagaataacttgagatactagccaaagtttatttttgttgttggtattattttgttacattcagacagagagaaatgcatttaggcagactggcatgatctgcgctggatatttgaccaggcaatcagaagcaaggaaaggaagaaagccaggcaagagggaaggggtgacatcaaacgtgccctctgtatttcgctccagaaaacagctcacaattatgactacctgccttgttttgcagctcagcataaaagtggtgttgcaccaaaccctactggagcagccttcatgattagaaagtactccacaccttggagagctgaggagacatgagaataattttaaatgcaaattaaattgagggggtagcagagaagaacacataaaagacagtaaaacaaaacctttcaattttcttaaattagcagtctaatgtgttctaaagagcagctccactcagatctcttcttaagggttgcatttcatcacagtataaatgggcaaatccatcacttccctctgctcagtgctcttgaagcgagattgaagggaaaattagaagctgttcatttgtgcttgcgggctcagaagcgtcgcactgctttgttttgtactctaccgtgtcctgttgaaaggggtcaacaagtgccggtgagtatccgctaacttccagactcttcctttcaaatatctttttggctaattttcctttgccggggatgggggttgtggggggagtggggatctcccacaaaatctatgctataatatgtctttcagaatctgggaaatttcagacagctttttaagcttcttccagtgactgatttgcagaagggaagagttattttcagcctagatgccggtggctgttctgtgtattaattataacaggggaatgtctaacgtatgttaagctaaaatggcctttccctaaactcccccattccctgccactcttaggccagcattagggtaataactggtgcccccacaaaaatttctagacaacttttctatatattaaatttttaatcatttcatattctattcttttgtagctgcaaatcaaactaagatttgggattatgaaaataaacaatgaagacataaatctgttttgttttttttttaatgactatggcacttctctgcctaagagatagggggctggggaatagccctgcatgatgtatgcatgtggatttgatgattttctgccaaagttttacacgggaaactggtaattttctcccttcgcaggggagggtgcagaggctgaggctggcgtcaccttccgttgctaaggtaacgtgctctggccattttatctgataaaggaagtccagtggactgtatgcattattcatcactgttctaatcaaacaatcaaaatcgtttactttcaccgggaatatttagcaagatcaaagacactctggctggaacggctcttgttttaccgctgacagatagcctttgatttttattttttgcagtaagtatatttgctattggggtacctttgggtatttttaaaagttttgtcttaccggacttggtttcttaaattaaaatacatactgttagaaagagaaaccaattggattagacttccaagcttggttttaatgactttgtcttgttaattctttccaaaaaaatattctgcagaaatagagataattcatttgtgtgagtatcagggaaaggctacataggcttgaaaaaagaacccaacaggctgaatgttttctggggaagtatattagctttgtgacaggctagtgtatgataatatagggatcactgtaatgctgcaatcattcttgctgctctacaaaccacaattgtttctcaaaaatcagcccctgccaggcacaggcaggtgacgatcctctagcactttataaaatgtgctgaagggaatcgccggaaaggaaggaattcaaagcatttgtacagcaaatatgtcagtgtgtgtcataaacgcacggcatctatgagtggaggctcggattcccaggcaattttccctgctccaggggaatccgaaagtcccaggatgagctgaggatcaacactcacaacggctgacacttaatgacgctatttatcaaatagaccttttgaaaactgatagcatgtgaatttaacagtatatgttccagagaatataaagcaaggaaaggctggtatgttatctctctttagatcagatcatctgtttttcctgagtagaatatattacttttaatgaatgt

SEQ ID NO: 35413 - DNA, 2300 bp, Homo sapien
tccaaagaatattaggaacatctaattcactgtctctgttttccatatgaggaaattgaggcccagataaacagatgcgatagacacaccaggctgccccttcctgcagagagagaatgtgtagccacaacctttgtttccttgggaaagggctccctccgtagcaggattatggccagtttccttccctcttgccaggcagtctgctaggagttttatcaaagctgtttctttcttgtcctttcactgccctaaaacttgcaatcaagttctcagattaatttatcaaaagtcagagagcggccgggcgcagtggctcacgcctgtaatcctagcacattgggagaccgaggcgggcagatcacgaggtcaggagttcaagacctgcctgaccaacatggtgaaaccctctctctactaaaatacaaaagttagccaggcgtggtggtgggcacctgtaatctcagctgctcaagaggctgaggcaggagaatcgcttgaacccaggaggcagaggttgcagtgagctgagatcattccacggcactccagcctaggagacagagcaagactgtgtctcaaaaaaaaaaaaaaaaagctctgcaaggacagaaagaaagagaaactgatggatttttgaaatatgaaaacctttttgtaaagtacttgccccttctgtcatagccactgctgctccaggggccccctggctgcacaggtgagagctctgggcacagatactctgatgcaaatactgcaggacctgaacatccaggagggcttcactgctgcttcccagcaaagatatgagcagtacatgggggcactcagagatctcaggcaaaggagaggtggctccctttggggattcttctcccagcctttgagactcagaagtgggattcctggaccagcagcatcagcaggccctgagagcttattagaaatgcagactcccaggccctgttcagacctgctggctcagtacttgcatgttaacgagacccccaggtgattcctaggcaaggtggtttgagcagcacggcacgaggttgccctttaccagaacagcctttctacgctgctggacgaaggatatgctacccagcaacgtcccccacctaaaatgcagcccctctgcttccgctgaaagccttcaaagacaagtagtaaccagaaggttatgcaatgcagttctttgctttatacatcaaatactcaggcttctcaagaacggagatagaggccaggcacggtggctcacacctgtaatctcagcattttgggaggccgaggagggtggatcgcctgaggccaggagtttgagaccagcctggccaacatggtgaaaccctgtttctactaaaaataaaatgcaaaaaaaaaaaaaaaaaaaatagccaggtgtggtggtgcacacctctagtcacagctacccgggaggctgaggcagtagaatcacttgaaccagggaggcggaggttgcagtgagccaagatctccagccttcccagatcgttaaaaggacagttgacattttagatattcttataaaaatgttgaggaaggccggacgcagtggctcacgcctgtgatcccagcactttgggaggctgaggtgggcggataatgaggtcaagaccaagaccatcctgacaaacatggtgaaaccccatctctactaaaaatacaaaaattagccaggcatggtggcgcgtgcctgtaataccagctacttgggaggctgaggcaggagaatctcttgaacccaggaggcggaggttgcagtgagccaggattgcgccactgcactccagcctggcgacggagcaagactcagtctcaaaaaaaaaaaaaagttgaggaaaaaaatcctagtacacaaaagtcttctagaaagttaatgtatgtgctacaatacttccttcccccaataataccagaggagacatgcggttgtcccgtatgtccactcactctcactatgtattttgcagatgagctgacctctcccattcctgcaacctccctttcccagtcaaagcatttttggtggtttctgctgctggttgataacaaaacacacaagagtcaagaatttttttttttttttttttacttttttttggtttgtttttaaagaaactgcatacatcatcagagacaaacaataatttaaataccatgcagtttctgtatgtacaaaacctaggccacagagatccagtttaatttgtattctctatttacatcgttttcctcatacagccatcatctgttaaattagaacctgggagatt

SEQ ID NO: 35414 - DNA, 2300 bp, Homo sapien
cagtgctggggtgcaaaactcattccgctggtgctgggggcaggggtgtctcaggatgatggtgtggggatgtgatgcagtggccagtgctaatgcagcaaggaggggccccgtggggtgaagcttgggtgctggcagcagtgcagcttctagtccttgcttgctttaaaaaaattctttttgagatagggtctcactgtgtcacccaggctggagtgcaatggtgtaatcacagctcactgcagcctcgagctcctgggctcaggtgatcctcccacctcagcttccccggtagctggtagctgggactacagacacatgcccagctagttttttgcattttttgtagagatggggtttcgtcatgttgcccaggctggtctcgaactcctgggttcaagagattcacccacctcggcctcccaaaatgctgagattacaggcatgagccactgcaccccaccttctagtgctttctttaggggtgtccccccttggtgtgctgagggcagcagagcaccttcctctgttgtgaccagaaggtttggactaagtgacccttttagcatgaatggcctttggttttgttgggagggagctgggggcagcacaagcagctttccactgggctcaagaaacctgccttggcgtcttcctccacctaggcatgatgctgaggccggggaggcagcccaggcagcatcttgcctccccgcacagctttgctgctgaaatctaagtgactctaccccgctacttgctctgagccagccgaatgtccggtcaaaaaaagagcatttgtgctgtcctgttgactggggcctatagtaagattgaaaccacagcagaactgtgcacacctctgctgtccaaatcagagatgctttttgcttctaatatcactcaactactctccaaacctgaagctgtcactctttgtccttcccctcctccccactccaatcagttacgttcggcacctgcagggtttccgctcatgcatagctagctgattcctggagggcaaaaaccatgtctttacagtgaactaaaaatatcaagagacgcacttacctccccgcacagaggggggtcactagggagacctgaactaggatggctcaattggagcctctcactgtttggcccagtgggtctccgtttttctgcccagctgctggacagcctgaaacatgcctgcctttccttactgtggccggttcctggattttaaaattgggtatgattgaaataaggtcgtctgggtgtgcatgttacacgcaagttaaatttccctgttcgagttttgtcctacaaaaggcagtcagccctgtgtgttctttctggtcttcttattttaaaaaaataattgtaactaaatttttgatggaaaaggaacatgtgccaatagaggggaaaggcagccaggacaaaagggtctacagtgaccggtggctgttctccgtgtcccagccccaaggacccttcctcagcaccaactcctggagtctaacaatgagcgtgttatttcaggtacttttctaggaagaaagaggggatttgtcctgcctgctttggggctgtcatcaccaagtcagtgagatggaattgaggaaaacccaaggtggctcagctgccacaggggctcctgccatgattgcgtggatgctgacgagcgggctgggggcatgggggagtggggctcgcccaggtgacagctcatattctaatggtggcttggaaaatgtccccaccaccccagcgacaacgcagcacacagtctgaacaaagccagcctcttgccagatggcatttttgctattttaaccccagggccttgcagagccggtacgctggggcttcagtgaggcggccaaggccttccaggaggctcaggtgttgagccataaagccccagatgtgcttcatgcatgacggcctcggtcgcacagtggcaggcctgccacactgcggggactggccacagggttgctgcgtgagaccaaagcctttactctgatgccgtccctggtcaggactgtctgagataagaagttcaatccatgtgtgaagtgtttttttacctgtgtagctgaagactggcttgtcctcttctgggtgggggctctgaatggaccccaggaccatggaccccagggacccccctgccacactggacaaggtgtcagtgaccactccaggttggtgattggtgattaaggaacagacagcattttcctccctccctctaccatttctctttctcgtttttgttttgttttgttttgttgattaaaggt

SEQ ID NO: 35415 - DNA, 2300 bp, Homo sapien
gtctcaccaaagactaagagtcccagagcacactgcttcctgagaagaggtttttaggagagtggaggcccattgcagactctttagggcattgcgttggaacagggcttcttaaacttgaatgtgccttgggagcccctggggtcttggtgaactgcagattctgtctgtaggtctggggtgggtctggctttctgcatttctaacaagttccgtgatgatgctgatgctgcttgtccagggggaccacagtttgagtagcaagggcccagggaatgtagatttcacctaatgatgacaggtttaatgctgattgcaaaagaaagaaatatgccacttgcctgtgcctttttctcatttttaagctagtctgacctcgtttctaagctattgctaaagtttataaatcactggaatagtttatcaaacctggaataaaatcttgatactgaaatgtgaatgttttccacaaattgttccctttccatgctaggaagtggtgtcactctaaccgtattacaaatcagctcattaccaaggacagctctgtggcagctcaccaactaccaactaccttatagttgcctactcattcttcatcctctctcttccttactaacgacaccccaattttatttgaggcaggagtgtgttaacataccttattccccaggccctcttgctgaaaggaatggccaataagatggaaggtaaagtcattaggtaggacttccagaaaaggtttttaaagagaatttattcagctggcaggtaaatttcctcttcctggtatttcctcttactttctgcgtggaacacatccataatggcaggagcttcagcagctatcttggaatgtggggcaacatcaagaatggaagccacatgataaggatggtggggccgaaaaatagagctacacattgatggtgtcactaccacacacgctcttttctgcttcattccagactgcctttacattttaaaaaatcccgatttgtttcagccactattatttgagtttttggttatgtgaagactgttagacctaatgctaactgacaccaccagagcagatgcagattagcaaggcagatatgggtttaaatctatgtctaaaaccatcatctttctgactgccctttctgggattcactagtggtatagggtcaagggaactggattgagagttctttgctcatctctgctactaactgtgtgactgttttttcttggcctcagccccttcatctgtaaaacggggatgagagatgaaagtgaccagcacagtgctggggtgcaaaactcattccgctggtgctgggggcaggggtgtctcaggatgatggtgtggggatgtgatgcagtggccagtgctaatgcagcaaggaggggccccgtggggtgaagcttgggtgctggcagcagtgcagcttctagtccttgcttgctttaaaaaaattctttttgagatagggtctcactgtgtcacccaggctggagtgcaatggtgtaatcacagctcactgcagcctcgagctcctgggctcaggtgatcctcccacctcagcttccccggtagctggtagctgggactacagacacatgcccagctagttttttgcattttttgtagagatggggtttcgtcatgttgcccaggctggtctcgaactcctgggttcaagagattcacccacctcggcctcccaaaatgctgagattacaggcatgagccactgcaccccaccttctagtgctttctttaggggtgtccccccttggtgtgctgagggcagcagagcaccttcctctgttgtgaccagaaggtttggactaagtgacccttttagcatgaatggcctttggttttgttgggagggagctgggggcagcacaagcagctttccactgggctcaagaaacctgccttggcgtcttcctccacctaggcatgatgctgaggccggggaggcagcccaggcagcatcttgcctccccgcacagctttgctgctgaaatctaagtgactctaccccgctacttgctctgagccagccgaatgtccggtcaaaaaaagagcatttgtgctgtcctgttgactggggcctatagtaagattgaaaccacagcagaactgtgcacacctctgctgtccaaatcagagatgctttttgcttctaatatcactcaactactctccaaacctgaagctgtcactctttgtccttcccctcctccccactccaatcagttacgttcggcacctgcagggtttccgctcatgcatagctagctga

SEQ ID NO: 35416 - DNA, 2300 bp, Homo sapien
cctgcccaggaattatattgaaagccagctgccaaggtgacctgctataacctgaagaccagtttcacccagtagctgctgaaacgaattgctgtaactctaagactagttttacttaccaccttctctcacaaattagagcttgcctgttcctaaaaactttgcttagggtcaatgagctatctttcaaggtaatacataacatttctctaatgaaacctccaaccatctctttgttgttctgaagaccaccccagtctgtgtgtatgccctgaactgcaattctgttttcccaaataaaatgatttagagactcatctttgcatttttaattgatcttgacacagccaattcacatatatccctactgtgccacatgccaggcaccatgccaagcactttacatactttctcatttaacccttcccaccttctatataatcaccattggtgatgattttattttattattaatattttttgaaatggaatttctctcgttgcccaggctggagtgcggcggcaccatctcagctcactgcaacctctgccttccgggttcaagcgattctcctgcctcagcctccagagtagctgggattacaggtgtgtgccatcacacccagctaattttgtatttttactagagacagggtttcaccatgttggccaggctggtctcgaactcctgacctcaggtgatccgcctgcctcggcttcccaaagtgttgggatcataggcatgagccacggcgcccagccagcaccgatcactttttaacacactacatcattgacttatttattttagtttttattggatctgtcctcccaccagaatgtcagtttcacaaggttagggatctttgcttcggtagctgatgtatcctgagtccatagaacagcgcctgcacacagtaagtgcccagccctggtgatgattttaaagacaagaaaaggcaattataaaagttagtgaccggcccaaggtttagatgaagtaaatggaacttgtgtaaggtaacttgaagaactctgcttactcatgtgaacactacccaaggaaggtttagtaccccagtactgaggaactaaagatggtggtggtaagggagtggggaggggcatcagtgtttgagttcaaccaccacacgtttcttcatttttaagttctgtctagccattatacacacatttgtctgcactataactggacttctgcactgttgatagtcctaagtttccttcaaagcttggcatccgtgtggcttatttggtagagatttgaactttcaaagggacgatacccatcattggggatttctctcaaaccctggcggtttaaaaacctacttgggcactgctgctcagccagcccgaggaccagggaggcaagcacagaaatagaaagcatttgtaagtgttagtagctactttaaagagtaactctgttctgttagacctactaataacaaattaggagcttgcatttagcacatctttttttaaaaaaaaaacacgttcatttttctcctatgttatagtgttttacctgagaggctgaatatactaagacaatggccaaatctaatataaaaatagacctccaatccacaacctgcagcaacctgcccagaaaaccagtcagttacctacaataaccaacccagggagcctgcctgctctaaatcagacttgcactcctctgcctgccttttttcttctcattcggatggtcttcatctattcccacatacctggggtggggaggaaattagcaaaagcaaaacccgggtcctgcacgcaggcagcttaagtacggccctagggctcgggtcttccctaggcaagaacctcgagggccggacacgggagtgcaacccaggcacgcgccttcggatggccagagtaaatggtcgcgagattttgcggggtagcaaggggccgggtgcccacggcgggagaaactacactactctggaggcgagcctagcccttcatcccgtcgggtttcacaaacgaagccagagcttcctggagtgagggtggagcttcctgcccgcgccctctgcgcatgcgcccgcccggcgcccgcccggcgacctggagttgatgtcacgtccggcggcggcggcagcggcagcggcagcggcgctgagttttgtctcccgggccgtctgggcgcgcgcgggtgtcccaggtaccccgccgcctccctccttcccgcaggactcgtccctcctggccctgggccccaacggtgcccgcctgcccggcggtcggtcagcgcacagggcacg

SEQ ID NO: 35417 - DNA, 2300 bp, Homo sapien
ctaaaatgggggtttagaaccccttaaggggccatacttaggcttgaaaaggctaatgttggaaaaaacatgttcttctaattggtctgctgtctgtcttgtccttgcacactctgcttacagagttttgttagagatgctgaactgcaggctgggagcaggcagtgccaaaagggaacagacacacacacacatgcacgtgcacacacacacacacacacacacacacagatttttgaatggttgctaccgacaaatgtcgctgaaaccattctttaaaaattcagatctggtcttgaaagaaagagccaatcaagtgcattcagagaacagggaattatcctttgttatctttgtttaattcttcaccccacgtaagacatttgtcaagtgtggacgtggaagccattcctcataagtctacgtagcttttgttcacaggctcactgaagtccaacaggtgtctttacatgcaactgaggtttagagttcttttcagatagctgccattggaactagaagggaatctaagaggactggagtccacctccagcctgtgtaggcaaaatctgagaatgaacagcccaatcagttgcatccttcattgtcctccctagggtcaatattctttgaagcccaggctactcataggtgcaagtgtggtgtgtccaaacacgaggggaatgctgggcattttctagaacagagaagtaagtactgccttcctggaaagagtcgccctgcttcccgaggctttgctacagcactgcagggtgggtaagctgaaattccatgcgtggtttgttgtggtccctgacctgttgctgacagacttcatggtcagcattccagctcttgcagctatcagttccaaaccagagatttgctggaatggaagtctcccaataatagtttgaacagaggcccatgtcatggactgctttggttcacattcttcttctttttttttttttttttttgaaatggagtctcgctctgtcacccaagctggagtgcagtggtgtgatctcagctcactgcaacctctgcctcccaggttcaagcgattctcctgtctcagcctcccgagcagcagggactacgggtggctgccaccacagccggctaattttttgtatttttagtagagacggggtttcactgtattagccagcatggtctcgatctcctgacctcttgatccacctgccttggccttgcaaagtgctggggttgcaggcgtgagccaccacacccagctgattctggttcttctaaattgctccctgggaaagtagtttttggggaaacattggaattattattattattattttctagctagcctgaagggctccgattaaggatgaagggaaagtaaacaaaatgattcaatgggtttcatttttctaagtcattcataacctaaatagggatattcctggggtttcaattgtatgtttctgtactaaaccataatactcgcgaaatcttttcccaaaacttcgggttttggagagaggtccccacaaaggcctctaagctctgtaatacatatttaatgtctaaaacaaaaaatctcatttgaagctggggtattagaaagaacatatattctttaaaagaggcatgaaaaaatattttagtgtgtgtactcaaattttatctactgaaatgcatgtagtaggtaggtgaaggaacaagagaaagaaaagaactggatagttcattttctttaaatataaactgtagcaaatgggtttgagatactcctttagtgctccatttgcccttatcccaccacatgcaaagacttgatttggggtagctatatgaagctgaaatctctagccttcaacagtgttctgcagaaggactttgtttcagcccagcaccgttcatcatgcctttaggggtctgggtacccacagctgactttgacctaggactaaaacccagcaatcttttggctcctttctgctttgtttaatgtgtttcaagggcctcgatgcaaggaggcagtgctttaagagtcttcccatttagttcctgcatgcctgtttcgttcccatcaatgtgcgaatggcctagattccaagttatgagggagggtgtgggtcagggttcttacctggtatttaaaaaatgtttgggagtgccctgggcctatttgaaaagtttgaatctgtgatcactgtcagctcctccaagacttctcctctcaacagacaattgcattgtagggcaccccagaccccccttagcctacatggcagcaaataccactgtgccagttatat

SEQ ID NO: 35418 - DNA, 2300 bp, Homo sapien
gcctcccaaagtgctgggattacaggcgagagccaccgtgcctggcagcaaaaatgtgttaacaggatccccctcataaaacgttttgtgtgtttgaatgagacacttgcagcacaaggggcccggaaggggcttcctctaagagctggtgaattattgcttccagtttactgctgcacatttgttttgttgagtagggaacatgagcttgacatcagagataaaatgagtggggccccactcgtcccgggtgcacttcccctctttggtgggttgctgagaaggtggcactgcagagagtgggtgctgcctgaaagctgaggaaaggggcattcctgagagctggaagggtcccagaagacctcttggaaaaggtgggttggtcttcaactgggcccagaagagggggtaggatttaaataattgaaaaggaagacatgggaggctctatgatataaagtcctcctcaaggaaccactggttctgcgagataaactgtgtggcttgcagttgacctgctagagcaaagttagaatggtttaagaatgtctgaaattctacaaatacttttcttcatcagcagtaagtgtcacttgcatctttctttcccttcgtatctcaaatggtgacagccacaaatgacagagctctggggtcagtcaaggcaaacagcttgctggagtgttggaaaggaccctgttgagaggagcccaaatggccgccttagagggcgtgggaagaactgcaaaagttgattcagctagtaatgctgtcaagacagctctgtgtctgatggagtcaggggcatgctatggtaaacagagtcagctgttgagaggatgccttgaagggtgcccagcccctggtttggtgcttacatccgatggtggtgggagcacctgttctcttgttatacagttgagacctgatggtgcaagggtcagggctggctgcagcaataatttactagatgagcaaggatgcaataatctccttggagaaggacatttgcatatgacatgtggacatgcctctcccatctttcatggtgggtggggctacaaactctggatttgtgtcactggtgtttcaaatccctttctcacctccctttctcctccctttctcacctgtcagcattcagaagtgagagctcatggaaatgatgattgtgaggctctctcagagtagtctgccatcttgggagatggtttgaggaagaggccacagtggtggaatgaatagttaactcttgacttgggatccagaagtcagacaacagagccttgcaaagttactacgctggctaggcttttaaaagatccctagatgtgacaaaaattgtctatcttcattttttctatttcaaaaggaaaagttccttggctaatttgatgtcattctggtgaaagtaaagtgatgctcctgaaggctttttttggtcaatggaaaaggcagtttgaagaggctgtcccatcagacttcagaaagctggaggcactacagaaatgggtgtgtgggcactgcccggggttgaatccttggctggccatgtgctatgtgggtgtgggctcctcacttaactctttgaagccccagtttctttatctgtataatggggataataaaagtacccatctcagaaggttgttgacctaaacagggctttgtttaaaatgaggactcaataaatatgagaatcttgcttaatcagaacttattatggtgaactacggtccatttatgattttccttgaacaaagatttattgagtgccagctacataccagatgctctctgggtctgtgctatgcagtatggtagccattagccacatgtggctgcttaaatttacataaaactaaataaaatgaaaaatgcagttttgatgtggtttggctgtgtccccgctaaaatctcaacttgaattgtatctcccagaattcccatgtgttgtgggagggacccagggggagttaactgaatcatgggggccggtctttcctgtgctattctggtgatagtgaataagtctcacgagatctgatgggtttatcaggggtttccacttttctgtctccctcattttctcttgctgccaccatgtaagaagtgcttttcacctccccccatgattccgaggcctccccagccacatggaactgtaagtccaattaaacctctttttcttcccagtcttgggtatgtctttatcagcagcttgaaaacagactaatacagtttcctcagttgtcctagccacatttcaagcactcaaaggccacatggggctggctggt

SEQ ID NO: 35419 - DNA, 2300 bp, Homo sapien
cgattggagcaggctagcttggaaggagaccgtagaagtctgcggttccgtgcccagactctggggcctggattccaatcgcaggcctgttgcttatatatgtcaccttgcgcaagtcccttagccttcattgcggctcattcacatcactggtaaaatgggtttacaataaccttaggttgctgcgaggactaaaagggacaatacctggaaaggcgttagtatgatgctcagcacgcaagaaacgctccgggagccgaggttattattatcggctgttcgcacctcgccgggtcccctcacctaccccaggccaaggcgcccactgctctcttccaagggacaggcgactaacctattagggcgcgtcctgcctagatagatgtatttgcttggttggggcggggtttggagtgaagcagggaagagaaggagatggtgagggcaaagaaagggaagaagcggaggggcaggaggcgggcgaggcggcctgggcggggccggggaggagccgggctgggctcccggggcccgggcgcagcgcgcacccggagctggcggcggcgggggcgggggcggcgcgcggcggccaatggcgcgcggcgctgcagcgagggcggtgcaggaacaccggccgctgacagccaaactcgccaactccgccctcgtccccgcgggatcccagagcctgagccggcctggggccgaggccgcccgagccgcgaggcgagcgaacatggcagcagaatgaggaggctggcgccgggtcgtggccgccgctgccgcgctgcagctcgggatcccagtccggcgcgctccgggccgcatccttagccggcctcctggcggccgcgggattatttcattcccaacggagagctaggaagaaaggagactcccccgcggagcggttccgtgctctggcagggtgtagacgtttgtctgtgcgattcgccggctgcgcaaacgacgcgggagagagccggtcccgggctgcggcggcgcggccgcggggatgagccggccatggagcggccttggcggggcgcacgcagcggactggcgctgccgcgggagcgcagcctgagccggggctccagggggcttcgaagcctccggcgccctgggggggtccctgccgccgactccgggaaggacgcgagccccgcgtggcggacactgccgcagtcaccgttctgaggcgccccgagcttgctccgcctgcagctcggtgcgctctgggcacccgggcgccttgcccggtgcacggcggctggcgcaccgcggctagattggctacaggagcggggtgcaggactggctagaggtgggtgtgtgcgcgcgttggactggagatccgagcagaagcagaaccaggcggctctgagcagccatgcttcccggggtgggcgtgttcggcaccagcctcacggcccgtgtcatcatcccgctgctgaaagacgagggcttcgcggtgaaggcgctgtggggccgcacgcaggaagaagcggaggagctggccaaggagatgagtgtccccttctacactagccgcattgatgaggtgctgctgcatcaggacgtggacttggtgtgcattaacctgccgccgcccctcaccagacagatcgctgtcaaaaccctaggtgagcgacccctaccccgcatcctccgtcccacccccgccctttaaccttctctaggttccttcccccctgcctttccctctccgcatcccagaagcttaccctgcatctacgctgccccggggatctgagatcccagatccgactcagagctccctccttcctcgtccccggccttccccacctttgcgcttccctcctgcctcctggcaccacttggacgcgcttccccacgtgtgtagattgcaggctggagaaggcgtgtgttccggggatccgaactaggaagatcagatgccgataataggggatagggtgctccgcgagaagaggaaagttactcctcagctgtgtgtgtagtgtccaagtgtgtgtgtgtgggggggggggatgggggggtggaggagggttgtgcgcgcgcgcgcctgggagaggcgagtgcgcgcccagaaacgcctgaataaaaggccgcacacgtgtgtcgggttttcttgggtgcgatagaggacctgcccttcagcagcggtggcgccctgctagggtcgtttgtttctttctgctgtgagttagtttagcgtgagattgcagatgttaccatcggctggaattatttcgtctgcgctggaggcaaggacggtgggagtggttggatgg

SEQ ID NO: 35420 - DNA, 2300 bp, Homo sapien
aaaactccatcttattacttagatattgcttcactgtacaatggtctctctcatcaagaaatgacattggtaacagacccattctctatatttatttatttaacatttatatagaacttactatgcaccatgccttattctcaggactttgtaagtattagtgaatacgatcctgtaaaaccccttgtggtatataccattattacccacccattttatagatgaaactatgccgcagagaagtgatttgctcaaggtcccacagctagtaaatggcagagccagaagtcaacgccagtggctctagctgtgctccgaccactactgcacatcctctgctccctgaaagcctggccatctctgacatgtgacaagcctgtgatgtatccagccccttgggtctgacaccactgcctgcccctgtgcccagataggcgttcctgccttggttcttacaaaacccctgctcaaaagaagcctgttagtattgagggcaacacccctctttgtctctcagtcctccccaggctgctgccagccacccagcactgtgtcctttgtgcctttcttctaatgccctaggtcagcctccaccccgcattgccacacacagcttttttggtatcctgctctctccacgcgccccgcctcactgccagttgttacaagttgttttaaactcttgcaagtatcacgttttccactcgtgttgcggcagaccatgtgctacattgagcccagtgctgaagacaggagatgaacatgacctgacccatgacctctccagagaccttcagctagaagacgtgcctttcactttttagtcccctctcccggcaccaaatgggtgcgaagcgggcattcgatgaatatgcatacatttatttagcaaatgtttattgagcgcctactacatacagggcaaggcagtgtgccaggtgccaaggatatggcggaaaaccagacagacgcagagtccccatggctccagaggtgcggggccagccttggccagtcctcctcagtgccccctcgagggcctgggaagggtgcagggtggtggaggtgggggcaagctgggagaagtaaaggctgcggtaagtggcgacggcaacaggagccgaagcaagaggcgggcgtggcatgtggccagggcgacgtatccgtctcgaaactagacacgagacgcacgtgccgcagcggcctcggagaccccctgccccgctgcggccgtacacaccacagcgtctacgcgggggcgggcatgggcctaggggcgggggaggtgggaggcagatgggagcccgccaagactggactgtcttggaagaaggcggctgaaccgtgcgtgcgcggccggagcgggggcgcgcgattggagcaggctagcttggaaggagaccgtagaagtctgcggttccgtgcccagactctggggcctggattccaatcgcaggcctgttgcttatatatgtcaccttgcgcaagtcccttagccttcattgcggctcattcacatcactggtaaaatgggtttacaataaccttaggttgctgcgaggactaaaagggacaatacctggaaaggcgttagtatgatgctcagcacgcaagaaacgctccgggagccgaggttattattatcggctgttcgcacctcgccgggtcccctcacctaccccaggccaaggcgcccactgctctcttccaagggacaggcgactaacctattagggcgcgtcctgcctagatagatgtatttgcttggttggggcggggtttggagtgaagcagggaagagaaggagatggtgagggcaaagaaagggaagaagcggaggggcaggaggcgggcgaggcggcctgggcggggccggggaggagccgggctgggctcccggggcccgggcgcagcgcgcacccggagctggcggcggcgggggcgggggcggcgcgcggcggccaatggcgcgcggcgctgcagcgagggcggtgcaggaacaccggccgctgacagccaaactcgccaactccgccctcgtccccgcgggatcccagagcctgagccggcctggggccgaggccgcccgagccgcgaggcgagcgaacatggcagcagaatgaggaggctggcgccgggtcgtggccgccgctgccgcgctgcagctcgggatcccagtccggcgcgctccgggccgcatccttagccggcctcctggcggccgcgggattatttcattcccaacggagagctaggaagaaaggagactcccccgcggagcggttccgtgctctggcagg

SEQ ID NO: 35421 - DNA, 2300 bp, Homo sapien
gtgcctggatcttgatggaatataatgccccagaagtggcagaacctgtgggtggtgaaggctacatatcgggcctgtggactgtgaaagtttgcaataactggcactgtctccctcttcttccaattgaaaggattaacacacaatggtcaatatgaaagcacaaaagaaatggaatacactttaacgagaattggtatgtgtagcagcttggaaccttgtctttgaagtcaaagcacttagatttaaatcccagctctactgttactggtaaattgcgttcttttcctagtctgtatcagttgcaaagaaagcacaccaactggaaaaaacggcaagcgggtttcattcctggccaggaatagagaaggagtaaactttcactctaaagacccccttcttccagagctttgggaagctggggaattgtaaggcgttagatgtggagtggggaggtatgcaagcatatgccgggaggaactctagacgcacaggtgcatttcataaacatgcctcttcatacaatgcactatcagaaaatggcggcgattctcttctacgggtcgggagttgagcatataatgatgtattaatgatctaaaagtaacaaggggtggctggttctggttttctctggttcctagtaggccttatctttctctggtacttggcaaagggcagtgaggatcccgggccaaccgcagttgttttaagctgggttacctatagataaagagactaggaaaaaaaatcaaacaaacaaaacggtttaaaaaacaatgagcattttcagctgtctactgtttaagaaaataatgagctctcagttttgccctctgagcgatttctccaggactgccctggtaacactactactcaacagttttgtgctttgcgcagttacttgacctccctgggcctcggtttccccacccataaagtggggataacagtacctatttcatcaggtggtggggacgatttaaaatggttaataatgtgcagttcttaaaagtgtctggctcagaataagcaccatacacgttagggggaaaaacagcagccggatgtgaggccctccccaatttcgttactccataaacctctgagttgctggtaacacctgcaggaatgagaagggcctcaacatgggctgaatttccagccaaactgtgggaagtggctgagattttaggtaggcaaaaaatgttaatgtaacatttttggcccccaagttctcagaccacttacttccctttctagtccactgacatgcccgcaagcaattccattctgccaagtggtgctggtggcaagccggaatccaagaaaaggaaagactccgattttaagggaacggggacatgcggagccacgtgagtcactgggtcccagagccacggaaggctctcagctcagcagtcagagtgcactcgtcattgcgttcgaggttaggtggcctagcctgggaaccaactcaccgtcatttgaaatcgttttagggaaaatgaccctaacatttaaaatcctctctcctgaagttgtgtggtccagccgtttgctgaaggaggaagcaaagccggtagtaactcactacatatttgggcagtggaatgaaccctggaagctgacaaagtcgaagcaagtcactgcgccgccccccacccccacccccaccccaaataaaaacagagagacaatccttcaattataaagaagaccacggcgcccgggtctccggcaggggccgctgcagccgagcagaacgctgagccgctccgccccacggcctcctctccagccggcgcgcccgcctcccgcaggtgcgtctctgcctgcgccgggccggggtctccgcggcctctcccgctcgggctccggcttcgaggtcccgaccaagcactgctctcgcgggactgcgcgcaccgcccagggcctgccgcgggctcgcgagcggaggtggcaccggtccgcggtgcgcatgcgcggcccggcctctgccctgcggtcccgggctggtgactggctagcggttggaggaagggatgtgggggatggtgggtgggtacagagagctgggagggaggcaccccggggggcggggcgtgggagactgtattcgggggcgcgagctgccccaggtgagccgtggctcaggtccggagcgcggtcgggacacagcgcctctaggagaaagcctggaaggcgctccgggggtacccagagctcttagcgggccggcagcatgtgcggggcccaaggtcttccgggctctgcgtgggggtcgctgcggctggaga

SEQ ID NO: 35422 - DNA, 2300 bp, Homo sapien
gcatctgccatacagggtcattctcaggggatgcttaagttatttctgtcaggtacatcttccatacactttactaccttggagtaaagtagtaagaatacagctttttccttaacctttaccagctaactcagtgcttaggggccttggaatgcctgctgtccagcaggtgtcacaggcctgactgggaggcatggccattatcaacagtgtatgaaggtcacatatggctccctgaagtgattacatacttggaccacatcacctcagccccttgcaaaattgcatttaatgttacacccttggcttttgtagaaacaggcaacaagacactatcatataaaactttgtactgcattgcaaggcataacctttaataaatcccagtggtcctttgtgtagggaacggggatgctcatagcctatggggcggctggagaaccagtcagggaccctgagggctcgatgtacactttacatgggtgggccaaggagtttacactgagggcactggtaatacctgtaatagtcttatagtacttataaagcagttttgcacataaaataccatcatgcacttataagtttgttcttgggctgctccaagttaactttattcattttcctagtgttagtgtctcagggagtctgattatatttttgatttgtaatttctatctgactaaggcctagagatttcaaaactgttctttgcaattcctctcatactgaacctctggttcagcagctttttttgttgttgttgttttcaagttttatcatttttgttcctatttggttttgtcgtttttaaattgagaattgcttctaaaacagaagacatgaaaagagaattaaaaatacaatatatgtgtaagatagaattattcaacttagcatttattaaacatctaccagatgatagacattagaaataaaatgactagcaagacctggcccttcccctcaggggttcacagaatggctggagcaactgtcatataagctgttatgaagtgcagaaactacacagacatttgtgcgggttcagaccagcgcaattagagatgggcagagtgggatggggtaggggtaaggtgcttgaaatttgcctgggtgggaatttttgaagtataaaaaggacttctacctggggggctgcggcagtagagggaagagcacggtcggtacaaatgcatggcaggtgtgaaacagtttgatttgttcaaagaatgatgaatcacttagtgttgtataatggatgggaggagagaaacacagcgatcacaaagggccatgtttgccaagaaataaaatatacttggaaaaaaagtacgtatgtgtatataccacaaaactcgggtgcattctctagggaccggcgaagccattctttcaggagatatgctcagcatttgccacgggccagctgctgttccaggtcgtgggttagggcccggcaccaggaagggcgcccctcccacagggccgacatcctaaccggcgtcgctgcggccgcggagctgggaaggccgagggcgccgggcacgtctgtgcagatttctttagagtccaggtctgtcgcccgcgtcttcgtcggtggcagcagggctgactggccacggcggccatctgctagagcgcatttcttcccatgaaacgccacctcctccgaagtgcggagcgaacgcagccaaatctacacaaagactgacaagctggatccactcgacggaacccagggccaaaaaacggcggcgagcagcgcctcgggcccgcgattaccggttttctgagcaccggacagcgtgagccgtgccagccctgtctcgccatcccagccgaggagggcagcgcgatggctcttccctgccttgaaatcaaccccattgccagccgctttcgccggcagagcattttccgtggggtccatccggctccaaggcggcctgcgctggccacgtggaaagaaacacgcccactgcctacaggccacgcccttcctcccttcgcgcatgcgccccacccgtcctgaggacctccgaacctgcagggggcgatgaaagtaggcttgcgctccgcttgtagctgcttccgggtcagaggtcagacggtctagcgctgcgtgggccatggtgcagctccgaccgcgagcgtctcgcgccccggcgtcggcggaggcgatggtggacgagggccagctggcctcggaggaggaggaggcggagcacgggctgttgctcgggcagcccagcagcggcgcggccgccgagcccctggaggaagacgaggaaggggac

SEQ ID NO: 35423 - DNA, 2300 bp, Homo sapien
actccccaccagcccaaataacattacctatatatgccttggagatggctaggcagcctgtttggtcctatccacagaggtggaagaacccatcagtggaaacttgtaatgaaaacctggtgccttttttagttttagttagtatcaactgactttgatcaaccagaagggaaataattccttactctccactccaaatatcagataaaaaattgtacctttcccatcatagttaatatggaagtattttagtatctgatactttaaaagtctgattctgccagagtttatcttatagttgaatacacaatacccacactaccttgtcagaatagtatgtccaaggcggcatctgtcttttgcttagaaaccttcatttgctgatatttcagagtggtatgggagtggtagtttttaaagtcattgcagtattctcctgattgaaatgttttttaaaatgtcttgctaattgctgttctcatttttaaattatttttcctcagaaacccacaatctgccaaagcaacctccacttgccctagcaatgggacaggccacacaatgtctaggactgatggctcgatcaggaattggatcctgcgcatttgccacagtggaagactacctacattagctatgcatttcaagagctcacacttatattgtggcatatagtcaacatggaagtagaccagctctgctgatttgaaatttagattttttaaattatgtactggggacaggtttttgtcgctttacattgcttcctagtttacagcatgatgcaaatgattttctaacttagtgttaggagaaattattttccatctttaacctcttagttgtctaagagttaaatattactgaatttcagacgttcaaattgatcatcacaaatcctttaaaacaattacctaaaagaaaccaaaaatcctgccttctttgtgggggaggggggagagaggggaaggaaatggaacaagttgtgtttgtgttagcatgtgggtgatgtaaacttcaaattgggagatgttccgacccccactcccatataagcattcaatcagtgtaacttgcaaaatgcataaacatccgacagtttgaatttatagtgttgatggaagaaatcatttttaatgtgtactgtaaaacttgaaatactcaggagctgagtgaatatgtttgttgctacttacaatcccgacctgttagtcccagtagttttgttttaacatggtctttttcaactttgtttcctgtttaactacagatgacttctgttgtagactcacaagtttaactgttgtattataacagtattacatgtcaacggtgtggttatgacctttatttatataaaaaccaaatatttagtcaatttaccgtgtcttaatttaatctttgtacaccttccatttttaagtgcttaaatgagtactatattgcaataaaatgtagtgatataattaaccagccattaaaaatttacttctacagatacagtgtcaattgagtttatatattaggtacttgcatactttttatgattactatgaaaattagagcaattaaaattaatggtttctacaattaatctgagttctacaacctaaaattgccttcagtttactggcatccctggattagggttagacctgatattgtggctgacacagaaaggcaacaggaaattaacttcattattttcatattcataatatggcatatgagactcaccaggcaagcaaatccccagactggttaaaagtaaaaatttaaaagctgttagctatattttgtgcactgaatctttaatagcaaattgtctacaggctgcagttagagactttgctggaatatccatttctccttttagtccgtgccatttttgccacccctctaacccggggagagtagaagaggtgctgttgctgatgtgggtatggcttgaattcagttaaatatattaaaaagaaaacaattccttcttaaaccactttttcctctaggattgcaaggcacagttctactccagaagaatgaaatgtggttgagcacttcctcaaataggtttatgatttttataatgatcctttaaaatgatctatgaatgatttattagataaattctatacatacaaagtacagattcttcatttagcattgatttacttcttagttttcatctttctgaccatccaccgtcttttaaacctcttggcattttgttttttttggattcctagaatataaagttttctgcagtaagtatattagaaaaacataattcaaaatttttt

SEQ ID NO: 35424 - DNA, 2300 bp, Homo sapien
gacatggggatatgtgaagtgatccccgaatgttcattgtaactaaatccttcatgtgggttcagagctcacactagatcaggtttcttgaatttaaatcccagcacaaatcctggtttggaattcgcttttagcagtatgactttgggcgagtttcattatcttcccttggattcctcaactgtgaaatgataatagatagtacctacctcatggggttgttttggatattaaatgagttaataaacttaatgctcttagagcagtgcctttcacacggtattaaatatatgtaactattatttgttattaagaatactttgggattactttatcactaaaagtttgggtcactccccttaaaaaatcagtggatttagaactgcagttagattttgtttagatagttttctatagatttatttgtaacaatctaatttttaaatatgtagtttccatggccttttctcaggtaacttaattatttgaacatattttgactgaaaaatgtgttttactgccaccataattaaattttattaaaaagtgactagtgcacagacttgtgcaattgtttcttttctgctgcttagctcagtgtaaatctattacctgcatcatatgttgaagtagttttgatgcatgtaaatactgttgcttccatttttgtcttgcctagccaagcttgttgactccttatggtcaccaggctaaaagaacttctgcccataacccaagttttcatggtaatggaaggagtggcagaattcattccatttttttgtggggggagtggggggtgtgaacatgtactaatttgcattgcaagtgtaaacttaagtgtttaatagtaataaggcatgtgttggaaatttgataaatttggtcaagtgtgtggtaagggaggatatgatctcattcatgtgtgatgattgtatatcttaagatacaatttttgacttacaagaaggtatttagttttaaaacaatcataaatttaaggagaattctgctacccatgaagataattttatagtatgactgaaagattaatgcgaagtttgtattgcgtggagcatatttaactagaacaccccaataatgatttagagtattgtttctcatgcagtccttttggggatatggagacttgtctcactcatactctatgagtactttctgacatgctacttcaacttctttctttattcttccatggttttgtggacatattttctcttaatattgtctacatgctagctttcaaggtaatttgtgtcttgggcgagaggtaggggaagtgattgtgagtttagcaaaccctgtgggattagaattgaggaatagctggtttaaaaagtttgaaagccattatctaaaagattttctaaagtgtcagcagtggcatggtgttacttctgttgtttaaaaagaaaaaaatacgtttagaaattagatgtatttctcaataagctattattggcccaagagattttatgaatcagctttaattaataagactataccaaagaacaaaactgtaaattcttaagaaagctgttttgccaattcaatctaattgtgtaagatttcacttagaaatatacaatacagatgcttctggtttaaagagccaggactttggcaagagtgtacagaaattatataagttatatgcaaatttagacctgataaaattgagatctttctctcatgttcttcatacagcctttttcctcttaaaaatatagtgtactctataatgtcttttatttaatttgcataaaaggctgctaggttcaatttccatatttggattctgcaatcttaataaaactagtaatagtgtgaagagttctgtggttaacttgggctattttgcatattgggttcatggtgatgataaacgttttattgagtatttgaactgataggagcagaaataatacatcattccaaaaacctatatgttcctgaattgtttaaggttttcatctttcagtgaatatctcatgtgacttcttttttccttcctgtttctatgcaggtcatggcaaaaccccaaaagatgccgcgtcagttcgagccacgcatccaataccagcagcctgtgggatttattattttgaagtaaaaattgtcagtaagggaagagatgggtaagtaaattttggtgagaaaaatcgtttgctagtttttttgttttggttcataatgtttatgatgtaattggaaagttggaatcctggaaattttgctaattggaaaagtggaatctgaatatttcagtataacagatt

SEQ ID NO: 35425 - DNA, 2300 bp, Homo sapien
ataataataataataataaaagtacaacagaacatctagttgtctgggtaactgagggagaaattaggccgaatgactctgttatttgttctggccagataatcttggccttaaattaaatcacctttggcctaccttcttcaaaacgaaataattttctcttcggcaaaacatttcttatttgaccaaatgattaccatcatatctttggaagcaaacaaaatatcagaatttacatcacacaatttacatatgcaaagcctgattttgccagctagggagggataagctaaacaaagggaagtggtgaaaacaaagtagtaatgttatgatgggtcagagagcaacacttggcaagttgtgccaaattagtcgacgaagcattctattgggaattgcaaagtaggaagtcctatttttgactctgctgatctcggtaaatatttccttgttttaaaaatgggcataattttctgttacctaagaaccctgttatgaaaattaacgagtctataaaatgttctgacgtctctagaagcccttcctaaacacacactataatcttgtattcatacagtgcctgctcctgctttttgaagatatgccggtctttattaatgacatcttctaccactgttaagttcactgtgagtcctcgtaaaattaattaatgaaacagtcactattctaagtgggagactgccttcagaagtggtttctactgcccatatggtcaatgctacggaattaaacactgaagtaccaaaggcaatgcgttcctctttggagggaggcggcaaacgggaacgggactgaggcgagagctagcagcactgcgcggggagcctgagccgctccgcacgccccgggccgacgggtcctagagcgccccggggcctgggctcgcggcggccccagcggggctcgattactctcgcctggacgagaagcggcgcctcggctccgaggagccctacggtggggaggtggggcgacgacaacaaaaagaagtcaagtgggaggggattcgccggcgaggggggcgacggcggccgccaagggagaggaggcggacacctccgaagggacctgcggcgccgggagcccagcgatcctgcccacgagcgactggcgggcccgggaggacgcctcgcggcgcacagccgggagccccgcggcccgccccctcgcaccgctcgcgcctctctcgcgcctccgtcccgccccctcgcctagcgccgcccgcgcgcagcgtctcgcgccggcccggcccgcccgccgggaaacagccgcgagagcagcggccgcggcggccgccagcgcgccttcccctcccgcgctcccgcgtcgcccccgccctcggcgcctcgtccccgggccgcgcgcccgcgctccggccaacgttctctcccggcctcccgggcccgccgcctactcccgcgtctccgagctcctcaaccgccgcggtctccctgggcgcgcggcccgccgcctgcttccggggcgggcggactgggcgcctggtgccggcggccgcagcgacagcgcccccgggaagcagaggaggaaggagagaagaggtggaggtggccgcaggctgagtcgcggccgggatgtccgggcagccgccgccgccgccgccgcagcagcagcaacagcagcagcagctgtcgccgccaccgccggcggccttggccccagtctccggagtcgtcctgccggcgcccccggccgtcagcgccggctcttctccggccggctcgcccggcggcggtgcgggcggcgaaggcttaggggccgcggcggccgccctgctcctccaccctccgccgccgccgcccccggccaccgcggccccgccgcccccgccgccgcccccgcctccccctgcctcagcggctgcccccgccagcgggccgcccgctcccccgggccttgcagcgggccccggcccggctggaggagccccgaccccagctctggtggcgggcagcagcgccgcggcccccttccctcacggggactcggccctgaacgagcaggagaaggagttgcagcggcggctgaagcgtctctacccggccgtggacgaacaagagacgccgctgcctcggtcctggagcccgaaggacaagttcagctacatcggcctctctcagaacaacctgcgggtgcactacaaaggtactgggcgtgtgtcctgcggtgggagtggggcactgacccgacgtggccggccgccgctgcgccgctctcgacccgcccccgacccccgccctcgcgggctctgccctcggagg

SEQ ID NO: 35426 - DNA, 2300 bp, Homo sapien
tctccttctatatgagaaagtactcatttcacagcatcctcccccacaactgaaatcattaatttcttgatggagaaccaccagtcccccttataaaatgcttccaacaaaatgttagacaattctattccttcagctgttcctaagatacggaaagttctagatagttcctaagtgtgctgacagaaaaaaagtacatcttcaaaagtgtttcaagaaagtttaatgacgtctggagcccatttattctaacatggctatcgtacatttaaatagagcttggcttacattgaactcattgttactgtaatataaatgaaagtgttagaacactgtaaatacagtgacatcatgtgattcaaagtgcagtggtttaaaaaaagtcatcaaacaacaggttaaaattaatggatatttctatcaaactacaacagaggccaggcatggtggctcacgcctgtaatcccagcactttgggaggctgaggcgggtagatcacttgaggtcgggagttcgagaccagcctggccaacatggtgaaaccccgtctccactacaagtacaaaaattagctgggtgtgagcacatgcctgtagtcccagctacttgggaggctgaggcaggagaatcgcttgaacccgggaggcggaagttgtagtgagctgagaccacacaactgcactccagcctgggcgacaaaacaataataataataataataaaagtacaacagaacatctagttgtctgggtaactgagggagaaattaggccgaatgactctgttatttgttctggccagataatcttggccttaaattaaatcacctttggcctaccttcttcaaaacgaaataattttctcttcggcaaaacatttcttatttgaccaaatgattaccatcatatctttggaagcaaacaaaatatcagaatttacatcacacaatttacatatgcaaagcctgattttgccagctagggagggataagctaaacaaagggaagtggtgaaaacaaagtagtaatgttatgatgggtcagagagcaacacttggcaagttgtgccaaattagtcgacgaagcattctattgggaattgcaaagtaggaagtcctatttttgactctgctgatctcggtaaatatttccttgttttaaaaatgggcataattttctgttacctaagaaccctgttatgaaaattaacgagtctataaaatgttctgacgtctctagaagcccttcctaaacacacactataatcttgtattcatacagtgcctgctcctgctttttgaagatatgccggtctttattaatgacatcttctaccactgttaagttcactgtgagtcctcgtaaaattaattaatgaaacagtcactattctaagtgggagactgccttcagaagtggtttctactgcccatatggtcaatgctacggaattaaacactgaagtaccaaaggcaatgcgttcctctttggagggaggcggcaaacgggaacgggactgaggcgagagctagcagcactgcgcggggagcctgagccgctccgcacgccccgggccgacgggtcctagagcgccccggggcctgggctcgcggcggccccagcggggctcgattactctcgcctggacgagaagcggcgcctcggctccgaggagccctacggtggggaggtggggcgacgacaacaaaaagaagtcaagtgggaggggattcgccggcgaggggggcgacggcggccgccaagggagaggaggcggacacctccgaagggacctgcggcgccgggagcccagcgatcctgcccacgagcgactggcgggcccgggaggacgcctcgcggcgcacagccgggagccccgcggcccgccccctcgcaccgctcgcgcctctctcgcgcctccgtcccgccccctcgcctagcgccgcccgcgcgcagcgtctcgcgccggcccggcccgcccgccgggaaacagccgcgagagcagcggccgcggcggccgccagcgcgccttcccctcccgcgctcccgcgtcgcccccgccctcggcgcctcgtccccgggccgcgcgcccgcgctccggccaacgttctctcccggcctcccgggcccgccgcctactcccgcgtctccgagctcctcaaccgccgcggtctccctgggcgcgcggcccgccgcctgcttccggggcgggcggactgggcgcctggtgccggcggccgcagcgacagcgcccccgggaagcagaggaggaaggagagaagaggtggaggtggccgcagg

SEQ ID NO: 35427 - DNA, 2300 bp, Homo sapien
ggcaacacagcgagacctagtctctacaaaaagatttagccgggcatggtgtcatctgcctgtagcttcagcttcttgggaggctgaggcaggagggtcacttgagcccgggagtttgaggcacagtgagctgtaatcataccattgcatggtgcactcctcctgggtaccagatgagaccatgtctctaaaataagaaaataaaataaagggtgtgggatttgttttttcagtaggcaggcgtttcacggaatatgggacatcagtgagcaatctaagtttctaggttttcttttttaggttttcttaaaaaaagatgttccctcaagtaactcttaatagaactaatagtactctcaattgtttttttcttacagggtctatatttacgtgcctaacagtagctctgggattttatcgcctgtggatctaataaagtgtctatttaaagtgatttctactgttttgccttaagaataccagattgttggctgggtgcggtggctcacacctgtaattccagcactttgggaggctgaggcaggtggattacctgaggtcaggagttcgagaccagcctggccaacacggtgaaaccccgtctctactaaaaaattaaaacattaggcgggcgtggtggcgggcgcctgtagtcccagctactcgggaggctaaggtgtgaacctgggaggcggagcttgtagtgagccgagatcacgtcactgcactccagcctgggcaacagagcgagactccgtctcaaaaaaaaaaaaaaaaccggaataccagattgttgtccttttgttttcttgttacacatttgagcccagattttgacttaatgtgtattatttatttttatgaaaattgtggacacataaccaagataaagaagtcaggtattccatagccattccttatctcctttctgcttagttgactttctagctgagtggtgcacagtgcatggaagattccacttagccggaccaggaagcttggtctcatctgtggtgcacaccaacagcaaacattgatgtaattctctacaacttaatctttggcacatagaggatttgggggtctccatgttcagggcacaatggctttaataagtgctggaaaatcactgaagctaaaccaagagcaccagatcctctttacctaaataaccagtctttaacatgagctagtccctgtaccatagtattgtttcagctgtagttggttgtcatgttaataagacagctgcacgtctaccttcttttcttttgatttccattgtcttggtaagttattgttagggttatttttaatgtgccttccagccagaaaaatcagctgtctaaagaagcattgcaattgtaatggggactcttacctcttagaatgcaagattttccctcctccctccctcttctccatctctttccctcatgatttgagaactgtaataatcctccactggtggcattacctacctagaaaacctgctgattcttagcatggaactttgcttcagtttgcaggacaaagtctgcttccttccggtcttcatttactttttatacaagggatgcagtcagctctccatgtataagatacctagatgatggatacatatttcataaatgaaatttatgtcattaatgaatatccccttgcccacaaccagctcaggctttcaaaattcgagaatggtcatgccacacagcattctaatctagatggattaattctgttgttcaaaacattctcatacctgcctttatattgaaaacaaattctagatacaactggggttattctggaaaagcacattctcaccttttttttttttttgagacggagtctcgcactgtcgcagggctggagtgcattgtcgtgatctctgctcactgcaacctctgcctcctgggttcaagcgattctcctgcctcagtctcctgagtagctgggattacaggtgcccaccaccacgcccagctaatttttgtatttttagtagagatgaggtttcaccatgttggccaggctggtctctaactcctgacctcgtgattcacccgccttggtctcccaaagtagtgggattacaggcgtgagccgctgcgcctggcccattctcatcttattcaaattactggcacatgggcaagagagacaatgacatggatagaagcttttctgcctttctctgcacacacatacagtgaaggaaccacaggcagattttttgatcagtttggtgaatacattgctcgttgtcactgttccaaccacattggtaaaaaaaatag

SEQ ID NO: 35428 - DNA, 2300 bp, Homo sapien
aagaaagttttttaaaaatatgactagaaatagctcaagacaagcactgccgctttcacattatctaagactccatttcttgaaaacatttttgagtttactgtctatctttgactaaggaggatttagaaggatgagacgtagccgttgcctttgagaacagactggcctcataataccacatcatttgtatagcaacctagagcttacaaatgctttttcacatagattatcgcatttgattctctaaacagtccaggtaaaggcagggccactggcttggttgtttcgttttgttctgttttcattttttcaaatagaagaaaactaaggcctagagaggttaagggtcctgaccaatgcagcgtagaattagggttttagaactgagactaaagcccaggcctccatagtcttacccaggtttccctgtgactgcaccccgttgggaaggagctataggatggtgagcagaggggacgtgctgtggtctaacgctgtgactctcttcattttaaaagcatgcccagcaagatcgggcccttacccagacagacaggaagatcgaaactgaggttgctggcctcaaaaccatgcttgagtcacacaagcttgataatattaaatatttagcaggtaagctattttgtatctatttaaatcaacctgaaaagaaaataaatttataaaataagtcgttgacagatactgcatttcattgattccaacactttctgaaatattttaacatctctgaaattggaaagcatcttacaatttccagtagatgaagtatcatagtttaattggcactttttctttcttagtagtaaataaagtaattgtgtacgttataattgatagaattggaaatttgataagatactataattgaactatagttattagggattttaatgagattcaagacaggaaatattttatggataaaatggaaggtgtttcagttgtaatctttctgcttcaattgcttaaactccttttaaggagttattttactttcgcgatttttgatccaaaagagagaatgaacattcatgtaccaccccccacccaaattaaccattatttcaagtcagatttaacgtcttggattaattaaatattttaaggttacagcattatttaacagtgaaatgttgttctttatattaaattgtgtcttcctgtctctatagtgcatatacatagaccttgtgaccacagaatttttgctattcgaaacttttattgaaaagttttcttagcctaggcaacacagcgagacctagtctctacaaaaagatttagccgggcatggtgtcatctgcctgtagcttcagcttcttgggaggctgaggcaggagggtcacttgagcccgggagtttgaggcacagtgagctgtaatcataccattgcatggtgcactcctcctgggtaccagatgagaccatgtctctaaaataagaaaataaaataaagggtgtgggatttgttttttcagtaggcaggcgtttcacggaatatgggacatcagtgagcaatctaagtttctaggttttcttttttaggttttcttaaaaaaagatgttccctcaagtaactcttaatagaactaatagtactctcaattgtttttttcttacagggtctatatttacgtgcctaacagtagctctgggattttatcgcctgtggatctaataaagtgtctatttaaagtgatttctactgttttgccttaagaataccagattgttggctgggtgcggtggctcacacctgtaattccagcactttgggaggctgaggcaggtggattacctgaggtcaggagttcgagaccagcctggccaacacggtgaaaccccgtctctactaaaaaattaaaacattaggcgggcgtggtggcgggcgcctgtagtcccagctactcgggaggctaaggtgtgaacctgggaggcggagcttgtagtgagccgagatcacgtcactgcactccagcctgggcaacagagcgagactccgtctcaaaaaaaaaaaaaaaaccggaataccagattgttgtccttttgttttcttgttacacatttgagcccagattttgacttaatgtgtattatttatttttatgaaaattgtggacacataaccaagataaagaagtcaggtattccatagccattccttatctcctttctgcttagttgactttctagctgagtggtgcacagtgcatggaagattccacttagccggaccaggaagcttggtctcatctgtggtgcacaccaacagc

SEQ ID NO: 35429 - DNA, 2300 bp, Homo sapien
attcagcaatttgacccagatactttccccaacagggataaaaattatgtccacacaaggtcttatacaagaatgttcataacgccctatgcataatagccaaaaactataagcaaagcaaatggccattaatagaatggatgaccgcttgtggtatggtcatacaatggaatactattcaacaattaaaagcaactaattactgatacaacagcatggatgaatctcattgatattgaagtcagacgcaaagcagaagaaagacacaaggcaatgcatattgtaggtctccatttacatgaagttcaaaaaaagacaaaactaatctatggtcattgaaatttgaaaatagttggccgggcgcggtggctcacgcctgtaatcctagcacgttgggaggccgaggcgggcagatcacaaggtgaggagttcgagaccagcttggccaatatggtgaaaccccgtctctactaaaaatacaaaaattagccaggcgtggtggcagacacctgtaatcccagctactcaggaggctgaggcaggagaattgcttgaacccgggaggcagaggacacagtgagctgagactgcaccactgcactccagcctgggtgacagagcaagactccgtctcaaaaaaaaaaagagaaaatagttgccttggggtggtggtggattgtctggaaaactggcacaaaataactttctggagcaatgaaaatgttctagatcttgactgggtggtatatacaactgctaaatgtcatcaagttgctaaatgacatttatcaactgctaaatgtcacctaagtctgtggaatttactgtatgcaaattatacctcaatttttaaaaattacaaaggactaacattaaagtttgtgccacagtttaatcgttcctctaatgttgtgcactattttcccattttttcacaatcacaaattatgatacaatgactatcttttgtgcatatgtgaaattaccaatattaagcattttgacccataaaaatgacaagtttgtatagtcaaacctagtagatatttaatattttggattattcccattatccccatttttagttaggtgacttgagaaaagtttacaaatttttgttgatactcattgctaaactgctttttctaccaattttataaatgtatactccttttacaaaagtgtcttaggttggtgcaaaagtagttgcggtttttgccattacttgcaatggcaaaagccgcaactacttttgcaccaacctatgacttgaatcctgtttttcagttcttcaaattttgatagacacttatcttgcacatccatatgcacgctcctctcttcccagcactttgtacatctctcatggctcataacacattcttccatcacgtatgtgtacacatatggctgtataggaaaacagcttctggaggataagaacaatttgttttgcggttttttatttttaataaaatctcctagcttggtgccttatgcatttcatttatttattcaactaacatcttccaaattcacataagggaccagttatctgtgaatggtgtaacaggccttcaaaaagtccacgaaactaaacattaccagtttcaaatatacccgacaggtctcattttaacattcatgccccacgttttaagttcccagattgctaccttcccatgtttttggtgctctaatctggaaacaaaaactctgaaaatttagttttgaatgtattatgtgagggcctttccctgggccctgctaataattccttaaaatgctccccagaaccacatgtttggggacttaggataatcagtgaaatctagggcagcctgtcggtctgagacttttcacaggactctgaagggcaccggggtaattcctttttaaggacagcagtgcagtgaaaatgcaaatcgtgacagcaacaagctccttccagttccggagtgcccgcaggctcctcccggtcgccgccgtcgcctagcgaatggggtgggggctcgcacggtccccgcatctcggagcgccacggcgggctcctgccgccccgccccaccccacccccggcgcgcgtcccgagccccgcccgcgcgcccggcaggaaagggcggtcctgcgctgtggcccacgctcgctcccgctgtcggactctgggcctggaccgcgcgtggccggcgccaaaagcgagaggcatgagcgcgcgcccgggccagtgaactgctcggggatggactgcggctcggtcggcggccagaggacccagcgcctgcccggccgccagcggcttc

SEQ ID NO: 35430 - DNA, 2300 bp, Homo sapien
cgcaggaccaggtcactaagcaatgctctaagtggggacacaacgtggacttttccaagccttcagctgagggcagggatggccaagtcaatggtccctccctgttctgtattcagtttttgatcaggcagtaatgtgcatgcaggtcaacaaacatttattaaagctttttgtttttgcttcttcattgataaattactaataaatgctcatttgaaaaagccaaacaaaccaaatatgtgtactaaattgtacatcgtaagaggtaactgtcccttcaattttttttgtagttaacaggttaccacttctagcaattaggtaggcattcttatagacctttatccctatgtttttgttctgttcctatatatccagtttttttgtacagaatgggatcacccacacatacggttctgagccccccttttccatttaataagaaatcaatatctatgaattttatatattttattcttattaatggatgcatagtattacatggtatgaagtgccacattatttaaccatatcactattgatgggcatataagttgtttcaaacatttactattacaaaacttctgcaatgcatatccttttatatctatcattacacatttgtgtgtttctgtatgacagatctctagaattgagatagctgggagaaatgtatgtgcattttgaattctggcaggtattgccaaatgcttaatggcctgccaaaaagaccttgtcttttgacttcatctggaatattattgacttcattcagaatattcccattacaagaaagtggccagtctctccgaggaacaaactgttttccttttccaccatgaaatagatcttatcttttcattagttaatataggtgtaccttcaaatggcaataacattgttctgctttgtggcttctcaagtagtaaacccagaaaacatcagctaccgtggattttattataaatcattgacattcctttggtgattcacaaatgccaaaaaataaatgtcatgttccccagggtttgaagaaagacactgtagcttttggattcagcaacggatctttcaagaaaacagtatggagggatgactcactccccccatggaggctgccctctagttcgtcctttagaggaagcatgaccaagggtctgctggtacttttctctccctctctaagaatttcctcaggagaggaaaaagttagctttcttttctctgctcctgagtgccatggcctgcagtacgtgaccagtccttggcacagagtcactcagggctcatggtagatgcttagcggtcacagccagtagctgcgcagtgtggcagcagctgagatccatactgcagcctgaaagttgtgtttcagcttctgaggttacaagtgtatccagtgtttacatcagagataaagccccctttcccctctctcctacgggagccctcaacaagacagatacacgggttgggtggagtgagaccacatccagcagaggcaaagcttgctaaaagagagaggaggaggagggggagagggaggaggcggcacggcgtcccttggcagctccgtgcatgctgcggcagttgcaacaggagaaccgagtaccagttgctcaacactttatcactttgcattgctctttctcctcccttaagtgaatttccattttgagggtacagctccacaggagaaaggtgtggtggtggtagtggtggagggtgtctgtgggggggatggtggtgcgacgggagttggaatgtccagtgtggggaagcaaaggagtgcctactaggatgcgaataccacttggccctgggctcgctccgctttagccttcccctctcgctggggagaaacaggcggtttgtgagggagactgagagaggggcgtgtttgtggtggtggcggcccatcgggggtccttgtcctctccgaatacccggactgctgaggggaagggccgggggggccccggcggttgccatggtgacgcagggtcggcggctcagcgccgtagagacaaagccgcccgcccgccagcccgctagctcctcgcgcgagctcctcctccacgggaacctccctcccctcccaggcgccgccgcagccggagcggctcccgggccctgggccgccgccggccaggtaaggcgatcgcgcccgcggccggggaggggtcggcgggacgccgggcctccccaacgctggggcagcagccagccccgcagtcctggacggcgccgggccgcccaagcgcgccgaggagagggggcggcaaacttcgggccgagcg

SEQ ID NO: 35431 - DNA, 2300 bp, Homo sapien
agaggtaactgtcccttcaattttttttgtagttaacaggttaccacttctagcaattaggtaggcattcttatagacctttatccctatgtttttgttctgttcctatatatccagtttttttgtacagaatgggatcacccacacatacggttctgagccccccttttccatttaataagaaatcaatatctatgaattttatatattttattcttattaatggatgcatagtattacatggtatgaagtgccacattatttaaccatatcactattgatgggcatataagttgtttcaaacatttactattacaaaacttctgcaatgcatatccttttatatctatcattacacatttgtgtgtttctgtatgacagatctctagaattgagatagctgggagaaatgtatgtgcattttgaattctggcaggtattgccaaatgcttaatggcctgccaaaaagaccttgtcttttgacttcatctggaatattattgacttcattcagaatattcccattacaagaaagtggccagtctctccgaggaacaaactgttttccttttccaccatgaaatagatcttatcttttcattagttaatataggtgtaccttcaaatggcaataacattgttctgctttgtggcttctcaagtagtaaacccagaaaacatcagctaccgtggattttattataaatcattgacattcctttggtgattcacaaatgccaaaaaataaatgtcatgttccccagggtttgaagaaagacactgtagcttttggattcagcaacggatctttcaagaaaacagtatggagggatgactcactccccccatggaggctgccctctagttcgtcctttagaggaagcatgaccaagggtctgctggtacttttctctccctctctaagaatttcctcaggagaggaaaaagttagctttcttttctctgctcctgagtgccatggcctgcagtacgtgaccagtccttggcacagagtcactcagggctcatggtagatgcttagcggtcacagccagtagctgcgcagtgtggcagcagctgagatccatactgcagcctgaaagttgtgtttcagcttctgaggttacaagtgtatccagtgtttacatcagagataaagccccctttcccctctctcctacgggagccctcaacaagacagatacacgggttgggtggagtgagaccacatccagcagaggcaaagcttgctaaaagagagaggaggaggagggggagagggaggaggcggcacggcgtcccttggcagctccgtgcatgctgcggcagttgcaacaggagaaccgagtaccagttgctcaacactttatcactttgcattgctctttctcctcccttaagtgaatttccattttgagggtacagctccacaggagaaaggtgtggtggtggtagtggtggagggtgtctgtgggggggatggtggtgcgacgggagttggaatgtccagtgtggggaagcaaaggagtgcctactaggatgcgaataccacttggccctgggctcgctccgctttagccttcccctctcgctggggagaaacaggcggtttgtgagggagactgagagaggggcgtgtttgtggtggtggcggcccatcgggggtccttgtcctctccgaatacccggactgctgaggggaagggccgggggggccccggcggttgccatggtgacgcagggtcggcggctcagcgccgtagagacaaagccgcccgcccgccagcccgctagctcctcgcgcgagctcctcctccacgggaacctccctcccctcccaggcgccgccgcagccggagcggctcccgggccctgggccgccgccggccaggtaaggcgatcgcgcccgcggccggggaggggtcggcgggacgccgggcctccccaacgctggggcagcagccagccccgcagtcctggacggcgccgggccgcccaagcgcgccgaggagagggggcggcaaacttcgggccgagcggcgccggggcccgcgcgcggagtctccctccgggcaccacgggggccgccgtcctggcaccaacttgaggggctgtgcggcggagggcggctgcggagcgcccgcgcgggctgcacctgctcagggagctgcccctctgttgttgttgttattttccttcttggcgtgccatcgaggcttttgggggaaaaaaaggtatgaaagtatttacctttggactttcatgtttcatggcattctctttgaggaggggttgggagg

SEQ ID NO: 35432 - DNA, 2300 bp, Homo sapien
ttttttaaaaactctttggtaaattaaagatatcataaacaaaatggaaaatacaaatcttaaacttggagaagagatttggcatggatataaccaagaaaggatttggcccagattttataaacagcgctcatggaaaaggccaaaggatatgaatgacaatgctcagaaatatccaatgttcttgaagcatatgttatcaatgtaacataaattaagcaaaaaggatctaatatttcacactcattagataggcagaaatttaaaaagatctggctgggcacgtggctcacacctgtaatcccagtaccttgggaggccaaggtaggaggatctcttgagcccaggaatttgagaccagcctgagcaacatagtgagaccctatctttaaagaaaaaaatctgatcatgctaagacctgctgaggggagtgtaaatgggcatgtgcattttggataataagacggcaatatttaacaatgcagtgtaattactgagctagagtgttggaagactttcagctcccctgcaacattgtttataatcaggaaaaactgaaaagaagcataaatggctaggtatgagatctggcagaggacacatagtgggtctcaaaagaccatcctggctaacacggtgaaaccccgtctaaaaatacacacacaaaaaaattagtcgggcgtggtggcgggctcctgtagtcccagctactcgggaggctgaggcaggagaatggcgtgaacccgggaggcggagcttgcagtaagctcagatcacggccactgcactccagcctgggagacagatcgagactccgtctcaaaaaaaaaaaaaaaaaaaaaaaaagagggtctcgaaaatgttagtactgttttatttctcaagaataaattgtatacagatgtgttcaattccatattttctatacttattttgtatgcttaacattttcacaattaaaaaattaatttggtgaggctgctggagaaaaggtactcacacaagctggcgggactgtcaattgatataactacttccaagagcagattagaactggtggtatagtgatgccactctttttaacctcttggatggacaaagatagaaaggttggataacagtttgtgttggcaaacaggcactctctttgcagatgggaatatagattgaagacacctccttgcaggtaattttttggcaatatttgacaaaattggaaactccccttcacctagcacaatttccttgaggtatttattctaagaaaataagcaattttagagcaaagatttatctacactgaagtttcccatagcaatcacagtattgtttctaatattagtaatacaaaaagaaacaacctgtatgtctaacactaatcgattctaatttatggtgcaactgaacaatggaccaaaatgatgctgttggaagtttttaatgatgtggaaccgcttgcaaattattaagctaaaagaaagtaggttacaagatagcaggaagaataaaccattaaaaataccaatctgtgcactgacaaatgttataaatattttacgttatgttatgttataaacattttataatataaaaaaatgttaactgaagttacttcctggatgaattacaggtgatttcattgtcttctagaattttcttttccaaaaatgttgtgtatgcgtgtaattattattttaataggagacactctcctttggtgatataatttaaacaggacggtactgactgataacctcccggggaaggcagggagccaagtactacagacttgtatgtttccatggaaatctaacgcgcctttgattatcacagattctggagaagagtgaggacttgggttcaccagtgcgttcccaaggacaggctgggcttctgaggaagttgcccaccctctcggaatctggtttggcctccgtaaaatgggcagatcccgctcggatggcccggttcccggcttccttttgcgggtcaacggcagcgtcacgcgcgcgagcgcggtctgcaaagcccccagcgctgggcgtcacgcggggattgctgtcgccgctgccagccgcagcagcgacgcgaactcggggcgcccggcccgggcgcgcgggggcggggacgcgcacgcggcgagggcggcgggtgcgacgggggcggggacgggggcggggacgggggcgaagggggcggggacgggggcgccccggcctaagcgggactaggagggcgcgccacccgcttccgctgcccgccggggaatcccccgggctggcgcgcagggaagttcccga

SEQ ID NO: 35433 - DNA, 2300 bp, Homo sapien
agtccatggaagctctgcaccccacctctacccccaaggccttgccctgtgtatctctttctcttgctattcatctgtatcctttataataaaatggtaacagtaagtatagtgcttacttgagtttcctaagccattctattgaattcttgagccagagggagttgtgggaacccctaaatttgttgccaagtcagactgaagtgagggtagcctggggaccctgtttgtagctggtatgtgagtaagggcagtattattagggaccttgccctttaccttgtgggttctgatgttaaatagggatagttagtgtcaaaatgtattgaattgaattgtaggacacccagttggtgtcagagaattgctgttggaatgcaatcaccaaatagaatcaccttgtggctaaaacaaaggttgcaagaatgcagagggcttggattaaattacttacactggtattgtccatgtggctctcacaaagatttagttttcttattgtaaaagaaaaatacctatattcaggtctaatatgcaatttaaatacacaggaaaaaaacaccttataaactgagcaacacaaagtaaatattagcgactattatgggccagatgctaatataaaaacaaaaatcttatttataacccaacaagagcactgtggccagatttttacccattttcaagtcaagtgagagaaataatgaatgtagattcccaaagctaaagatataaatttggtcctacgtatcttctgtgtgcatgtctgggatttttttcaaccaatttttttccattcagttccaggcagaaacttgacaatttcttctcatgaatcatctttctatggcactattccacacccggcagaaaaattatgtgaggccacggtctttgctggctggcactcaaagaaaacatgcaaaactgaactccatgtggtctttgagccatccctcagatcctgaattccctcagcccttgaacctgagttgggttagtgggaatcccagctgggtgccagggagaaggctgctctcaggacccagcagaaagggatgggacggagcaatgtgagtaaatgagggacatctgctcccgagattttgtggcacccactcatcagaggtaaaatgagcctgtaacatttttaacaattcaagcctctggtggacaggaagctgatctctcaggtccagtatgtgtcagtccaaaggcagttgaagataggtaagatttgataaaacagcacaacaagacaatgagaatatattgtggacaaactgtgtgcctaggatcctagggattagaaaagatgtggaaaacatccaacaacttaattccaacatatattaagtacttcctttttaccagtacagaggatgcatgacatatagtttcatatagtcaaggtacagtcaccgatgtagagtttcaaatgttctatgtacatgcacgcacacacatacacacacattagaagagatgatctactcttctcttgtttacatgcttttcatgaagcccttacaaagaaaaccaagaacaattcctcaaaactccatgcacagcttcctctttgtggatcctgagacttcggatgctgggactaactagccactcaccgagtcaaagctggtgtgcagagaaaaccatttctctcttgttaaatgacctcgcttcatcataaaaccttaaaaagaaagcttccagatcatttgtctccatcacaaaacttataaaaatgagatggaaaaaaagttaaattattttggctcataagtttcagatggagttgtatatttccctaaagggtcaaaaatagaacatttattaaacgacgagttattcaaaaaccggcacaggccccagttgtctttcaaaagctctgatttactgcatatttctcccttgagaaaggccttttttaaatgttcatttccattttaagagactgtgggctttgatctgttgggagcattctttttctttccctgactggggcctgtcggctactcaggcctgtgtttttccatggccttccccagcattcacacggcatctcctgcatctgcgttcaccctggctaatttggaggtcagaactggtgagtccctgtagcaggtgacaccaagaaccaatgagccatatttgctcttcacacctcaacaaagatgctgcttccaggaggtaagagaaaggtgagatgggcttgggtgtccctacaacctgcaaaagctgtcaagtcctcctttaaagttaatttgaaatttcataataaatttaatcttgttactcca

SEQ ID NO: 35434 - DNA, 2300 bp, Homo sapien
accaaggttatctcttcaaatactgctgcaagtaaacagctgtgtgagtatctagacttttgaagttagcagactctagggaataggtagaataaaatatatgggtatgtgttcgcgggagcgcttctgccacgttttattccgaggctagcctgagagatcatggaaaacattgcttctccaaaaccacagcgaaaaacaaggaaattaacaaggcagaatcgcgatgcgagacttgacaaagttgttaataaggcgaaggcccaaagcgctatgccagggcctgctacttcatttgtttcagcgattaaaccagcacgacagggggctggaggcaggtaaaaagcaggctcttgcgtggcccggacagttgatattcctggcactcggtgttcgagatgtttccttacaattgcgtgtctgtgcggctcggtctccatattccactcatttttgtctcaacattttgtggtattttatcacaaaatacgcccggcaaagcaaagatcccgttcagtctctttaaacacggctatcttttctcaggaggcagccgccggggcttcactcctgggccaccagcgacgtcctccaagcgggtcgagcggaggcgcgttcgcgacccaggggcagcgtgccgagcccgggcgtgggggggcgtggcctttccactcggcgacccccggccaccgcccaccccgcgcgtgggggcgtgcgcgactgcggggcgcggagaggggtgacctcggactaccctaggcgcccgcagcacgctctgtacacagacgcgaggcgctgtcctgaggtgacaccggctgcacggcacaagcagcaggcgccgccgatcaactagttcgcaccgaggattcctcttggtgcgtggcccagttttccttaggacgggctccaacccctccctgacaccgcccccctcaccgccacgctccgaggccttccccggggaagcctcgcgtccctcccccgcggctccgggccgcacgcgcgcgattcctcgattccacaggcggttcgcgccgcgggtgggggcggggcgcgcggggagggggctggcggccgccaggggaggggggccggggcccggggggcggaggagggccggcgtggggagttcctcgctcgcggaccacacgctccgcgggccaatcccgagccagcctctagcagtgtcgcacgcgggacacgtccaagcgtttgttggcacggccagtgagggggagggggcgaggaggagggaggggagttgagtgacaggctttgcggggcaggctgggaattgtagttcccagcttccgtggccatagccattttgtagtcgggggactacaacttccagaagatcaaggggaccattctaaggtgccccgggaataggcggctctccccggggccgggcgtcctggggcactcctacccagcagcccggctgcaggtagacgcgaaggcagtggcgggggctggcgtggggcggccgtggggtgagcggcaggcaggggaaagggggtgaggtggagcgacggagcgtgccatgcattgagctagggagcctctctcaattccacgcctgggctcggcgtgggagcgacgcccgagggcttgcctgggaggggttcgtcgaggtcgctcgggtgtctggttggccaggctgcgggggtgccctggactgggccaggggcggtcggcaccaggctaagcgggcgcctggcggctgagcggtgggagttttcggctggcgcccggcggggaattatccgaggagccctaacttgtataaaagcagagtccatttaaagttgggctggatagcctctctctcattggttagggggcttggaaaaaagagactcggcgagccctcgctgtggtgctgccgccgccgccgccgccgccgctggagttgactcttctgctcgcactgctgctgcagcacaaacgtgacttccaacattttttatttatctttcccttttcttttccaagatgtaactacggatcagacactaaggaccttcacgtttcgctgatgtagtttttggaggaaaaaggggggggagtgaagggcgtcggtttttttttgtgtgtgtgtgtatgtgtttcgggggaaattttccattatgagtgttttactaaagtgaatttttttttgtttgcttcgttcgtctttggctctttttttttccttcccaatttcggatttatttcaaggcgaatctggctttgggggaagaggaagaaaagtcggattacaagatcaaccaccaccaacaacaataaaaaccacc

SEQ ID NO: 35435 - DNA, 2300 bp, Homo sapien
taacccactatgaggaaacaggcattaccgagtaccaaataattctagttgtctatttgggccagtggctacagggacacacaagttaggtattagcctactgtaaaataatataacctggataataaaccaagttggattacttgtcgacataatttttctttcaaattttagtgacactttggacttcattgtgtcttccttccatactgtccctgtacagtgataggagctaaactgccactgccctgcacctaagtaacacagagcaagattttccactactagaaacaagtaactgaaaagccacgtaaacatcccaggaaagaaaaaatacagcaataaaataacgtgcaaatttccccaccaccccaccaactgtaaaataacgtgactgaacaatttgtgatgaataagttttaaaacaaaaaacctcataaatccaaccactgtatattttgtgttcttcctacttttttctttgtaattttacgtagttgtaattatagtaaatccttttgaagcttataacaaaaactttttccaatttttaaatcatacactttcaaatcagaaaattagatacttaaaacttacagcctagtggtacaaattctgcttgagctgtcctagaaaatcaaactggcaatttgttttcatgctaactacaggaattactatcttcataaggcagagattctctatttcaaactgatacctgatcaaatagtggtgaagccccagtatcctatctgttattctccctaggaataaccaggcagtggaatgatggaaacggcagaaaatatctctagagcaaaacatgcaactgtttttattgtccaagtcgattggggctttcaaaggcaaatgttttcagttatttaaggtattgcagtgggagtcgtgctcaacacaattaagacaggattacactgcaacttatgagtttctcaaggacatcatttattacgaaatataacaatcatttctcccaaagcctactatcgacaatcgcacccccaactctgctttgctaaggtaataaactaaatggcaactcagcaggcatcccgggcttttgagaccaattgtgggaaacgtgctgccttccaccagctcaagtaataatgccaccttacttataaagaggcatactgttttacatcttccatgcacatgatcttttcagtgacttagttaagtggcaatggcaggtatttttccattttacaaaagagaaaacagaacgccagcctctggtttccctgctcagaagaactaagcccagagcaccttgagacttaaaggagtcctgtgctcttctcagtacatttatcaatgacaagtcttcctttggtccagccccccaaaataacagtcagtaggtacagagccggcacagcaaaggaaagcccccccaccgtagtaccacaaagcttccagaaagagcaacagttgctgctgtgcagcatcatcatgaaaggcatccggccacatcctgctgaagcacccctaacacgacttcaagtgacaaggtggccaaatccacaacgcggtcctccaacaaagcacagctttccctgaatactttcatttctttacataagcactggagaggggacacatgcaccacgctagtaatgcaacaccatcaggagacctggaacagaggaagtgaaaacattcctgcagaaaggaggcgcctcctccccgctccccgcttcccaagtggcatcagaacagggtccagtggcactcctttggggacctacggctccccggccctcacctggtgggaagcgcgacgctccggagcggaaggcagaggccgagcgcatcttcctcctcttcctcctcccacgccgcagcccggctctgcggcagcccccgcccccgcccagctccctcctccccccgccgccccgccgcgcctggagcctcccgcccgacttttgacgtcacggaggaggaggggaaggttccacccgagcccgtccctttgtgacgtcacaatgacaacagagtgcggccgggagcgtcggggaaccgagcgccgcggggggcggagggagggaagaagggctggggcgccggcgcgcggcgggggaagaaccggggggcggagagggggcgcgctgacgtctcgccggcttaacctgttgctctcgagactgcgtcggagcccgcaggcagggccgcgggaagccggccgggccgccgccgccatgctcggccgtgtgcgcggtggggggcgcccgctgcagctgtgcgccgcgcgccccctccccggcacgccc

SEQ ID NO: 35436 - DNA, 2300 bp, Homo sapien
gacagagaccggatctgtttatttacctcccctcggccagtgcccagctgagtccgtgtgaacttccagctgctgacgtcggtgggctctcagcagcgcttggtcgtggaaagggaaagaaaccaaacccggactgctggttcagggcagctgccggccggggaacaggaggtatttgctgaccacagcctcatcttttagtgtgtgacaggcttttgctgtgttttttttttttttttttccccttaatgccacctgtttcaaataaaatccaaggtcggtttgccccgtgtatacatgctgaccactgggggttcaggtatcttgttttgcccaggttttagacctgtgaccttcaaacctgctcaaaccaggacagctggtcaccctccctgggtggcgtttggtgccccacctcctgatagcaattgtcagagcttaggatgtccagccctgtggcccacccctcccttcctagtgtggggaatagaggtttacctttcacgccattttcatcgtcttaggacctaggtctctgcttacgtgcaggggctgcctacactgtgtaccctgggtgcggctgttgaatgccacgcagtggcctgacacccggcctgtggtcatgattaccgtgctgcagccgccactgcctcacccaccaccagccacgatgtcagctgaaccgtggtctaggacacgtgtggcttccgcagctgcttccagagcacgcgttgcgtttgtggtagagatgtcaggcggaggacacttggctttctggggctgagcgttggacctgggaagaggcctttattgccaaacaacacgtgtcctgtgggcatctccccagaggtgcagaagtttattatccatgatgcgcaagaaaacttagctcattttacagcctcttattcaggaattaattccctctgaaagtctggattttgctctagcagttgtgtaaatatttaaacacaaaggggagatttgctagaatttaaacttcaggcctggattgcctagcttcttgtgctctgtattccaaaaaaggctggtggacagcccctggagttggccaccacctgggagcagtcccttgcttcccttcccatgtctttacaggcgcaccagacgctggttgccctcagtttcagcaaatacgcagcaggcttgggcactcagggagtctgttgagggaatccagtcatttaatgtggaattcgttcttgatttgtggagcttgactccgccaggtcggccccctctttgtggaagtcacacagcattgaggaaagtggttttggtgttgctagtagcgctttgtggagcttaactggaccctatgatgctgggggcttatgagttaggcttcttccctaaatgtggttccagctttaccaaggcttgtgagacgagggaagaggacttagtgcttctggagtgatcactgagaacaaagtggaaggtgactgcgtggggaggcttgtctcaagggagcctgggcaccgctgcttgcctgtagtcaaagcatgttctgacccattctttgcccccatatttgtttagatgggacatattaaaagtcacttcggaagctttatataattggcggttaccgtgcttagcataatgtcctccaggttcatctatgttgtagcatgtgtcagaactgacatccttttacaagttgagtaataggccatggtatggacggagtagattttgttcatccatctgtggatgggatactttggtggcttcaccttttggctgttgggaataacactgcataacatgggtgagaccctgctttctggcattctgaggatatgcctggaggtgacctgtcattgctttctgcattagcgtcctgctggagacactctgcaaagagagcgtctgttctgaggggtgtgtgcaccaggcattcgtgtcccagttttgttgggttgaactgtgctctgtggctgcagcaccttaggggtgctgaccagccctttcctgttccctgcagcaagagtactggaggctagtggaagagaaggactgccacgtggcagtgcactgcggcaaggtggacaccaacactcacggcagtggattcccagtaggaaaatcagaacccttttcgaggtaacctgggattctctcgtccaggttcttggggatgtgactgcatcctttccccgccagtttgtaacgtccctcgtcttcccctttgcaggcatggatggaacctcaccgtcctccccaataacacagggtccatcctgcgtcacctcggtgctgtgcctggtaagcct

SEQ ID NO: 35437 - DNA, 2300 bp, Homo sapien
ggcgtattagatatttgaagctgaaagaatctgagaaaactgcagaaacaggaggatcgctctcaccttccccttgcccttctcccctgaggcaggcataaaacctaggaaggatcttctcattttctcctgaagcaggacacaagatcctcatgtgagagacgccaaccctacacatggagagaaaggactctatctcaaataagaagaagatgcagggacacagagaggaatctgaacaaacagaacttgctaagttccccccagttgactgctattacatcatactctttgtccagtcatatttctacacagctgtccactcttcatcaagcctagcatgcaaatacatcaagtttctgtcgctttgggtcttcatttctgaaggctcccatgtcacataaaacttatattaaatttgtatgcttttttcttctttttcttcttcttcttattatttgagatagagtctcactatgttgcctagggtggtcttgaactcttgggctcaagtgatcctccagcccctgcctcccaagtagctggaattacaggtgcataccactatgcccagtggcttttttcttattaatctgtcttttgttataggggtcttaaccatgaacctaggatgggtgagggaaagatatttttcctcctgtcaactgaagaatgaggttcataaatctggaaagaagagctttatttctcatgaagggttgcagcctgtagggtggccatcctgacaagcagggaagcacagcctcaggccagaagccagacacaaacactttgagggaggggcagagggaacagaaattgatgctaagcagggtggccacatgtacatattcaataaactgtaggaggagtcatgaatatttatgaaaggagaaaggtgcacacatgcaacggagcttcatgctccttcatgggactgatgtacaaaaaaatggtggcattagcaagatccaagggtggattgctgccctctgatgtcaaaaggtgaagaagaccagaaaacccttgctgtgcagtctctgtagactggcccgaaccattccgtggtcggtggtctcttatgggaaaaaatgctggtcagttatgcgaaaaccgcaaaagggagaagcagtgtctggtggttggttgaaatcagcggtggagtcttttgaaagggctgtttgctccttagcccttgggtgagaaagcctaatcatggttagccagggaggggggcatatgagaggcatgtctgacctcctatcccatcatggctgtgaactcagttttcaaggttactctgggtccccttggctaagaggagatctgttcagtcagttacggggcttaggattttatttctcactcccctacataaatacgcacacaagataaaacactttcctctttgctggaatctcttaatgttgatggtcaaaaggtcctatatttaccatttaggatgttaagaatctaaaatgatccagcaatattgtcaaaggcattagaaccagagcaactccgtcttgaatagaggctgggtaaaaggaggctcaggcctcctgggctgcattccaaggatggttaggcattcttagtcacaggatgagataggaagtcagcaggactgttatcacaagatacaggtaataaagaccctgctgataaaacaggatgtagtaaagaagcctgccaaaacccaccaaatccaagatggggatgaaagtgacctctggttgtcctcactgctcattatacactagttacaatgcattagcatgctaaaagatactcccaccaatgctatgacagtttacaaatgctatggctatgtccagaagttactctacatggtctaaaaaggggaagaaccctcagttccaggaatccccacccctttcccaaaaaactcataaatagtctaccccttgtttagcatatgaccaagaaataaccataaaaataaccaaccagtagcccttggggctgctctatggagtagcttttgtttctcctgtaataaacttgcattcactttactctgaatttgccttcattcttgaacaagatccaagaaccctctcttggggtctggattgggacccatttccagtaacatcttcctggcaaaccaccaagggacaacactggagaaaccccgacccaaaagaatagactgcagcactaattggccaactttgcgtaagtagtattttgtccagggtaaagaacagaattgggttagaggcccaacttagcagggttagaatccctcctaagaaacaggcagttaaaggtct

SEQ ID NO: 35438 - DNA, 2300 bp, Homo sapien
agctcccttcccatggaagaaaacatcaagagtggggaagaggtggtcccccagctacaagctaagtcctttatcttatttaactcctgcaacaagacatttactgggtgtctgttatgtgccattcactgttttcattgctggggatgcaaagcttaataagacagagcagtttacatctgggcctgtacttgtgctacttacctcactggcctcatccaatcccagccctaacagatcctgtgtatttaaaattttgatattttgttcatcacagattttttttcattaattttgaattttttaaatattgtattaaaatattacttatcttgattactgagctttttggctcccgtaaattttgtacctgaggtgaatgccttatttgtcgtggttttaaaatatgtttgtaaacaactaaattaataaatagcaaataattattgaataaattttctaatgtgtactaagttgagaaacaggctacgtgataggaagtgattgggtgtgtaacttgaatggtaagtaaaacctatctaatgtgatgctatttaggatgtgacccttatgttataaggagccagacaagggacagtttggagaaaagtttgtgaaaacaccacaggtggaaataaacctggaattttctaagaacacaccaaaaaaaaaaaaaaaaaaaaggctattatgtcttaattgtcaaggacatgataggtgactagtaatcaatttggatacagtgctagaaaacattcaaattttagggctttttaagggggtaagtagtttgaattttattccaagtgcccaggaggcaattggaagattttaagcaggggagcaacgtgatccgattgatcttttaaataactctttctggctgctgtgtcaaggatggattataggggtgtgtatggcaaaagagtagaatctggaagaactgtctgtgttcccattgaaagaggatggtgccttcgaccaggataaatatagtgaagatatagaaagagaaggaggttccagaaatacttcaggagtagagttgattggatttgatgggttaatatggggaatgaggaaaagaggggaaccagaggtgatttcaagtgtcttaccttgagcaaattggtggatggtggtgtcatttactgaaacggaaaatacaggatgagcagattaaaggtgaacatgcaatgaatgaaattttcaattttgtgtatgttggtctgagatgccttttggatacatgttgtatacatgcttacatgagtaagcaactggtatgaattgacggagagggaggaaggacagggcagaagatagagctgtgggagtcatcggttccttgacagaatttacagcgtggtaatggatagactctatgctatccatctatggaacaacacatctggagaagagagaagagctggggaggctggactgtagccttgggagtggctattaaaataggagaaggggtggagcggaagggagagaggaactatggagtgcttagcaagagaagaaagtgttttaaggatggggatgataaactgcattgaaagccactgagaggtggagaaaaaatcagggcagagaagtaataaaaggcatcagcaacatggaagtcactggtgactcgcgaaaggcgatcacctttggtgtgtagggcacaaaagcctgggggggtaaagagagagtggaaagtaagaatgtcgagacagtcgactattattgccattttatgaatgaagaaaccgaggctcaatatttgactgtctcattcaaggtgaaagccagtggggtcagatcctggacctagaatccatgcaatgatttgtgcacatcgcctattgaagagagagatccaattctcttccaaaacgtaaaagccaacacttccctcaaaggaggcttcgagttaaatcatcctttcacgatgccgcttccattttaaagaaaaaaaaaaaaaaacgagaaggcctggtgcgggataggaatgagccgaggagctactggccctctcggtcgggggaagacccgccccttttccgcagcccgagcccggcgcagtccactgcggctgcgcgagcctggcgcgcgcggggcgggaacgcggaaggggctggggttgcggcgcggcggcgaggaccagaccgggggcggggccggtagtgggagtgcggggcgcgcggtgacagcgcggggttggcggcgtgggacccagggggcgacagaggcagcagcagcccgaggcctgaggagaggagaccggcggcggcggcaatgctggagac

SEQ ID NO: 35439 - DNA, 2300 bp, Homo sapien
accttcccgaagccttcatcagaagcgcagcaagatactggtgccatgtttgtagagcctgcagaactgtgtgctgaataaacctctttcctttataaattatccagtctctggtattcctttatagcaatgcaaaacagactaccacagggtctcaattaattcatattaatctctattattctagagtcctgtgttaatacaacaatgtcctcaatatcagcttaagtgcatagagctgtttgtctccatttcttttcttttctctttttttggagacagggtctcactcagttgtctaatctggagtgcaatggtgtgatcatagcttactacagcctccacctcctgggctcaagcaatcctcctgcctcagcccctcaagtggctgggaccacaggtgcttgcctcttttttagtcccagatttctgcgtgtttgtctgcatcttctctctttgcctggctgtgacttctccctgcagccatatgtctacctttcataccccttatctctgttagtgattggaaagttgggtccaagtttgtgaaaattttttatttgttaactaaaaatatattcattctggtgaacatctgacagtttaagaggaatggatatgagcctttttattttttatttttcgctctgcctgttccagattatatcttattatcaattgatgtataatgcaataaaagctttttataaaccataaagcattaatacagctataaagtagtgtgagtatctttactgatttttgtgcaacctgcatttcccagctagccagccatgcccaccccttctaggccctgaactgaaggcacttatccacctactggttatctttattaagtgactgggcaaatagattgagatggtgccagtagtgtagaaatagattgtaccaggatcttggattttatgttcaggagtcacagttggctcatttttgcaacaagttcgactgagcatcctggccactatgctattccaggccccaggcttgctggaagcattggggcgggtgtccaggtggaactctgtaatttccctggaggctggtggggcctggggcacctggaaccctcagggcagtctcctcctgctgagagcagccttagtggtttatctcagtttgctgtacagatttcatgcgctgtgtatgtcatggtgtgaaaaatgctgagaaggccggatgttaggtggttatactgagttgcaagttgttgcattgaaggttatggatggcgtgtcctctaccctgcttggcaggctttgctgcaaatgcattttttgtccttgtcacagtaaacagagacatctatatttgagagttcactctcattaagctactgatttagttctctgtgagacaaccaggctggtcctaatatatgaaagtgttttaatagttaaattcattcaggctgggcatagtggttaatgcctgtaatcccagcactttgggagatggaggtgggcaaatcacctgaggtcaggagttcaagactagcctggccaacatggtgaaaccctgtctttactaaaaatacaaaaattagccaggcgtggtggcgcatgcctgtaatcccagctactcgagatgctgaggcaagaggtaggctgaggcaggagcctgagcttgagcccaggaggcggaggctgcagttagccaagatcgccccactgcactccagcctgggtgacagagagactctgtctcaaaaaaaaaaaaaaaagttaaattcattcattggacacgtatttcttgagcacagacaatgtaataaactctggagacacaggttgaataacataagactcttcctccagtgggcttgggagggagatggctgggtacacaaacagtcaccatctgatgtgatgaaagccccgcacaattctgaccttcataaggggacacttaccctgccctttctctcctgttccaaacacgacatgaacatagcatgacaagattctcaatctcgctaaacacctcatggtatgtttgacctcctatgtcatagttctttgtgatataacagcttattgcatgattgaagactcatgggttcattacattgcttatcctcctatcctatctgcagcctctagtccaaggctcccaagggccccacgatatctgatgcatcttagcacagagcaagctaatgccgactcatgccacatccccgttacacacaagaggtcagagaggaagcagggcagagcagttttcctctgagccagacctcagaggtggccgtggtatttttgttttcccttccacca

SEQ ID NO: 35440 - DNA, 2300 bp, Homo sapien
agcatgaggtgtatttataagacagaaagatgtgagagtgcacctgttcctctgcaacagtgggggttaggacttggacagtttacagttttactcggtcagctttagcaaagaactgtgtgtgggaggatccctcctttttttttagccttgggctctgatatcgtacctggttgttcggaaataaaggccactaacagatccttgggactcgtgaaggggggtagggacaggaaaagtcatcattaagcagtgaaggcactgaacttatagctccccttacatacacggggacattcaaatgcttttgtgaacgttattatctttgctgcgcttcccaacaatgctgggtggagacagagcagatattgccatctccattttactgttgacaacaccaagcttcagacagatgaagtaagttttctctttttttttctttcgttgttttctttttgttgttgttgttgtttagagacagggtcttttgctctgtcgcctaggctggagtgcagtagggggatcacagcacactgcagcctcgaactcccaggctcaagtgatcctcccacctcagcctcccatgtagctgagactacaggcaggcgccaccacgcctggctaattttttgtattttgtgtagagatggggtttcgctgtgttgcgaaaccgggctggtctcaaactgctgggctcaggcgatcctcctgcctcggcctccaaaagtgctgggattacaggtgtgagccatcgagctggcctgaagtaagtttgctaagtttccacggctgaaacccacatcatctggctcctataaagaaatcaaaaaggtaggctatgtaatatattggcaaagaggaacaagcggtaaatgagtgaagggttgtagacctttaatagctaatattgcagtaatgccacctgttaggtcaggagatgagcaccttaccttaagacgaggacaacatctggttgcctgtgagaagggacaggcagggtatcaggtgctgcacaaatgtttaatgaatgagtgagataagacaggaggtagaatgagcaacctgagagagggcctggtaccctgtaaggcgttttgattcagcagaacgagtaaggagaagcccttccggagtgtaacacaccagcactagaccaagacacctggctcactggtcagctgcaaaaactttcatactcagattttgtttttctcaatgatgaggtcttaataaggaacaacaattctgcctccaagcaacccactgtggctaatcctggtggaaaagagttttctttttctcttttttttttcttttttctttttcttttctttttttttttttttttttttttttttttgagacagggttttttgctcttcttgcccaagctacagtgcagtgacacaatctcagctcactgcaacctccgcctcctgggttcaagcgattctcctgcctcagcctcccaggtagctgggattacaggtgcccgccaccacgcctggctattttgtttttttttttgtatttttagtagagacgggggtttcaccatgtttgccaggctggtctcgaatctgacctcaggtgatccacccatctcggcctcccaaagtgctgggattacaggcgtgagccaccatgcccggacgagaacagttttctttaggctttgggttgctccttttcctttttgctttcacaaccgaaatgcgtgctcagagtgatccaagatatttgaagaacagtggcagcttggaggtgtttaatcaccgtaaattcgagacggcagaaaggcgtccccgcctggagccccgggcgatcgctcactctgagcagcgtcgcccagcggacagaggcggctggtgtgttccggggtctccctcccttcccgcagcactcggcgcccgcaagctgccacctcccggggcggccagggaaactcagccggctctgggaggcgggggccgcggtcgaggggcgccgctattggctgatcgggcgggggaggaggggcagggaggccgtgattggcggggacccgagctgaagggggcggggccgctatatcagcagagtccctgtcgcagcgcaggcagttgggctgctggagtgcggcgccaccgcggaggacaggggcagctggcgggcagcgggtgagggggtggcggggacgcgagtggcggccgcggggccccggacaagggtccgcagagctgcagccttcgagggccagccctctccgagtccggggctgggtcccaccagtgacaaggcggcagccccgcgcacaccaa

SEQ ID NO: 35441 - DNA, 2300 bp, Homo sapien
gtcaagtgaaataggacaaagagtccaaagtcagtccgtggtctccattcggagaaaaagggcttgggaaagaatatatggagtttggttttgaatgagccaaaattgaggtaccgaagaacatccaggtggtgaagcctataggagattggacatttttcatgtgattcttaggacagaagctggcactgagactagagattggggtatcatttgaataaaggtgagaattttgtctttatgtatagagttccttaagattctatcagaatccatgtcaagatacaatttttctgattaaaataatttcttttaaaacactataatgcagaaacttatgtgtaattattttatgttttgtaaccttaatgttaccgaacttgtgttaaataagtttatcttgtttgggtcacaacttttattccagagaaacgcagttcttattttgattttgccttaatactgatgatttttttttgaagttctttaatgttaagcattttcagtgtgacttttaaaattgctttccttaaaagtgactgtgaaattgctaagtaggctgagattgatgtcaggttatccccaagcataacctcactctcaccttgctttgcaggcatatctttttcttgcacatcaaggaggccctcttggcaggccacctcttgtgttccccagagcaggcagtggaactcagtgccctcctggcccagaccaagtttggagactacaaccagaacactgccaagtataactatgaggagctctgtgccaaggagctctcctctgccaccttgaacaggtgaggctgttgaatatagtattgtttacaactagaataggcttaaacaggatgaaactaaggttggaaggtaaactaatcacacataatatgcagttttatgtacatttttgagctctctgatgttcgaggcacttaagaagtcatacataatatacatgttatgtcaaatactgtaccagaggaatagaggatttgcatgtgatacagaccaaagggtatccaagcaaggggacagaaagaatggccatcaggacagagggagcagcaagaccagagacaccagagcatgaacatggcagcatcagggctactgcatatattcatagagctatcaaatgtataagcatttccaaaagaagatgaatctgtggtacatacacataatttgtgaagttaagactgggccattgcccaatttaaccaaatattttcaaaaaatttgttagccttttatttgaaaaatatgtaaacacaatatgaaatgctatataaaatgggaattttttaaatctgtgcctttaagtacaaatctcctaaaataaaaaatctattatgtatattggtgttttcttcatcccagcaagaattaaaccaggagatctaacataggcattttagttatctattcctgcataacaagttaccccaaaacttagtgacataaaacaacaaaaattgtctcacagttctgtaggtcaggaatctggccatgtcttggctgggtcctctggctcatgagactgtagtcaagctgcaggtagaactctgtctcatctgaaggctcgactgagggtggcctccatgccaggttgactcctgtggtttgttggcctacctccttccctggccacaggggcctcaggggtcaactttatacttataaactatatgtggacaaatgcatgagactttccaatatgtaaatttgacttatgtatatttttagagactttccataattcttccaattcatcacccatccagcatccccaaagtgtttttaccaagtatttaatagttgagatcccagtgtcttagacgttttttatagtaagttcgctaaatacatgaaacatcagtaatacataagttttaagttgttgtgattcatcagtgttagtatatttcactcgtgaagactacataggtttatctctaaagctaatatctgtatacttaattctctgtcctcttggtgtcctccagcattgttgcaaaacataaggagttggaggggaccagccaggcttcagctgaataccaagttttgcagattgtgtcggcaatggaaaactatggcatagaatggcattctgtgcgggatagcgaagggcagaaactgctcattggggttggacctgaaggaatctcaatttgtaaagatgactttagcccaattaataggtaagccaagacttaactttttttgacctaagcatgtgtatacatctgtagctgtcaatgtaatagaaaataggaagggatttactcgaca

SEQ ID NO: 35442 - DNA, 2300 bp, Homo sapien
aaagagcaaggacaacctacagaagcttctcctttaagaccatgtatgaaacaatgaataaagccctcatccacgctggcagatgcttaacaaggtcagtttctcttccctttaaggataataatttaaaaataatcataccatctagtaattatattttacctctatttaatctttaaaagatcagaattaggtttcctttccgtacttcacaaataagcagcacatctggccagctcccaagaattcgtcaagggttataaacattgcatgggctggactaattgtggctactttcattctctctgataagtttcatttccttccctgaaacttcatgaacttcctttggggtatagctaatgaaaccatgtgggatgggctgagacctttatcatcttcagacatttgtgttaaattgaatattgtgatgtatcttttatggtcagccttatcacatgctagctcaaggagaacagttgctagctcagttcgaggctgcagaaaaatggaagagaatgaaagatgattcttgcctttgtgcagttagcattctagtttgaaaatacaaacacaatgcacataatgtaacatgtgactacaaatctgtaactaccatgcattgagcaactactatgggacagacattgtgcttacataaacacacacactttaattctcacaaaaaccagggaggagatagggttaaccccccctcctgcccccaccccttttatgagaaaactgagacttagagaaattgactcccctaaggtcacctagctagacagtggtggaaccaggtttcaaactcaggcagagatgttccaggacaaaagcagcttcagtgaatagttgtagcaagttttaaggactgagaaatttatattgaatttttctgcggccttaggcaagttatttcatttatagaagcctcgtttttccttatctgtgaaatggctctttcttcattgggttgttctgagagtgaatgagatgatgcatgaagcccggcagcacatttcaaatgtataataaaaggtcggtaaggtcaataagtgaatcaatgaactcacatcactggtaacccctcgaactcacatcactggtaaccctcagaggggactcaggctcctcaaatctcaggatctgcgtcgactacagacctcactgtttttcttaaacaaaaatcctgaaatccaggctgggcgcagtggctcacgccagtagtcccaacactgggaagctgaggcgggaggattgcttgaacccagtagttcaagaccagcctgggcaacacagtgagaccttgtctcttaacaacaagtccaaagggaatcatggcctccacaatcccagtacagctaaacagttaactgcccacgttcttttccttaattctatacaacctccctggggtttctggttctttggcaagtgagagacgtgctcctcaacactgggtgagcacaccgggcttgaattttaaaaaaggagaatccgccgggcacggtggctcacgcctgtaatcccagcactttgggaggccgaggcaggcggatcacttgaggtcaggggctcgagaccagcttgggcaatatggtgaaaccccgcctctaggaaataatttttaaaataagctgggtgtggcggcgtgcgcctgtactcgaggaggctgaggcatgagaatcgtttgagcccaggaagtcgaggctgcgatgagcggcgatagcgccactcactccagcctgagcgacagtgagactgtctcaaaaaaaaaaaaaaaaaagtaaaagctctcagggagcgacttttcccttggataaggcagccacacgctaagtcccctctccatcggggaccctggggacaaacagaacggtgcgcatttccctcccccgtccccattcggtcactgccacgggctgtacacctgagggggaaggacgggggcggcggcgcgaggaggaagggcttcgccgccaatctgtccctaaccagtctgcctctcaacccctgcctgaggcggaggcggtgcccggggcgggccaagcgtgaccgcgggtcggcggggcgtgtttaagaccgcggcgtgcgcacccggcccacgccagctcccggccgcggcacagcagccccggcgctccccgcgccgccccgcgcaggcgcccccgccccgccgtcgccgccgccgcagccaggagccgctgcaccatgccccgcatagatgcggacctcaagctcgacttcaaggatgtcctgctccgacctaagcggagcagcctcaagagccgagccga

SEQ ID NO: 35443 - DNA, 2300 bp, Homo sapien
agaggtagatggatatttgctttataacaggttcatttaaacaataattgaccagatttctttgaagaaagagctgcctctttaccgtaagagccaatttttaagttacatataaattctctggcatcttagataagagcatggagctccgtaatcaacccatctggacttaagatctggagctgccactatgaccttgagtagtcctatgtcctttcaatgcctcagtttattcatgtataagatggaggtaatattagaactttcttatagggctgctgtgaggatggactggagtaaaatagtagatatactgtgggtagaatagtacctggtgtatggtttgtatcttttaacagatgctatcaagtaacttatccctcaacaggttgattgttatggtcatgttttatgatggttgctcctgaaccatacatgactagaaatatgtaaatatacctggaccttggtctttggacccaccctgtagacatctacggctctgcaaagccaaggagccttttatttgtttttgctgaattttaaattctgaatttatcacaactctctgactgatgggatgcatgtgtggtttttttttttttagattgttgtaaaatgaactgatgaattgcatgcataaatgtggttatttgtggtctgagtaaaaataaacaaaaacctgagtgactgaagtattatgcctcaggaaaaacagccaaaaaagtcccagtgggggacaaggtggaggagggaagagtcatcacagacacgatactcttgtaaaatatggaactggattccttacattttattggctgtggattagagaggtgttctttaagtggaaatgtaacctaaagttacatgcaaaggtaagcctcttaagatctacaagtgtcagctgaatgaaaaaggtagggtgggccaggcacagtggctcatgcctttaatcccagcactttgggaggctgaggtgggtgaatcacttgaggtcaggagtttgagaccagcctggccaacatgatgaaatcctgtctctactaaaaatataaaaattagccaggcattgtggcaggttcctgtaatcccagctacttgggacactgaggcaggagaatcgcttgaatcctggaggcagaggttgcagtgagcccaggtctcgccactgcactccagcctgggcgacagagtgagactccatctcaaaaaaaaaaaaaaaaaagagaggaaagaaaagaaaaaggtagagtgtcttactgctactttatctcttagggatgatactcattttaacggttatgtgctaggctgaaaatcctcacatttagatctttggggaaatagtttaattgcaaatgggttgagtacacgtgcattttttttaacctgtggtgttgaaagggagtcatttgtgataacagaaatatctcaagaattttattgtgaaaaaacaggcagcaaaaagtcatatctcttggtcaatatgggcagcttattgagaagagacctaggtttttataatatgttaggcaagtttaagtgtcttatgaatactaaaatactgacgaagtagcgcaaagtcaccttgaattttaagcgctgacattttctatgattgcatttaaagaaagcttataagcattatctaaacattttgcatcaataatggcctcattacagtcctcacgattgacggctcaacgtaggcagaaaaatagtatcattcatgttgtactcttttatattcattcagtttttttcttaaacctacattatagttctttctggttctagttattttataaatatgatacagctatagcaagttatgacctaacttgttcacagtcactatttatgtaaagaaatgattcattcatttattcattgtgaatttttttaaaactactgcatggtgctgtgggaatggaagtgaataagagctaccggaaggcagttattttcttcctggtcaggcaggggaaagaagaaactctctgaaataatgaatacgaatagaatggggttctaacagtgttctaacagtgaaggaattcagaagagtgacgctgagtaggagtgatcaggaaagactttgaggaggagggatcacttgagttgagctctgctgactagattgcatttctgtgggaagagatggatggagcatgaggaaggccatgtgtgtgtctgggacataacaagccaatgcacggtatgtaactgaccaggacattttgactgaagcctaggtgctggtggacatctgaatttctggattcgagcagacagtagag

SEQ ID NO: 35444 - DNA, 2300 bp, Homo sapien
ccatttttggtgtatattattgtataaaatgtcctataaattattttctggtatattattttgtaagtttttgcagtgaatacgtgctgccttgcttgtattcttgccttcttccctctgatggaatacaagttatgtaaactctctgtattatcctaactagtgcagcaacacaaatacttttgaaataagaaagcatactcatgcaagagtaaagtaatcttctatggcatttacatcatgtttgaccctcctctgcacttcagcaaactaggaggaggttgtaacttggactctataaaaccttatctgccaggtgatatgtaaacaggattgtgtgcacacacattgtcatataggcaaacactctcccaactggtgagctcataaaaagcactgtctgtaaatttatggtacctgcacctcatttgagaatcaagtattttgatgcttaatttgagatgacatcatgatcctccctccctgcttcctcatccttaaagaagtactaagattaaatagaattttgtcaacttctacttaacttggccattatttatatttgtaactcaacaggcttcttggtggagggactgtgccttctaaagatctgaaagaccttatagtgtataacagcttaccttccttctctgtacgcacagatcacatgtggggaaaccaaggactacaagaattccttcttttgcatatcagtcctcggcaggcaatcaatgcttaaataaatgcttggtgaatggattagttagaagtaagaacattttggctactgttcattactttgaaaagtgctggaaagaagtggaagttattttcctttccagctgggctgtgctcttaaaaatagtgagtgtgtatggatgaaaataatcatgagtaccgagatgtgttgccatgtacccaaggataattggctcacttacctgtttacggattattcacattggagatcatattcatagctccagaatagtttctttctgacatccaatataaacctgggcctccttcttcctactgttacctggcgtgagcttaggaaacccaaactaagtttaaaatcagcctaagcaaatgtgcagatcagctccagtaatcaaagactgaaaatcagtccagcattcactagtttggggatgattttatagtaaccctgctactgattttaaaaaaatttttttttctgtttaatgtggataattggtaattaccggtatttaagaatataattttaatggatagggctaaaaaaatacgttagcagatcgagtcctcaacttcttccgtttctatgcataggttttacctcacaaaaactactacaagcaccaagctccctgatggaaaggtatatggaagattcattcattctttctttcattcatccattcacacattcactcattcatcatacaatggaaaatttttacttaaccatgtgcaaggaattgtggcaaaatgaaaatgagatgtacattcagtatttaaataaagtttagtggaaagtttagtgaatataaatgcacactttacactttttttctgcattttttcctttcttctattccattggactggtatgctaatagctgtgcactttcatcattgtgtttcaagttgcatgttgatagataatatatgccacattaaaattaggctttggctcaattactattcaatccatgcccattttcacctgatactccttgtagttaccagcatgtgtttatcagatgattggctagaatcattggagaaaagaatgacagcggctggctcaaatggggagaccatcctcttaatttgatggaagggatgacctttttgtatgttggcctccctctgagccttgttgagtaaaaccagacctgccttttgagctggctgggatctgtgtaattctcatacaacagaatgccgaatgtgatgttcttaaaatttgtatttcggtgcatagacacttaaggtggacttattttttaaagcagtctattctgtttttcattttggatttcctctcctgcactccctcgaccattgcaggagcatcgtgcatcaagtcaccagggtggtccattcaagctgcagatttgtttgtcatccttgtacagcaatctcctcctccactgccactacagggaagtgcatcacatgtcaggtgagagttttgcgatgctctctgttttccatctgaggataaagtcctgacctggaaaattgcctcctagccatgctcccttactttgttggctgttgaatatcattttctttgcaaactctgt

SEQ ID NO: 35445 - DNA, 2300 bp, Homo sapien
gaataaaaacatcgcagttaagccaaaaacatggcaaccaatattttctgttataaaaatatttgagatgaatttagtttttatgaaagctgtctgaaactgaaatgaatagcagaagctttctgtttattcacagtccagtaataataatacctgcagcacaaagcatacgtcttttctatataaagccaacaagcttctgctcctttctgaagtcgtctttgccaagcagggtgttgggggcgggggtgaggataggggtgaggggacattttacccggttatgctcttacgtactaaccttcaccttgacaaagcttgtcaacgaaaacaaaaccagtcagagccttttcaggaaactgatgttaactgtccactagaggctgtaatgagaccaacaatgtcactttagaccaacccgaggtttaaaccgtaacaataatcgatttttaaatggaaaaaaaaaagttgtagaaatgagtaagagtgaacactagtagttatacttaaatagccacatatatgtgcatggtatttcaaaaatgtgagaaaaaaatatttccggggctctgcaccttcctcgctcgtatgtttatttttatttatgaagcacgtaggctcttgcaggccagagttgtgtaaaaactgacactttttttttggtcatcctgtgccctgcctcagttggtgactaaccgttaggtcataagtaaactcagccaaaagatctctcaaatacagcttacagtcaagattggtggctttcagaaagaaacttacgcgaaaggatcatgtttccagacacttagttctaagcacctgaagaaggtcaaatgtcgcccgacacctaccggccttccagaatcatctgcaacaagaacgccgcactgagcgcccttagtctggaggcgcctcctagtcctccaggtgccacacctgttggcaaggtgcacccatccgaagaagattccttcgcgtggaggtcacacctggcggcgagacaggcggaggggcggggtggtgggagtcggagaccgcactgaaaccctgagtccagatttaagttcctcgtcgattctcgagaactgccatttgatgctccggttgctttctctgtctcctacactggttacctcatttccgattaaattaatgatccgaaattagctgcgagaggagtgcgcgggtctcctttccaggctagagcggagtagttccatatcaaagccgatttccggacctgcgtgcgaagagagaaagagggcagggtcgggcggtcgccagcgttcgccggcaggaaaggtgagggtacctgtgcagtcgggggaccccttgaaactttccggagttgcacgcagaggcaatccccgcggcccccaggcctgggttccggaacgccgaagcgacgccggtttgtggcttaacgtgcagctgatgatcagagtgagccctctcagatgctgctccgagcgcctgggaccaaggacacgtcgggattagaatgggccgacctcccctccccgctggggtgttgcatcggctcccagctgaagcctgacagcccttgggggagtcccccaggttgcctgagtagcgccccgttgtcgttcagtcccctccaactaggtgcagggacccagggaggcgcgcgaggaccgacccgtcaccgctcaaattacctcatcgcccagctccccgcccccttcccaaacctggaaggaaccttgccctccggtccgcgtctcccctcccccgcaccccatcccgagccactctttgggaaaggtgcccgcctccccgggcggcgcgcagcgaagggttaagggcgcgggccggccgccgcgcggtgcgctcgccgtgctctgtgcggctcgccgggccgcccgccagagggtgccccccacccccatgaagtcggatccttgagctgcggcggcggcagccaactgctccatatttggcttctattacacatttacatactggagcgagcgagcgagcgagcgcgagagagcgcgagggagggagggagggcgggcgggcggagggaggagggaggggaggggagcgggaggagggggaggaggaggaggaggaggaggaggagagagcagagtataccgcagacatcatttctactacagtggcggagccgtacaggacctgtttcactgcagggggatccaaaacaagccccgtggagcagcagccagagcaacagcagccgcaagacattgtttctctccctctgcccccccttccccacgcaaccccagatccatttacactttacagtaagt

SEQ ID NO: 35446 - DNA, 2300 bp, Homo sapien
taagaagtaaaatatacaagttagtagctagaaacaggactctaatctaattgcagcattttgaacttggcagtcctctgaaagtattctttaagaaaatgattgaactggtaacttctgtaggttgattttgttgttgtcaatgtgttgttgtttccactggtaacacctctctaagcataaggtgatcattgttttatatatatatatatatatatatatatatatatatattttttttttttttttttttttttttttaaagagacagggtctgactacattgcccaggctggtcttgaatttctgaactcaagtgatccacctgccttggcctcccaaagtgctgggattacagcgtgagccactgcgcccagctcattgttaacgtttttaagttccaacatttgataaattctgacttcataaaattcagttgtaaagaatacagatatctttctacaggttttttatttttttacttaaaatatggaactcaagaaagaacatggcttgcacaggtaggattaacttcctctgtggggaggatcattttaagattaagccacgggaagaggtgaccaaaacagaaaaatccaagctctctcagaactactgatctcagaattttagtcaaggttcaggctcctatgtatagcctaatctggcatttctttagtggatcttggattactacttaattttcttttagccttctacgcatgaacatccctaaaaaatcattttcttgctaatttcacagtatctctagttgagccaccgtagcaagtatttccctcttttcagcgggtggtctttgccagcaggaaacttaggagccaattgtcataaaaataatacaaaatgatgatgggagagggaacttcctttgacaaacattccacggttttcaagcagtgaaaaactttgcaccccataaaccgtccaatggttctaaaggagccaaaatgtcaataaatgttttttctttaggagacttcctgagaatcatagattttaaagctgaaaggaagcttcacaggcctcttgccccttgctgcttcacagttgagaaaattgagtccaaagagaagagctgcctgggtctccactatgtgctgggcattcctgccgccccagagttgaagctcatgcctgctgcctgatgatccccccggctgtaggctctccttcctcccctctgtgctttcgcccctttccgctttgtcctggttatgagtttgtgttctgcctttggaagaagtcactgctttgactgaatgaaaagtagctatcatttgcagagtggctactttatccttttctttcttttttaaaaccaatcccaaaatatatgttattaaacttattttacaaatgaggaaaccatagcttgcagagtttaaggaatcatagagagtcaatgcacacgctgggcgtggaggctcacgcctgtaatcccagcactttgggaggctgaggcaggtggaacacctgaggtcaggagttcaagaccagcctggccaacatggtgaaaccccgtctctactaaaaatacaaaaattagctgggcgtggtggcacacacctgtaatcccagctacttgggaggctgaggcaggtgaatcgcttgaacccgggaggcggaggttgcagtgagccaagatcgtgtcaatgcactccagcctgggtgacagggcaagactaggtctcaacaaaaaacaaaaacaaaaaaacccgtcattccatagcccagccaggattcaaacccagggctgactaagtctccgtctggtgccttgttttactctgctaaactgcctctctttgatttattttcttggtacctatagcattatagtctggagaaacagtcttttagaaattacaatgaatattaatagctcctttgtctttaaaaaaagtctttagagaaattatctggaacaatattcagttcattttgtaatgcagccttggagttaactacccccacccagttgtaataaatctatatttatatagaaagatgtccatattaagttaattgaagaaagttaattgcagagcagtgtatatagtataactccatttaggttttgtttaacattacagatatccttaacatatatatgtgcagagtagatatctgggaagacacacactgaactctttacaaaggttcatgctaaggactgggattgggggccatgtggttaaatagaggataaggagatgatttatgtatcagttatattttttataatcaatctatattatcttaaaactaatttttaaaac

SEQ ID NO: 35447 - DNA, 2300 bp, Homo sapien
tgtctgtaaaattctttattatttttttaatcgggtgaaaaaaatgtttttaactttaatagatttctgatttctctatatctcccactgggggttcaaacttaaagaaaccagtgacgtcaaaaagtcaacctcatgaggaagtcagcaagatgaaaaacggaatttaatgttttgcacaagaatatttgcattcccattagcctttgcaaatgcaacatttctcaccctcttgggttgactgcaaaggtgtcctggagagaaacagagtatgcacctctctaacggttaacatactgaattgttttaatggaataaatggtgcggctcaggggcgattaatgtagggactgtagactcccgtagaaaggacttaaaaggcaattgtgcaccaacaatggtggatgaaaccttctgctcacatcaaatattttcatccaaacctcaagtatgactgattgattttaaggcctaattgaatgaattctcaattaaaagaagttgcaaaaagctgatgtaaagtaataaatatatatggggtgccctatgttctacaaatgctttcaggtctgctggtagaaaccactggttatgcaataagttgatttcaaaaattataccttttacatttacatccagataaaaacagatgaggtcaagccactaaacattcttgtaattcaaagagaaagaaatagattaattctttgtttagggaaaaaaaaaaaaaaagaacgacttatgctaagacatctgtaccaatcttcctgaataactaagttagggaggaaagacaaatttggtgactgtgggggctaaaatactaacttatggtcctctgaaatagaaggcggtgcctgatggacataggtatctccggttacttggtttggctgggcggtagcaattaaagctaatggttttcccaactacacccaagcgctagatctttcttttccttctggctctacctctctgatacttccccgcactggctttttggggccaaagaaagttggggccctccttctcactcttcagaccccagggtgtccagcttgggtttcgttcggccgagctccttgaccccccgcgcccgggaggggattggcctctcagcgaatcgccccaggcctctggggaccccagttcgccagtccaggtcgccggccctgtcaccgaggcctaacccaaaaagctcgcgtcgtcccctctggaaagcaacgcagcttcctccttgggcacagtccccgcaccctgggtcccggctggtgctgcgccgggtccctaagactttgactggttagagcaggcgacgccgagagccaggccgcctacaggcgtctccagccctaccccatcgccggctacagagcgggagccccgagccccagcgccgcgccgcgcggggagagaagcagctgttcccaacagctggggggcggcggcgcccggcgccccaggtgctgccgcggccaatcgcaggcgtccggcccgcccccctccccagccgggcgtcgacccccggcccgcgggggaagggagcagagaggtggagagctgtcctcggcactcgtcttccagatcccacggcgggagggacagaccagagccgaagctgcgcggagttcctcgcccctggccccgccgccgcgccccccgcccgcttcggcgctcggacgctcttcccgcggaccctccccacaccccacccaaggcacctgattcctaaggaagaaaaatctacctctaaagcacccgcttcttcgcttgagaactaccctctcttttcatttttggcctccccgccgggtgagtggaaaccgcttgcacattctatagaacccgattctaatccagacgatccggagaatttgtacggtgaccggcagggggggcgggaggagagagcgaagtcaagtctccagggccgctggcgacttcggaagccgcgcgcccggcgctctcggccgcccccggccgctcgcccccgccgcgccgccgccctcgcccccgggctcgcccttggcccccggcggccgcgaaagggtgcgggagacgcggagccggaggaggaggcgcagccgctgcccgagccgcagccgcagccggagcccgagccgcggggcgggtgcgaagatgcacacgacccagaaggacacgacgtacaccaagatcttcgtcggggggctgccctaccacaccaccgacgccagcctgcgcaagtacttcgaggtcttcggcgagatcgaggaggcggtggtcatcaccgaccggcagacgggcaagtcccggggcta

SEQ ID NO: 35448 - DNA, 2300 bp, Homo sapien
ccaggtcgccggccctgtcaccgaggcctaacccaaaaagctcgcgtcgtcccctctggaaagcaacgcagcttcctccttgggcacagtccccgcaccctgggtcccggctggtgctgcgccgggtccctaagactttgactggttagagcaggcgacgccgagagccaggccgcctacaggcgtctccagccctaccccatcgccggctacagagcgggagccccgagccccagcgccgcgccgcgcggggagagaagcagctgttcccaacagctggggggcggcggcgcccggcgccccaggtgctgccgcggccaatcgcaggcgtccggcccgcccccctccccagccgggcgtcgacccccggcccgcgggggaagggagcagagaggtggagagctgtcctcggcactcgtcttccagatcccacggcgggagggacagaccagagccgaagctgcgcggagttcctcgcccctggccccgccgccgcgccccccgcccgcttcggcgctcggacgctcttcccgcggaccctccccacaccccacccaaggcacctgattcctaaggaagaaaaatctacctctaaagcacccgcttcttcgcttgagaactaccctctcttttcatttttggcctccccgccgggtgagtggaaaccgcttgcacattctatagaacccgattctaatccagacgatccggagaatttgtacggtgaccggcagggggggcgggaggagagagcgaagtcaagtctccagggccgctggcgacttcggaagccgcgcgcccggcgctctcggccgcccccggccgctcgcccccgccgcgccgccgccctcgcccccgggctcgcccttggcccccggcggccgcgaaagggtgcgggagacgcggagccggaggaggaggcgcagccgctgcccgagccgcagccgcagccggagcccgagccgcggggcgggtgcgaagatgcacacgacccagaaggacacgacgtacaccaagatcttcgtcggggggctgccctaccacaccaccgacgccagcctgcgcaagtacttcgaggtcttcggcgagatcgaggaggcggtggtcatcaccgaccggcagacgggcaagtcccggggctatggatttgtaagttgcacggactgggggtgacggggagggacggagtggcggctgaccccggggatcgggagcttggagtgaggggctcggcgtgacccgtgaggagccccgcgggtagagcggcgctgccccttcgctccggggtgaactgaaactttgctaggggagagggtcggcgccagcctcgcggggttcggagaagacccagcgctgtgcgaggtcgggggccgggcagggcagagcaggggtgaaaggagagacctgtaatgacggcgggatttggggtgcggagggttgcgagggaggggccgcaaccctgaacaattgcattcccgggctggatgccggttgttaagcgcgctgttgctttgtaaaaatgcgtgtgttctggtgttttggctggggcagggaggggacaccccacgaggtctggggctgttgcccttgtgtcatccccccgccttttaactgcaaaggtaggttcttttaaatcatgatcctagggctctttgccgaactgaaacagagcatattaagcttccttcctagagatttaagcgtgcaaattcagctgccgaagagcagggagccccagagtaggacaatagctattgtcgttggggagtgttttcgaggttgggagcgttgggcggatgtaaggctggactttctttaaagcaaacggtgcctctgaggctgagtagggacctggggggcgggggattcgggggaaggaggatctagagttccaagaatttaggcttccaaatctcggctaggccctactaacacccttaagatttcggcggtggggtggggggaggcagggttagagggtttctttcttttttccttcgtctacccgccccccccccccacgcccccgcccgcctgttaaaaatgggagatcaaggaggagggtccagccaaaagaagcaaagaatagaaaaaaagtttgatctcagttttatcatgaatgacttctccattgtgattcttgatttccttcatgggttaatttagaggttatgtatgtatgtctgtgtgtgtctgttgctaaggtcaccatggctgaccgggctgctgccgaaagggcctgcaaggatcccaatcccatcattgatggcagaaaggccaacgtgaacctggcatactta

SEQ ID NO: 35449 - DNA, 2300 bp, Homo sapien
taatcctgtacaagaaaatgttatcaacaaatacgtagtcagtgatcttcatgtgtctggcctgagaaaatagcaattaaccaaacagacctaatccccattttcctggaatgtataggtccaattggaaaatatggacaataagtatcaaagagttgtgaggaagaagtgttcactgggggctagcccttttggggagacatcatatagcagacagatgctatgacagggctagttaagggaagagttcaggcttcaagttgaggctcgttactttcccctccagactagctagttatttcttagtggatttccctgcctcctatctctttccagtcctatataccaccaccaaactaaccattgctatcatgattatgctcaaaaatggtcaatagtcccccagtgcctactacttaggcttcaaacattttaggctgagattgaaggcctctaccagccagggcctaaccttccttccatacctggcttccacagccctccaatccagctaaactcacagactgtccttcatacatgccatcctttattacctctccacttttgtccctgcccatcatcttgagggtttttcctccacaatccactcttaatgtctcatttccgcatgaagactcaactttcatgtccatcagaaagtgttctctaatccccagtctagaagcaaccttcctttcttctgaacatccatggaaatttgttcatacttcttttagaatgttttttacgacattcctagaactgtggttatttttatactcttcacatcttcctactatattatcaacctaaagacaggatttgtggctcatccactcttagactccataatactttatactccaataaaaaacagatgtagctaaggaaatactgtgctaatgtttgttgaagttagtgctaaaaaaaagtcatatgaatggatgcttggaacttccctgtgatcctgcacacattgattcttatggatatatattttttctgcatttctggaacacaaatgttctaaatgcatacatacttcatccatccatccattcattcattatttaatacaaacatattgaatgcccgccatatgcaaggtatccacaggatagggagggtgctggctctggctttatgcaatgtacgcactcattgatcaatgtttatgtcattttgtttcccttctttccagacaaagggaagcaaagactcactgcacctcattactgtcagcagagagcaatgtgtaattggaatgacctttgtataagtgctgacctatggggtcagaataagccttataatgtacagaaccaacttatgtgcaattttaacatcgacagagaatattggcctttaagaaattcatctcatatttattgtttggagattttactttcagaagatatcagttacatttcccctctttttttctcttttctgcaattattttcctggcattcattcaataaagagcttcaagtcacttttttagactgaaataaactttgatgaaaattgaaaatcaatgctttccttctaatgacgttaagagaaaagcctccaattttgcaattataatcaatatataaaggggaagtggccacaaatatgctgcacatcttaagaagccaagtgggtttggttactttaatttttaaataatcaggacatttaaaaagttgctgtttataaaatactttttaaaaatgtcatcacacgcactatgagtgcactcagtcttgatgtctcgctaaagcattagctgtctagctccttctcctcccagagcctttatcctcatattgggtctggggacacacatgccgtctcttgattcctaaggatccattacccatttctctgcacagatcttcgggtatccaacctatctgtgcctccttcagccaggagcctccggatctttccagacttctttgcaatactgcctcatgcactgaatccatttctcgcatagcctggcgcttggcaggcaggctggcgttccctggctctgccttccccatctccctgtcttttctcccacggcccatctgcccctcctttcctccacccccttctcctctctgctcccctttatttccactccccacccgcgtggctttgctctccctctcccccctcagctcgtctgtatttggagctccggaagctgccggcgactctcccctggagcagcgtgactgacaccggctcctattcagctgggaggagggagaggggaggagaaggggagggccgcgggaggagggtacgagtggccgaccacg

SEQ ID NO: 35450 - DNA, 2300 bp, Homo sapien
ttggagaattttagccattatgactgacaaagaagttggtataggaagaaaattgatctcttacaaacaggtaacaccccttacttctaaagggacatttacttaaattcccttaatttaatactttgaatgacaatacaaaccaggcaaggcatcaccagtatttttatctctattttattgaaccaagggctagtaaaatgcttaccttttataatgggattaacatacaagattgaaagaattgttagaaatattaaacttatagataggtaaaaatagttgcatttcctttcggcaatttttacctataatatattttttctcacttatagaagtcaaggtaaatgcaaaaataatgacatttgagttaagaaaaatttaattatgttcctgggccattaatctgaagataatcatgaatggaaatctctattattaaagctcttgtaataatgacttgtctctagacatattttgttttccttgaaaagccctaaagtaccaccagcatgtttagaatcctattgtattaaggcatgccatttagaaggagtgaaattgggaactgaagtcacaattattcactccacaaatagaaaaaatgtgagtgtggttttgttctacatttttagatgtactgatatattcatcaaatgtatgaaaaatctcattgtcgctttacctcaccttcacagtcaaaactcaaaaactaagtgtagctccaacggtctctcttgttagtttcctaagtctgtagggtcttataagggtcttagtacagtgcctagcacataggaagcagtatacacatagctattattagagcatgaacattacttcaatataaatgtacacacatatgtctatgtttatatgtgtatgtacatacaacacacatgtatgtttgtggacattatagaaatagcatgttgacattcaatatactttcttctcttttttttttttagagacagggtcttgctctgtcacccaggctggagtgcaatggtgagatcatagcttgctgtagcctcaacctcctgggctcaagtgatcctcccacctcagccttccaagtagctgggactacagctacatgtgcgccaccatgcccagataatttttaaatttttttgtagggatggaggtctcactatgttgcccaggctggtctcgaactcctggcctcaaggtatcttccctcctcagcctcccaaagagctgggattacaggcatgagccaccatgtctgattcagtatattttccattaaaaaatttaacagtggatgaaattcaagtctatatgggcaaattcttttttttttttaaccaatgcagtattattttgacttgaagaacgttctagcaaaacttgtaataaggactaagagtatggtgcccttttacctgaaatcagtctttaaggggtaacaaattgagcaggacccaaatacacattaggagctgcaaacctatcttcagttttcatatactctggaagaagctatggtaggggaatgtgaattttaatgattatgactcagagagaccacacctctataaagctaaaataaatgacttgctgtattcatatattgaaagaaccaggccgggcggggtggcttacgcctataatctcagtactttcggaggccaaggtgagtagatcatttgcggttaggagtttgagaccagcctgaccaacatggcgaaactccgtctccactaaaaatgcaaaaaaattagctgggtgtggtggtgcatgcctgtagtcccagctactcaggaggctgaggcaggagaactgcttgaacccgggaggcagagattgcagtgagctgagatcgtgtcactgcactccagcctaggtgacagagcgagactctgtatcaaaaaaaataaaaaagaaagagaaaaacagccaatgagcagtcaagctggtggtaagcgttgcacagatacagatttcactgctcacagtcctgtttaaacctcaaggaagtctgcctttctactcctctacctacggtcctactgcccagtgggcagcagtgacgcacaaatgactgcgacacagagacggcaccacgggcttgagtccaccggtaaatgggtgttgcatggtgtggagtatgctgcttagtccgctttcagaagctcaagggtgacctgggagtgctttgactactcctagcagtaaaacgaatgcatttgcacttccagctgcatttcttcggcttcttgtacagtcttgaggtagtccactgagcttaactgagtcatctttggtactac

SEQ ID NO: 35451 - DNA, 2300 bp, Homo sapien
cccccacccccacccacaaggctagtcatagaaactggaatccgtctttcccaaagcagggcatagaaaccaaaaccccaccctttcccaaagccagccacaaacctaaaaatattactctaacctccctgcacccctttctgtgcaaatattggacatagagaaattatctggcagagcgcagtggctcacgcctgtaatcccagcactttgggaggccgaggcgggtggatcacctgaggtcaggagttcaagaccagcctggccaacatggtgaaaccccgtctcaactaaaaatacaaaaaaaattagctgggcgtgatggcgggcgcttgtaatcccagctacttcgggaggctaagacaggagaatcacttgaacctgggagggggaggttgcagtgagccgagatcgcaccatcgcactccagcctgggcgacaagagcaaaactctgtcaaaaaaaaaaaaagaaggaaaagaaaaattatctgacctaccttgtttaactgttgtaggccacagcccccattccagagggtcctgttccatacccagaaggaatgaatgctgcagacaggccaaggagaatccagataggccttgctgggtttcttgcctgtttgcatcagagtgttttttgtccagtcattttttttgagacggagtctcgctctgtcgcccaggctggagtgcggtgacgcaatctcggctcactgcaagctccgcctcccgggttcacgccattctcctgcctcagcctcctgagtagctgggactacaggcgcccgccaccacgcctggctaatttttagtatttttagtagagacggggtttcactgtgttagccaggatggtctcgatctcctgaccttgtgatccgcccgcctcagcctcccaaagtgctgagattacaggcgtgagccaccgcgcccggccttgtccagtcatttttttatacggctgtccatgctttgttgaacctaagcatacaaatacacgatttcccttgttatctttgggtcttcattctgaaggctcccgtgtcacataaaacgatggtcaaatcaatgtctatgtcttttctcctattaactgcctcctgtcagtgactttcagcgaaacttcagaaggtgaagcggaagttttcctttggcccggacagcatcatcattaatatcattaataaatattcccacagtatttggcccttgtatgtcctttgtatggtgctggggatacaataacatatcgctgcagagattttcaaatgtaaaagaagagagattatactgatttaaaagctagattctgtcctcaccctggagctagtctgcatttacgaaaacttactttccactgcggtagacagacgctttctactccagcgcaactgtgcctttcctcaaatctagtctcaaatttaggttccttttcattttctgttatggaaaggccctcagcgtatcccaggctttggagccttttgttagtagtctggcccatgcataatttccccttcctctgaattatacatagcacctcactagttatattttaatacactttcctatgtctcagtggtagtttcctatattaatatatatcccagtttagtttggcttttaatttcttttcttctaaggggatagatgcgttctgtaccaccttctcgagtactaatggttaactggaatgaacacaagcaacaaaccctccggcctggatcccaaaacaacagtcgcggttctgcaacagaaaaggctgcgctggccctgggacctgtctcggaaatactcctcatccatctagtttctcccaggacaactaggcccaaccccacgggaatatacagagaggcctcgggtcacagacttaaagctgtaaaagggaggaggcgacggtctggtcccagtcaccgaccagccaccgactactagggcccgaacccgggactgcagacgcacctccccgccctcccttcccagctccgcctggcggcgggcgttgctcctgaggggcggggcttccgcttccggcgggggattgttgacgcctgcggttgctgcggtggtgacggggctgttggggaggggccattgggggagggaaacggagcagtgacaggtatcccagagggtgctgctgaggcgacgatggccgaggggcccgaggaagcccgaggccaccctcccgggcaggacgatggcggaggggaccacgagcccgtcccttccctgagaggccctcctaccaccgccgtcccatgcccccgcgacgacccccaggccgaaccccagg

SEQ ID NO: 35452 - DNA, 2300 bp, Homo sapien
tggcgggcgcctgtagttccagctactctggaggctgaggcaggagaatggcattaacccgggaggcggagcttgcagtgagccaagatcgcgccactgcactccagcctgggtgacagagcgagactccgtctcaaaaaaaaaaaaaaaagctgtgataacttcagacatctggaaaatattaattcccttctaacctctattcagaccatccaatgacctatatttaaaacaagtcatttttctacatgtcatacaagaaaatctaagcactcaaaggcattcataggagaaaagaaagcatgcatgtgtaacttccattctacagacggattaggttaaatggccaggcttgtgacctgaattctaatcttaaatctgctcgcaaataccccttttcttcacaaatttgaaaactaagcactttatgtacatatctgggggaaaactggtgggagtagtaacagtgccaaacctaaccatcagtagagaacgactgaaaatacctgaaccacaatttttactactcaaacatttccctcaaaataaaaaacatttaagaaaactagaagacaaaaaaaaaaaaattcctcaaatctttactttttttttttttcttcgagacaagagtctcgctctgtcgcccaggctggagtgcaggggcaagatctctgctcacggcaagctccgcctcccgggttcaagccattctcctgcctcagcctcccaagtagctgggactacaggcgcctgccaccacgcccggctaattttttgtatttgttagtagggacggggtttcaccgtctctggatggtctggatctcctgacctcggtgatccacccgcctcggcctcccaaagtgctgggattacaggcgtgagccaacgcgcccgacccaaatctttacttttaaaaatctgttgataatgacacaatttaacaacatcaaccatgtgaaagtgtgtaatctttattagcatccagaataaagtaatctaggaagtctacctttaacagtaggcaacaagttatcagatccttttgctacacttttgtttttcaacaaatttaagacacacacttcccacctcagtatcactgataagtggctttattaaaataagttaacattttcctattcaatacttctaacaatcaatattttaaaaatggaattttctcagaatcaactatctcatttacaattaggataatccttttttataattttaaacatccaggagttcatacagtggctaaactataagaccaccaacattcctggagtgtcaaaagtaactatacttctagaatacgcctcataatattaaaatattttgtgtatgagatcagagctggagtcccggtcaactgtggagaatggccaattccagcctccaaaataaaggcgggggtggcggtgttggggggggggaggggagtcgcgcagcagagaaaagacgtaagggtggagagggactttcaaaatgccccagtgccacggttaactataacctggttaataaaatctaagccaatgctctcaagacgaggagggccacaggcaggggaaaccgagaattaactcataggctgagactaagttattccactttccatgtaacagcgccccccacaactccccgtctgccccagagttaagattccaaggggcagccccccctcctcaaacacactaaagaagggacaccagaaaacagcaagtataagggccatcaaccacatcttttcctttctccctcgagagaacatgagtaataccctcaaattccaaatccccgccaaaaaataaagaaacgcgcgcatcatgggcctacaatttcttttcccgcccagagcctgcctgggaaagcccctgacccagagagttgggggaaaggcggcccaaaccacacgtgtgcgccgcaaggctgggcctgtctcagcccacttcccgtcgccacccccaacggcctgagctcccccggagcctcactcgggcctttcctcaggccctcctgtctgctccacgtggggcgccggggcctcgaaccgcccgtcccctccagccgagtttccccacccgccaggccaccgcggcgtcggggtcccatacctgatgctgttgtcgcccctgctggtaaggcttaattggcccctggtggcaacgccgcgtccggatcttgccgccaccgccccctccgactcctccggctcccgaggccatggcggagcctccgccgcttcccgctccggggcgggtaagggggcgggagaggcagaggcggaggcctta

SEQ ID NO: 35453 - DNA, 2300 bp, Homo sapien
tcgctctatttgctgatgaaaaaaacgaagcttagaaacaggatcagtgggctgggcgcggtggctcacgcctgtaatcccagcactttgggaggccgtgggcagatcacctgagattgagagttcgagaccagcctgaccaacatggagaaaccccatctctagtaaaaatacaaaattagccggccgtcgtggcacatgcctgtaatcccagctactcgggaggctgaggcaggagaatcgcttgaacccaggaggtggaggttgctgagattgcgccattgcactccagcctgggcaaaacaagaggaaaaaacttcgtctcaaaaaaaaaaaaaaaagaaagaaacaggatcagtaacttccccaaggctacacagctagtaagtgggagatttatagtaaataggctgggcgtggcggctcacacgggtaatcccagcactttgggaggccaaggcgggtggatcacttgaggtcaggagttcaaggccagcctggccaacatggcgaaaccccatctctactaaaaatacacaaatcagctgggcgtggtggtgcacgcctgtagtcccagctacttaggaagccgaggcaggagaatagcttgaacctgggaggcaaagggtgcagtgagccaagatcgcgccactgcactccagcctgggcgacagggcaagactctgtctctcagaaaaaaagaaagaaagaaagaaagaaaaaaaaagatttatagtaagtctaagatttttcacaacatatttttcctccctaatcatttggctatttgtctttagctcttacagaaaagttgggttatagtcctggctttgattacccatctcagtgtcattgattgtgccacctaaatttctctggacatcttgtctggttggttgaatgagagggttggactatgtgatcaccaggacctttctaatcgtcaactcctagaatatacattttgtggattcagtctttgagtctagctcacttactcagtttcctaaatatttggagcaaatatagtatacttttattgttaaggatatatcacttacccctaatgttagctgactgcatgggttataattgtaatcattcatcgcatttttcgtctattagcaaatatacatgctctccatagatgatcacgtctgctcctcacaacagctttataaggtggattttaaagctcccattttatggaggaggaagctaaggctcagacggttttgattcatccaaggtcaaataggttgggtggcagaaccagaattccagccccgtgtgtctgcaacaaaacctttatatgtttaaagaaacattaatgaagccgtatatattttctaattctaaggatcatggactttatttttcaaccacagatttttttttcctccttcttaaatcattagctcttgtctttgattttactgtctgcttacttcctgcctacttaaccaaccgacagggagaaggagaatgggaagaggttactgtttttatgttaagtgtcttttcaaagtctaatttacagccaagaacagcaaaagtaccccttggctttgtgcctctgcggcgccccggagatctccttccccgtccctcttcctttccgagaagccgcgttccgttgttgaactacgtttcccagcgtgccgcgcggccgagagcgtggactcgaccagcccttcctctttgcctatcagctcgtcgcagcatgatgatgcaaatgcgtcgggcgccgatgagtgacgacattctggctcgcgaccgcggcagccgccttagcaggggtaataggcgcaacggcggcggaggctgcagggacgacgacgacgacggcggcggggcgggcgctgtgcgcacaggggaggggtaggcgggcgtcgccagcggcttcaactgcggcagctacggctagggcgacggaagaactcccaccagtcggcggtcgagttaggcctcagcaccgcggggaactgttcgtgctgtcctctgcgggagatctccatagagaccgtgacacacacagaggcgggggtccgcagaggcggccggaccggagcctcctcggcctctgcggccgccacccccttccccgctgccagcactcaccctctctccgctcctgctcgcaacctcgcggttcctggggtgcttgtgcccactgtgtggacagcgcgggcggacttttgggccggggccgggcggcgggggaggctctctaaggcctccgcctctgcctctcccgcccccttacccgccccggagcgggaagcggcggaggctccgcc

SEQ ID NO: 35454 - DNA, 2300 bp, Homo sapien
tgactttcccctactgttttttctgtgctcctgatgtggttagcggatgacctcagtgccaatgagcagcttgttggcccccatgcatccggcgtgaactccatcctgcccaaggagcatggcagccagtttttctacctgcccatcataaagcacagtgatgatgaggtaattaacccccaagtttctcttaaaaggcttcagattagcacacaaggcttgtgggcctgctcactaaactgctatggtttgctttggggaaaaagaccggggactttaaaaaatagaacatttgtgttgctgtttaaaaaaggtgaggaaagaaatctatttgattacagtgagttgaatttattttctttctcttgtatgtcctgtaaaactgctacatctgacttttgtcttgtttccatctcctcatcattccccaactcctaggtttcagccacagcctcttgggattcctcggtgcatgattctgttcacttgaatagggtcacaccacagaatgaaaggatttacctaattgtgaaaaccacagttcaactcagccaccctgctgctatggagttagtattacgaaaacgaattgcagccaatatttacaacaaacaggtaataacggggcctgattgtgccattctggctctgagctcaaaagatttttccctctctctatcacaaagcagtgttttttggtgctgtgatgtgcaaaacatgaccatcctggccaagttatagtctgattctcatttatccaaggtagtgggcattaggatagcagaggtcaatgtcatccagtaagggcagtttcaccttgactgattggagaggtgtaatcctaccaggcagtggagctgtgatatttcactgtttgaaaagtagaaaaactgaggctgagagattaagtgccaggtccaagcaagtgagtgacaaaaccaggacaaaaggcagactccaaacaaatccctatcctactgctttgacggatcccatctcagaggtgctgtcagtgaaactgatcctctccagtgttgttctagccatctcaggaaagactgattaagccctggagagatcacaggaaggcagcagatgggagagagaagcaaccacagaaatcctgaacatgctgcagattctgtagtcaaattcccaactaacagctggacgttagtatcccttggggttggagacagggattcttagcttcagttttttctgttatgctgagtattctgcatttcaaaaacatagtaacttgtaatgcttctacaatttgtaaaatacaaaataactggctgggcgcggtggctcacgcctgtagtcccagcactttgagaggccaaggcgggcggatcacgaggtcaggagatcgagaccatcctggctaacacggtgaaaccccgtctctactaaaaatacaaaaaaaaaaagttagccaggtgaggtggcaggcgcctgtagtcccagctactcgggaggctgaggcaagagaatggtgtgaaccccagggggcggagcctgcagtgagccgagatcgcgccactgccctccagcctgggcgacagcgagactccatctcaaaaaaaaaaaaaaaaatacaaaataacttacatttgtcacatagcttaatacagcttttttttttttctactagagtttcacgcagagtttgaagaggagaatatccctgaaaaatatattttattcctgtggtgtaacctatgaaatagtatccaatataccaaaggtaaaatatatgctactttaggccgggcgcagtggctcatgcctgtaatcccagcactttgagaggccgaggcgggtggatcacctgaggtcgggagttcgagaccagcctgaccaacatggagaaaccctatctctactaaacatacaaaattagctgggcatggtggcgcatgcctgtaatcccagctactcaggaaggctgaggcaggagaatcgcttgaacctgggaggcagaggttgcagtgagccgagatcgcgccattgcactccagcctgggcaacaagagcgaaactctgtctcaaaaaaaaaaaaaaaaaaaaaaaaaaaaaaatatatatatatatatatatatgctactttaaaaaatatcagtatctaaataatggagaatgtgttcattctccagacttctaaaacgttttctcaccacactttggatgaaaacgttgttcacatcaaagtattgtcacttccttcctgtcctcgtaggcaactgaggagatagaggaccgggaaacgctggctctcctggcagcaaggagtg

SEQ ID NO: 35455 - DNA, 2300 bp, Homo sapien
tgagccaccacgcctggcccccagtttattttccatcagctttttaagtgatatattttaggtcatgaggtcaggagatcgagaccatcctggctaacacggtgaaaccccatctctactaaaaatacaaaaaattagcctggcgtggtggtgggcacctgtagtcccagctactggggaggccgaggcaggagaatggcttgaacctgggaggtggagcttgcagtgagccgagatcgcgccactgcactccagcccgggcaacagagcgaaactccgtctcaaaaaaaaaaaaaaaaaaagtgatatattttaggaactcatgtcaggactctacaaagaaaactattttgcttctttgaaaacatgctgaattttagaattttatatcaataaaacagtatctttttcaaaagtatcactctttcacagaatactaattgtaagcaaaacattgggggtaagagtaccacatcagtttattaccaagtgaatgtcctaccccagccaattagttagttatctgagttaaaaacctgaccctgtcactttgtagctacgtgttgtagatcagctgtttagcctttttgagcccccgtttcctcatttttaaaatcgggatgatatccacacttaggcttgttgcaaagctttcatgaagtgatgcatgcaaagcagatagaacctctacttgcgatgtagccaggagctagtagagttattgttgccattgtggttgtcatttttattaaaacaactcatctatactgagcttttcttgtgattttaaaaaaattgattctttttgttttgaattatttaactttattttttgaagctaacatgctatctttttctcttaatgctaatatagaaaattattacaatttacatgtgtattttacaagttgttagggtatcttggaaaaaccagtcaatagcaatcatcaggtaatataaaaattcctcctgagtcactttaattttcagcttcttttctggaaattaaactgagtgccaatgtgtgggaatacagcataaatggcactgaatagcaggcaaatgtgtgaatgtacaaggagaaaatcatgtcccaggctggtctgagaatgcatctctcagtccaatatagttctgggaaatattaactgtgatgatgattttcttgttctactattgagattgtctaacattctccttccctacactgtcctcacttagtgatgtcagtaactttctccttttgtacatgtgacccagagccttgatctttctccacagtatccagcttattggtcattaccaagttgatatcctgcccagcccattaggatttacctataccacaaccatcatggtagctcattggagcaagatctgttagtacatctataccttttcacccatgtgcatggtggtgagctctgtgcctgtacacgtgagatgttagaaacaggtttttattatttttgcaagtgaattgtccttttagatactagtctgagaaattgccagaccatatccttaagcaatattttcaaacatgtgctgtgatctgtaagtttcctcccacttagagaaattcaatagtaataggatttgtggtgaaagtcataaatctttgtcgtataccaaaactgatattaaatggacatagaaatgaattaccataaagaaagatcaaatcttatgtgcttctgtgtttggaattgtcctagatttcgtgaagtttttcttcccagtggataagatcacattcctctctcttcccccatctgctggtagtaggttaatgatttatctaaacgttaggatgagctcatcaaattgaagaaagtaacgtagaggatgtggagaatgtatacttataaagggcatttatctgcaatgtctgtaacaaggaatttgagaggatttccctgatgtggcccctcaggcctctcacaaaaagcgtattgactggctagattccttgctagaggaagcctcccacaggctgcagtgcctggcatgaatgcttgttttagccgccactaagacaccttgccttgtctcttggctcactagacccagttcaaaatgtggttcaggtcctggagaaacaatacctagaagaaaagagaagtgccctagaggagcagcggctcatgtatgagcgggaactggagcaactccgccagcagctctcccccgacaggcagccacagagtagcggccctgaccgcctggcctacagcagccagacagcgcagcagaaggtgacccagtgggcagaagagaggtaagaactgcagcggggg

SEQ ID NO: 35456 - DNA, 2300 bp, Homo sapien
cctgaataacatacattgtactcattaagtattaattaagcttcttggctgggcgcagtggctcacgcctataatcccagcactttgggatgccaggatgggtggatcacctgagatcaggagttcaagaccagcctgggcaacattgtgaaactccatctctactaaaaatacaaaaatcagccagatgtggtggcgggcgcctgtaatcccagctactcaggaggctgaggcaggagaatctcttgaacctgggaggtggaggttgcattgagccaaaatcatatcatgccactgaactccagcctgggtgacagagcgagattccatctcaaaaaacaaacaaacaaaaaaataagctcgtcatcctctccccttccactccctcacccttccaagtctccattgtccattccagtctctatgtccatgagtacacgttatttagcttccacttatgagtaaggacatgcaatatttgtttttctgtgtctgacttgtttcttttatatatttttattttaatttttttgacttgtttcacttaagatgatgtacatatttatgccactctgtggtaatggctgttattaaaattctaacagccattctgatcaaatgaattctggttcattttctgaatcttgagtttatattatatttcggggacttttcagtgactcgtctttggggaattatgttttgtgggaaataggctgctttcctttcagcttatttgatggaaatctattgttaacattacaaagaaagctgtctagtctttcacttgctagtttgtgtccttctttgttatttgtagtagcatttaacttttttttttttttgagatggagtcttgctctgtcgcccaggctggagtacagtggcgcgatcttggctcactgcagcctccgcctcccgggttcaagcaattttcctgcctcagcctcccgagtagctgggactataggcacacgccgccacgcctggcaatttttgtatttttagtagagatggggtttcaccatgttggccaggatggtcttgatctcctgacccctgacctcatgatccacctgcctcagcctcccaaagtgctgggattacaggtgtgagccaccactcccagctgcatttaactttttaaaccatttacaaagcactttctttttatgatattttggttttttggggtttctttgtttttgtttttttgaaagagtctcactctgtcgcccaggctgcagtgcagtggcacagtctcggctcactgcaacctctaactcccgggttccagagattctcctgcttcagcctcccaagtagctgggattacaggcacctgccaccacgcccagctaattttttgtatttttagtagagacagagtttcaccatgttggccagggtggtctcaaacccctggcctcaagtgattcatccaccttggcctcccaaagtgctgggattacgggcgtgagccaccaacgtgtattaactgtggagctttattgttctgcatattttatacttaaaccaaataaacattccataaaactaatttttcattttttcttgacagatcgcttacaaccttggggttggttatatcatcactggctgaccaggcagctggcaagggtaaaagcaaatttgtgccttatcgagattcagtcctcacttggctgcttaaggtaatccattgctctagtgttcttttccaactaaaaattggctattccagatgtgacagagtaaaggtgtgtacaaagctaaccaaatacctaaagaactctcctgatgacagttattctaattcctaggaacacagaatgaaaactattttctactcctttttattccatttgaatgctgtttgacaggccttattcattgcttgaatatagagaggacacatttcatcttgtcatgacgttatttgtgaaatgcaagtccatttccacataatgtttccttcatagagaataatgtcatacctaacacatttagtgcttttatcatatgtgttgtccatggaatgggcttcctaagatgctgtttgaaatacttggcaggacaacttggggggcaacagccaaacctctatgatagccacaatcagcccagccgcagacaactatgaagagaccctctccacattaagatatgcagaccgagccaaaaggattgtgaaccatgctgttgtgaatgaggaccccaacgcaaaagtgatccgagaactgcgggaggaagtcgagaaactgagagagcagctctctcaggcagaggtaaaagcagcc

SEQ ID NO: 35457 - DNA, 2300 bp, Homo sapien
agaataaagatgagttagcacagtccctggctcagaaaaccttccagcttggtgagaatataaagtatttaggttggtgcctggtacataacaaacgctctacagcagtagctatgctattaatgggggagcgaagtccatcagtacataatgataatattgataacagtagctgccatagactgaatttcactgtgtgccaagcattatcttagtaggtattccatttatgttaccacaatcccaaattaatgtaaaatgtgcagttacttaggtagatgagtgtgtgttagagagggagagctgttggctaagacagcccagaggaggcaataattatagggaggaagttgagaaaacattggaggaggtgacatttgagcaggtcttgagtagtgtgagttgtacttcactgggcagggaggcaaggtgaggaaaggcagagaattacaggaaggagaaattccctcatagttctacattcctttctctttttttgttattattatgatttccttctctttttttgttaatattattatttccttttagcaatgggatctcactaggttgtccaggctggagtgcagtggctattcacaggtgtgatcatagctcattgcagcctcaaactcccaggctcaagtgatcctcccacctcagcctcacaagcagctgggactgcaggtgcataccattgcacctggctctccccttccttcttcttttccctagacatctcactgtgttcaatatacccaaaggatttcttgatcattggtggaatctctcagagctgagaagttggctgaccattgacgtaatatacagatgaatagggtcatttcttatgtctttttgggaaagcagtgggaatccagtaaacacaaaaataatgcctgtagggtgacaccagtctgttactgtggcagttgaagtaaaaatggaggctttggcaaagtatcgttggggtgctgctatcctggctgtgccactgaaggatttacactgactgatctgtgctattttaagcagatgtcacatgtgaaaacagatttacatgattgattaagaggtagttagttcaccaggaagttgccttatttttttttattatttttattttattttttagagacagtcttgctctgtgacccaggctggagtgcagtgacatgatcacagctcactgcaggcttaaacttctgggctcaagcagtcctcttgcttcagcctcctgagtatctgggactataggcacatgcccctgcagctggctaatgttattttttgtagagactatgttgcccaggctggtcttgaactcttggcttcaagtgatccttcagtctcagcctctcaaaacactgggattataggcatgagccaccatacccagcaaaagttgctttaaaatgtaaattcgccgagtatttttggtaatgaaaagattagggaaaccaaggctttatcctctaagaattaatattgtagcagaacaaagggaattgtatataaatagatgtatacatatatatacacacatacagaatctgattagacagatatggaaattcaggataatgagaaatagtatccttaaaagttttataagcaggccgggtgccgtgccgcacgcctttaatcccagcactttgggaggccaaggtaggcaaatcacttgaggtcagaagttcaagaccagcatggccagcatggtgaaactccatctctactaaaaatacaaaaattagccaggcgtggtagtgggcagctgtagtcccagctactcaggaggctgaggcaagggaatcgctcgaacctgggaggcagaggttgtgctgagctgagatcatgccactacgctccagcctgggcgacagagcaagactccatcaaaaaaaaaaaaaaatttataaaggagtgacatttgagatgacattaaaaggaaacaaattaaaagggggtaggttttggctcactttgcaaaaatctgatgtatatgtccagaaatatttctttacataaaattaaattatcttgacataataaatattaatcactttgtgtctgaggagggtttctgagaggtattaaaatgattttagggaaaaaaattacttttcttagaaaaagaatacttgttttgtgttttgcctttttaactagactgtaagcaagaggatacaaacatgcctagtacatacttgagttccctgtagcccctaaaattgaaaaaggtaacaagtgggtgttagtttattgctttccagattgaccattttgcagttggagaacat

SEQ ID NO: 35458 - DNA, 2300 bp, Homo sapien
gagctgtcagccagtgtctgttatgaaatgtatttctgttatgaaatgtatctcatttaatacttgctgcaactttatgaggtaggtacccattttgcagatgggagggagtgaaatttggaaattatacagctaattcaatgacaacaccagaatttaaacctaggcaggcttcagattgttctggtgtggcaaagtctaaatttcaatgaacagaaatatatatatatatatatatatatttgttgttgttgttcttgttgtgttttgtttcttcaagacaggtctcactgtgtcacccaggttggagtgcagtggcatgatcatggttcactgcaatctggacttcctgggctcaagtaatcctcctacctcagcctcccgagtagctgggactataggtgtatgccaccacgcctggctaatttttgtgtttttttatagagatgaggttttgccatgttgtccaggctggtcttgaactcttggcgctgaagcagtttccacctcagcctcccaaaatgcttggattagaggtgtgagccaccacacccagcagaaatatatatgttgatatagaatattttgcattgggtattcagagaacaagttaatttgacagctgtggtgaggccttctaacactcaccgtaaactttcctatgtcccaaagtatctctaataataacgttaataattaatagtatatacaacccatccttttctgaaggaaagttcagaactttctttagaacatctactgtgaattgggaaccaaaaaaaaaaaaagcaaatgtattggtattgctagggttaccatagcatagtaccacagactgggtgccttcaacatgggtacccatgttgaaggttgaatattttctcactaccctggaggctggaagtccgagatcaaggtgtgggcaggtttggtttcctctgagacttctctccttggcttgtagatgactgtcttctccctgcgtcttctcattgtcttccttctctgtgtgtctctgtccggatttccttgcttataaagacaccagtcataatgcattaggtcccattgtaatgacatcattttaactttaacctttttcaagctcctatctccagatgtcgcattctgaggtactgagggttaaggcttcaatatggaaatttagggtgtggggacatgattccattcataacaatagctaagatgcttttagatatttagagcttctcccaaaggttgagatctttgattttgatttgagatttgaaaaaccttgactttactctttgatataattagggcagagttcatagcaccaggctattttaaatccaggtgacagcagcttcttagtgggttttaggagggtaatatatttgggtagcagaatggattctacccttcaaataccagttaaagcttctttgatgatttagaattacatatgttgggccaggtgcaatggctcacgcctgtaatcccagcactttgggaggcccaggcaggcggatcacctgaggtcaggagttcgagaccagcctgatcaacatggagaaaccctgtctctactaaaaatacaaaattagccaggcatgatggtgcatgcctgtaatcccagctacttgggaggctgaggcaagagaatcacttgaacccaggaggcagaggttgtggtgagccgagattgcgccattgcactccagcctgggcaacagagccaaattctgtctcaaaaaaaaaaaaaaaaaaaaaaaaaataaatttacatgtgttaagtcctaactaattaaaaagtttgtcataaaaaattctaactacaggaattcttgttatgggggaaaatgtgtaacacttgaaatgcaaataatcttcttttatatcaagctaattatgcagccattagttcaagccctgccttctgctgtcttttatatatagctctcctgtgaggtctcttcctgaaaactcttcactggtctggtaaggggaacagggaattctctcttaactctgctgctgcctcttgaaagaaggaaacaatgactggaaagataaaatatgctctatctgtggttgatttttgacccctaattaggtttcatctgtaggttcactaacagcgttttcctaccatatgtaaaattaaacagtaatgctttctccataacttaatttgcatgctcgaatcccttgtggatcagcagcattagcacaccctgggagctcattagaaatgcagaagctcaggacccaccacggatttacagaatcgaagaatctgcgcttaatagtgttcc

SEQ ID NO: 35459 - DNA, 2300 bp, Homo sapien
aaagtgctgggattacaggcgtgagccaccgtgcccagcctgagagttttttgaacaatagaataccatgcacgattaaaggataaaattttaattttgtgaaaaatcagtctggaagctggatttaggagtgattagaggaggcaaagctaggagggttaacaggatgtctcagcagcccaaaagtgaagaggtaagcacagacctagattcttagcctcagagggctggaaatttcacctctttctgagcagcagctgagagcctgtagcctaaagcctacaacagtgtttgtaacatagtagggcgctcagaacacatttgttgaacaagtgaatggacaggtaaagtgagattgcagcagcaggaatggagaggaggaaagatgcaacaggcccttcagaggtagactgagatagctggctctacaataaggtggggctgaagtatttgtccttcagtgtacacaggggactggttccaggaacatccaaaaccatgcatactcaagtcccacagtcagctctgcagaacccacaaataggaaaagttggatctctcagttttgaacctgccaaatactgtcttttcttttttctccctttttttttttgagacagggtcttgctttgttgcctaggctggagtgcagtggtgcgaacatggctcactgcagcctcaaccttccaggctcaagtgatcctcccacctcagcctctccagtaactaagactacaggcacctgccaccatgcccggctattttttaaatttttatgtttggcaagatggggtttctttacattgcccaggctggtctcgaactcctggcctcaagtgatcctcccgcctcggcctcccaaagtgttgggattacaggcgtaaggcactgtgccagagcacgaatactgtattttcaatcagattttggttgaaaaaaagccacgtgtaagtggactcgtgcagttcaaacccgtgttgttcgagggtcaagcgtagcatcacctcggttggaggcggacggacccctctcctagcacctgccgtacactgtctagcataataagtctccacgccctctcttccaccttagcgtgtgcctctgcatcatgctattcatgtttctgtgtgtcctcaacagcaccctgcacacagtaaaacctcaatgcatcttccaataagtggatttctagatttaagcaaaatcgaaagattcctggatctaaactctggatttttgacttctgtacgcttcaaaatgcctggcactcggtgagcgccccttaagcacttgttgaaccaaacagaataaatcggattcgcccagttccgccctggcagcgaggtctgcatttggcaggatgacagaatccattgctattaaattcttatgtaagagttaatggccctcccagcccacttgacatccctcccgagacaagagaggccgggaaaggaagggagagcactatttacaaacatacactgtttcggtggtggattcacagattcatttctagtctcggttcaccacagagatcttaaaataccgctgcaggctccgtgtgggacagagggggcggcgtgccgggactcggaggggaaggcctgcgcacccagcgcggcgagccgtggtccttgctgccgtcccggggctccgggtggcagcggccccagaaggcggctcgagctcacggcggtgtccgggggggggccccgcgggcgccggtgcaggcttggcctgggaggtcccctggggaaacaatgcgtcccgccccggactccagcctcccctaagcgccgcgctgctcgccgctcctctcactgccgtcccgccgctccagggggcgccgcgcgtggccgtgtccggcctctcccgagccccggcgggtgacgggcgcggaacatggcggcgcggggccccgggcagccgcgaggggccgcggcgctgcggtctcggctggggcggcgcggctagagctgcgcctgggcccgccggcgaggcctcctccccgcccgccgccgccgccgccgccgccgcgccccgccccgcgcgcccgcccctccccgggccgcggccgtgccccgcgtcgcgctcccccgggatggcccgcgcgcctcggcgctgcctctcggagctcacggcggagcggcggcggccgcgctcgaggggcgcgcggctgcagcggcggcggcgccgcgcgtgaggggccgcctaaggccgagcgggcgcggcgagcggccgggcgagcgcagccaacatgtcggataccaaggtaaaagttgccgtccgggtccggc

SEQ ID NO: 35460 - DNA, 2300 bp, Homo sapien
aagctctttccaggggcctcaacaggggataaaatattgtgttttctcagaaatctagcaaatcagaaggtgaatgttcatgattatgatctctaaaggaaaagaaattctctaatacaaggttttgttaagcacaatgttcacataagacatttgagggagaaccccttaaaaataagagtttagggccaggcacggtggctcatgcctgtaatcctagcactttgggaggctgacgcgaaaggtcagaagtttgagaccagcctggccaacatggtgaaacctcatctctactaaaaatacaaaacttagccaggcatggtcacgggtgcctgtaatcccagctactcaggaggctgaggtgggagaaccgcctgaacccaggaggtggaggctgcagtgagccgagatcgcgccactgcactccagcctggtgacagagcaagactctgtctcaaaaagaaaaaaaaaaaaaagaaagaaaaagaaaaatgagagattataataccacaatggattcttcacacagattatgctatcccttgtttgaagattttccaacatatggcaaattctctttgtttttggtcttaactgagattggaaaaactgaacttagtgtcatttgagggaattattataatgcagtgtttctcaaacttggctgtacattataatcacctggggagcttttataaatcccagctgtccagaccacaccatgggccaattaaacttttcgggtgcgacccaggtgtttaccatgtgcaaagaagtttgaaaatgactaaaataggtaactctgaagtcaaactgcctggcttcaaattccaggccagccacttcctagccatgtgaccctgggcaagatatttgatttctatgaattctatcagaaaaaaagacaataaaaataacatatttttgtaggattgctatgaggtttaaacaagataatctatgtaaattatttattaatttgctgcaaaagtaatcacggttttgccattaaaagtgatggcaaacactgcgaatccttttcaccaacctaacacaatggggcaggcatatgtgaattccataggctgggcacagtggctcacaccagcactttgggaggccaaggggtggggaggaatgtgaacaattttcacaagttcaagaccagcctaggcaacatagtgagacctcctctctacaaaaaaattaaaaaattagcctagtgtgatggtgcatgcctgtagtcccagctactgaagtgggaggattgcttgagcctgggagatggaggctgcagtgagctgtgatcgtgcccctgcactccagcctgggtgacagagtgagactttgtcttaaaaaacaaaaaaatgaagttctatggtaattattattaactaacagctttcttatttcatattaattactctgcaagacacttccagcatggttgccccatctgacactcattcacctcgttgatttttttttgttgttgttgttgttctataacattcattcatgcacaaattcattttacaagtatgtattcatctaacattgacttaactatgagtatgacagaagacacaaaagaaatgtacacatctgcctcacctcccttggagtttatcttctctagtgtgttcgtgttttccggttcagatcataagcatcatgagctaagggaccatgttttatgcccggacagccgtagcacccggcgctgcggattggagacactgctaggcacccgggctggaagattgggttctagttcttgttttgccgcttacaggctgggtgacagggagcaatcctgttgtcctcaataggtgtgtttcctcatctgaaagtgtacacaatccatccatgactgctgtgacgattacaggtctacacaacgcgcatgtggatttgtcttgcaaacgtccaccatcaggccctcaggaaacagtgccgcgcgtgcccaccaaggggcagcagatcgcagtgcagaggcccgcggcgctcgacgtcagggcgcacgtcccaccccgtgaccatgactgtgaccgtgaccgagagcgtcgctggggcacggccaggcggcgcggcgggagtgcacaggacgcgccatggcggccgaagcctcggagagcgggccagcgctgcatgagctcatgcgcgaggcggagatcagcctgctcgagtgcaaggtgtgctttgagaagtttggccaccggcagcagcggcgcccgcgcaacctgtcctgcggccacgtggtctgcctggcctgcgtggccgccctggcgcacccgcgc

SEQ ID NO: 35461 - DNA, 2300 bp, Homo sapien
tcaactctgcaatattaaggacaatataacaccattattctaacattccctttaaatcattagtgaaactagtttggattatactagcatgctattattggtggttctaatttaatgattaatctgtgaaatagcaaacattgcataaaagcatgtatttcaggcaaatttccccttttgttgccaaatttggcctcagtatgcttaggatatagggaggaggcatttctctcattacctgggaacatgaattcacttcttagcaaatatttgttgacaaatggcttctgcaagaccctgatggtatcaggaggtgactctgagttttctgagaggtcagtagaaagtatctgatttatattgggtacagaaaagcaaaagaatgttgcagttttctcattttcattcagaaactctggaacctaaattcaaggcttcataaagcagttctctacttaaaagagaagcataatctttatcagagttccacagcagcctggagtagcacaactctattcctttcacacaaacttgaactgtctaacaaaatcatgcacataacttaatcatgtcttagttgtttgtttttgagacagggtctctctctatcccccaggctggagtgcagtggtgtaatgacacttccgtctccaacactggggctcaagcgatcctctcacttcaacctcctgagtacctgggactataagggtgcaccaccatgcctggctaatttttaaatattttgtagagacagggtcttgctatgttacccaggctggtctcaaactcctgggctcaacgtcttagctgttctaacagtttctcagcatggactccacttgtatacatcatttctagagaaataaagtttatttctataatacaaaaaaagtgcacattacaagaattaaggaagggaaatttcacaaaaatttctgcccacaaacaaagtcctcaagttgttctagtctccattctcaccttttcaaaagcttctgctatagttttgtttttaaatttcataaaattgagaagaaactttcctaaggtgcacacatcttaaaagagtatgactcggtgaattttttacatatacatacacctgtgtaaccaccgcagagcaagacagaatatttacagcaccccagtttcccacatcaccagggatcactcactatttggcagtacttattttttcccaaaaatcactaatacaccaggctggggaaaaaaccgagagtccgtttctataaaaaaaaatttgaaaaattagccaagcgtggtgcagcgagcctgtagtcccagttaccgaggaggctggggcgggaagatcacttgagcccaggagttccaggttacagtgagctatgattgtgccactgcacgctagcatgggcgacagagggagaccctgtctctaaaagaaaaaagaaaaaaaaataattaaaacacaccagtgctttggaagcactttaaatcctggacattggattcaggtcatttactgtccgacctcgttattcccagtttccgcttctgccctgaaccccacttcacagggctgattgctaggctgtctacgcttgtaagaattcctgggagccctagcacgggcgcatacactcctagcaaatcgttccctttctcacccgcaccctccgcgcccgagtgagcctacctcgcttacagctggttgccggccattgcctccgccaccaatgacgtccccaggggcgggtacgcctccgcttccacctccgccacttctccgcgccccgcctccgcccgcgccccgcctccgcccgcgccccgcctccgcccgcgccccgcctctttcccgcgccccgcctctttcccgcgccccgcctcagttcccgccccctctcccggcgccccgtctccactcccgccccgtacctcgttgcacagactccacccacttccccaagcgccggggtttgcgcagcggcggaaatgggcagggcggagcgagcgctgcggctaaagcgaaggcggggaccctacccatccctagtcctgtcggctcctcccaccccgggtcacgccgtgacaggggcggaagcggcggcggcggcggcggccgagaagaggctggggctcgcggcgcggctgcagccgtcctgtgcgcgcggcgcgcggctccggagaggcgcccgcagtccagggcggcgcgcaccgcctcgctggcgctcagaggtgggaggctccccactccgggggcgtgcgtgggggccgtggcggatttcgggtgacagcgttgcacaaagcagcttggt

SEQ ID NO: 35462 - DNA, 2300 bp, Homo sapien
atgtaatttatatatctccacttgctgggtccttaggtcttaaaatgaagaaaaaatttttagtatactaaaatgtcttccttcttgatttttcaaattaataaacacacctaaatataaccaattggtttcatgctcaacattatacatatatttctaatttttaattcaagcatttaaaatttggctttggttttcttttaatgtgataaaaaagtgggattttttggtaaatatataagtggatatatcaatatgtagatttcattataataatccctaggtttttctgaagcagcttattcaaaaagattttttcttttttttgagacggagtcttcctccgtggctcaggctggagtacagtggtgcgatctcggctcactacaacatccacctcctgggttcaagcgattcttctgcctcagcctcccgagtagctgggattacaggtgtgtgccaccacgtccggctaatttttgtatttttagtagagaccaggtttcaccaccttggccaggctggtcttgaagtactcctgacctcaagtgatcgcccacctcggcctcccaatattgaataattcaatattgaattattcaatattcaacatgcagttcaatgattcaatattaaatccccaattgcctagatatcttttgttgattctcccagcaaggcaaataattattgatggtaattttctcatgtacctcctgaagaagccttctctcccactcgcctttctgccactaaaatagatttaaaaacacaaaacaaaactggtcaaagccttgagttatgtgtgtatacgtggtgtgggggattccccaactggagtggactggggagtcctgcaggcttacccaagggaagactggacttctatgtggctggtttccacatcactgaaccccaactttctacagctgggtcggcctcttccttcctctttcacctgtcagctgcccggccgttgactaacagctaccctaatcgggccacccctcctccaggtctccaatcccagaggagttaccccagcaacctggcaatgctcatcaagtctcaacgcgtggtggctgtgccagagaattactacaacacctgcaaggctgtgcgggctcctggccgcaccctatcggccgggaagaacaagcgagggagttcctactccaggaccgtggggttctcccgcggctctgacagtccccaggagggagccccaaactcccggtgccagctgcagccgcctcgctttccgagaagctttcggaagcttttcgaagtcggagaagcaactgccccggggctcacctttgcgctgaagaggtgccgggagtctcggggaaaaggcaccgctgtacagaaaggaaacattgtaggggggttagccgaccggcaacatcgcgacgaacccggcgaccccacgccccaacaccctagcccgggaattcccccttcttcagacagatacccaccccgcaccctcttttaatccggggcaggaggtatccgtccctggggcacccgcccacctcccaccacggcgaggggcgctgcacagggggaaagggagggcttgcaccccaaccaagctgctttgtgcaacgctgtcacccgaaatccgccacggcccccacgcacgcccccggagtggggagcctcccacctctgagcgccagcgaggcggtgcgcgccgccctggactgcgggcgcctctccggagccgcgcgccgcgcgcacaggacggctgcagccgcgccgcgagccccagcctcttctcggccgccgccgccgccgccgcttccgcccctgtcacggcgtgacccggggtgggaggagccgacaggactagggatgggtagggtccccgccttcgctttagccgcagcgctcgctccgccctgcccatttccgccgctgcgcaaaccccggcgcttggggaagtgggtggagtctgtgcaacgaggtacggggcgggagtggagacggggcgccgggagagggggcgggaactgaggcggggcgcgggaaagaggcggggcgcgggaaagaggcggggcgcgggcggaggcggggcgcgggcggaggcggggcgcgggcggaggcggggcgcggagaagtggcggaggtggaagcggaggcgtacccgcccctggggacgtcattggtggcggaggcaatggccggcaaccagctgtaagcgaggtaggctcactcgggcgcggagggtgcgggtgagaaagggaacgatttgctaggagtgtatgcgcccgtgctagggctcccaggaattc

SEQ ID NO: 35463 - DNA, 2300 bp, Homo sapien
ctctttaacttgctcttttcgctcaacattaaggttttggagatgcatccatgttgatgcatctaagactttggtgtgttaataccaaagagtagtattagaattacattgtgtgaacctaccttggtgtgtgtattctcgtgttcatgaatataagggctgtttctagtttttggctgttacatacaaatgctactgtgagcattcttgcctggcacaaggacaagaatgtctttgaaatacagtccaaggactagaactgctaggccatatggtctaacaatcttgtttatttaggcaacttttcttagtgaaatatacaaacagaagacgcacaaatcaaaatgcataactcaatgaattttcgccaagtactcatttagctggctcccaggaaagtaacagaacacacaccagccccttagaagccccgtgtcacttttaatcacagtctttaacccttgctcccctagagtaactacctacttttctgacttacaatcatatagttttgttttgttttgtttttttgcttgcttttaagttttacatgaatggtatcctacactatgattgttctagcttctttttttttttttttttttgagacggagtgtcgctttgtcgcccaggctggagttcagtgttgcgatcttggctcactccaacttccgccttccaggttcaagtgattctcctgcctgagcctcccaagtacctgggattacaggtgcgcaccaccatgcccggctaatttttgtatttttagtagagacgaggtttcaccatgttggccaggctggtctcgaactcctgaccttaggtgatccacccacctcagcctcccaaagtgctgggattacaggtgtgagccactgcacggggcctgttctaacttcttttgcccaacattgtgagatgtgtccatgttgtaatgtgtagtcatagtttgttctcattgctgtgcagcatgccattgtttgactataatacaatttaagtgtccattgtactgttgatgacctttgggttgtttctagcttttttccttttttttttttttttttttttttaagacaaggtctcttgtccaggtggagtgcagtggtgctgtcacagctcactgcagcctcaacctcctgggctcaatcagtcctcccacttcagcctcccgagtagttggaagtacaggcatgcaccaccaagcctggctgatttttgcaatttttgtagagatggggggtgttacccaggttggtgttgaactcctaggctcaagcgatccacctgccttgacctcccaaaatgctgggattataggcatgagccactgagcctggccagtttctagctttttttgaatacaaataatgctcctttgaacattttgtaatacttttgttggtgcagatatacaagagtctctctctggaaaatataacccagttagaattgctggatgtgtcatacgtattttcagttctaaaagataatgtcaaatgattgtgcattttaaatgttcgtattttgtcaccgcccttcgtggttgttatatgcctttattttccaccaggaacatccttatgatctcatgtgcctgtctccccacactctcactttttttttttttttgagatggagtctcgctctgttacccaggctggagcgcagtagcgcagtctcggctcactgcaacctccactttccgggtcccagtgattctcctgcctcagcctctccagtagctgagattacaggcacctgccactatgcctggctaatttttatatttttagtagagacagtttttcactattttggccaggctggtctcaaactcctgaccttaggtgatccacccaccttgacctcccaaactgctgctcaacctcccgaagtgctgggattataggcgtgagccacagagccaggcctccagacactctgatttatacattgtttcataaaaatgcttttctttgccagcctgataggtgaaaagagatatcttattgaagataaatggatacctgagactatattttataagcaaccctaatttaacacttggttttcttttgtagcctgagacctcagatcattgttccctcccagaggatctagtgagtatttccggatggtgtggattggggttaattgtgcctttgatgataagtgttacaaggaaatgatagtaacagcttcatgaatttctttctctttggttgctgatcagtgactttttaatctaacatggtaactatattatgaaaatgttagcaatagtgatattatgggta

SEQ ID NO: 35464 - DNA, 2300 bp, Homo sapien
tgttgtttaccaataacactggaatatagatgtggtggaaatcaaagctaaagtggtaattcccagggttaatgaagatgcgatgaagaggcatttgactgctgttagggagagtgtatgtttacgaaggaagatttggcagtgtgcatcaaaaacttttaaacagacactctttgacccagcagtgctatttctaggaatttatcttaaacagctaatcaaatgtaaatccaaagataggtacaaagaaatttcttttcacattgcttgtaatagtgaagtaattggatgaaatgtaatgcctagcaatagggaaatggttaagtaataagaaaatatacagccattgaatgcatatttagtgacacaggaaagtattcatggtattgtacacattaaaaagcaggttagaaaacggcactttcataacatttttttcagtttcatgaaggcaaatatctattatgtgaatattctctgttaatagacacagaaataaggataaagtgtacctctaaatgtaactccactactgacataatcaggggttagtgattgttatttacttctatgaacctattcattttatagtcagaaaaatgccataagagttattttaggccgggcacagtggctcacacctgtaatcccagcactttgggaggccgagacgggcagatcatgaggtcaagagtttgagatcagcctggccaaaatggtgaaactccgtctctactaaaaaaaaatacacaaaaaattagccaggtgtgtggtatgtgcctgtaatccctgctactggggagggtgaggaaggagaatcacttgaacctgggaggcggaggttgcagtgagctgagattgtgccattacactccagcctgggtgacagaacaagactctgtctcgagaaaaaaaaaaagttattttaaaaacgtacctccatgaggagtgggcattcagtggatatagaatttgtcttacaagatgagaaagttctagagatctgtgcacagcagcatgaatgtacttaacactactgaactgtacacttaaaaacagataagaaggccgggcgcagtggctcacgcctgtaatccctgcactttgggaggctgaggcaggtggatcacgaggtcaggagatcaagaccatcctggctaacacagtaaaaccccgtctctactaaaaatacaaaaaaaaaaaaaaaattagctgggcatggtggcgggcgcctgtagtcccagctactcgggaggctgaggcaggagaatggtgtgaacccgggaggcggagcttgcagcgagccgagatcgcgccactgaactccagccagggcgacagagtgagactccatcttaaaaagaaaaaaaagatagctgggcatggtagctcatgcctgtaatcccagcactttgggaggctgaggttggcagatcacttgaggccagtaccttgaaaccagcttggccaacatagtgaaacccatagctactaaaaatagaaaaattagccagatgtggtggcgagcacctgtaatcccagctactcaagaagctgaggcatgagaatcacttggacccaggagatggaggtcgcagtaagccgagattggaccactgcactccagcctgggcaacagagcaagactctgtctcaaaaaaaaaaaaaattaagatgataaattttatggtatgcatttttttaccacagttaaaaataaaataatttttccatgctatggaaattaaagttgagaatagcatgaagaaagaatgagaaaaatacttaatttatgtacgttttgtctaactgggtggaggaagcaaaggtatttatgtagggtagagagtggagcttgtctaggcttactttttggtttgcttttgccctttaattcttctggatttggaagttacagcttgtaggagttgcccatttgtgttacctatcagttccaggcatgaaccgatacttccagcctttctaccagcccaatgagtgtggcaaagccctctgtgtgaggccggatgtgatggaactggatgagctctatgagtttccagagtattcccgagaccccaccatgtacctggctttgagaaacctcatcctcgcactgtggtatactaactgcaaagtaagtaagggcatgttagccaatagcactggacagaggaggaccatgttgaaaaggaggggatacttcatctggggatggaaccttttatgccagggtttctcagccgtgcctctgttgacaatttgggcagataattctttgtggtggggactgtctttgc

SEQ ID NO: 35465 - DNA, 2300 bp, Homo sapien
acccaaggcttttctttcttttttttctctttcttttcttttttttttttttttttttttttttttttgttttacagggtcttattctgttgcccaagctggagtgcagtggtgcagcttgtagctcacagcagcctcgaactcctgggcttgagcagtgctcccacctcagcctcctgtgtaactgggaccacaagcacatgccaccacactcagctaattaaaaattttttttttgtagagacagtgtttccctatgttgtccaggctggtcttgaactcgtggtcttaagcaatcctcttgcctcagcctcccaaaatgctgggattataggtgtgagccactgcacctgggctactcaagttcttatgcttttcagtgctattttgtcattaagaaaacatctagatttgtgggcgtgggtggctcatgcctgtaatcacagcacttcgggaggctgaggcgagaagatggcttgaggccaggagtttgagaccagcctgggcaacatggtgagaccctgtctctaccaaacataaaaaaattatctgggcatcgtgctgcacacccatggtcccagctactacaagaagctgaggcaagaggatcacttgagcacaggagtttgaggctgctgtgagctgtgatcatgccactgcactccagccggggcaacagagcaagaccctgtctctttaaaggggaaaaaaatctagattttatttattttcttgcaatttaattggatagtaattggttttttgttgtggtttgcctcattttttttggttgcatggtaattatctataaatagattataaacttcttgatgatagagagcatattttatactttataaaaatattttcatgtggcagaaaatagtgacaaaatcagagaactctgaacttcctgtgatcctagaattgagagttaagccaaatatacaaaatctttgaagcctcaggtagattgggtgcttggtcttcaactccattccactctgatcctagggtgtcatcctgtactgcagatattagaaagcaaatacacacactcttccccaactccctacagcaggtttctaaacatccatccagcccagccaatctgatgcacttgcatgagatgtagaaggtgtaggttgactttcgcttcccttctgctgcctctgttgagagcacacaatgctggaggtgtttggttcttctgcagcagggttcgtgaaagttgcagggtttagtcagtaaccacaagtcaagaaggaggccgtaaggcatgcatgttgctggtgcacgtggttctgtatgtggcatgattctggagctggcagtagtagtaatggcgtcctgattgtagcaacgataatggggtctggagccagaaatgtccaattcccaatgtttgtgatgtgtttcactacttatgaagcatattgatgtatcttgtaaattttagttttaaagcatcaccctgattctcagaggttagtggggcagatactaccttcattttatagatgtatggcagagatgagtggcaggcttggccacacagtagaatgtattaggaatgatgcataaagttctcctgactccatagttagggctctttcctcctcaagtactgcttttcggggttttgttttttttttttttttgagacagtctcgctctgttgcccaggctggagtgtagtggcgtgatctcggctcactgcaaactccgccttccaggttcaagagattctcctgcctcagcttcccaagtatctggcactacaggcacctgccaccacacctggctaatttttgtatttttgtagagacagggtttcaccatgttggccaggctggtcttgaactcctgacctcaggtgatccacccgcctcggcctctcaaagtgctgggattacaggcatgagccaccgcacctggcctctgctgactcttcttatctaagatgattattcaccatcaggacgttttttgcccactcttccctgtggttgccacttctgcttagccaggcattggcacccttgtgcagtgagcaacctgcacagttgcacatggcagcccttgttcttgccagtataacagcatgggttgttgataccagtgtagtggtagtgtgaggttctgttgctgtttgtttgttaactgttaattattttccacaggtattagtcactgtaccactggctttactacagaaaggtgccattcagtttaatccaccgttgtcagagaagaagatgaaggctatcaacagcttaggcgcaggcatcattgaaaag

SEQ ID NO: 35466 - DNA, 2300 bp, Homo sapien
gggggcccaggaaaccccctgcccctgcaggctgaaagtgcctgctcctgaggttgcagtgagccaagagcacgccactgcactccagcttgggtgacagagtgagaccctgtctcaaaaaaaaaaaaaaaaaaaaaaagaatgtgcctgttcccaggcctctaccctctctctacccactcccagggcccactccaaggcggagcaaagttgtggccaggcacgggcgctgctgcaacccagctgggtgtgcacgtgttcagggcagcactgacacaccagccacctgccgccttggccctctctggactttgggcaccaacaagtgcgagaaagaggctggtggggctgagggtggctccgcgtgggcctgcaggcacccctcagcacaaacagcctgggcgccatggatgacatgttgatggtgggaggcagacacgttcctggggggaaaggggtaggtccctgcccaccttcaagccagggatggcctgaagcctggggggcctggtggccagttccaggtagagtctgcagcccagagtgaaaactagtggtgctttttctgggcccacccatgggccaatcagcacacacttcctcccttctgagcccataaaaaccccagactcagccagcgctcaggcctaccagctgcaggaaggagctacccactttggtctcctcaactcgtcaggaccacctgcctgcagaaaggagctgcccactatgggtctcctctccactgagggcaggacgctagtcgggacaacccccctgcagaaaggagcaacccacttcaggtctcaggagagctgttctgtccctcagtgaagctcctgtccaccttgctcaccctccagttgtttgcgtgcctcactcttcctggacacaggaccagaactcaggacctgccaaatggtaggattgaaagagctgtaacacaaataggggtgaaacacaaccccccactcccaaccacgttgcaggcagcaagaaggagagatgagctgtggagtgtggataggatttgagtgggataaatagtgtggaaaatggcataccgtttgagggtagaaatgacactattcgcgtatgttttggaaggggaacaaaaggaaaagggaagattcaaaggaaatgtctaatttttgtcctgcaacccagagtccaggcaaatttcactgatcacatttctattaagtccactgagtacaaggatccttcaggtgagctagtggttgaagagttgggagaaaataaaggaaatcacatacaaaagaaggcagcattgagcagggaagatactgctttgagtgtctgcagtgttgaatgtgtaaaaagcatctgcatagatgacctagaactctgggagaagggtctggacccggccaaataacatatttcctctattataaaacagagagtgtgtgtgagagaggagaggagaaggaatggggtgggagggagcctctccccttatatttacaggggtgtaaatctatgtggctggctatgtgaacctttaacgtggcaggtaggatctttttcctttcggtgcaccttacaagcgatgcggtcctcagaaatacagatttgggagttatctatcacccagcatgatttctggagcattgatgagaccgctgattaattctcctccgcctcagagtaacactgtcgatagcgacttcggagatctctaaacttctttaccgcgcccgccgcgcccctccgcggcccgggactgctcatcatcttttccaggaagcgaccgtggaaacaataaacacgcaggccccctagcgtccttccgttccgcgctgccaggccgcctcgcctcccgctcccgcccgccccgcgggacacagcccgcccgcactccggggcccgagcgccgaccacactccaggcgcagccggggagagccccgcgcgcgcatccctccgcccgcggccgaggcgacccctcgcggtcccgcccgcccgagcttcccgcggaggcacccggccgccccgcctcccccgccccgcgcccgccaactcccagctcgcggccctgattggtcgccgcattcccgctctccttcccgaaccgccattttgaaaatcttgttgattctggggagccgagcgcgcggcgcgagcgtcacgccagacagcggcccgcgcgccttctcctcggcgtcggccgccgccgcctcccagaacctcctcgtgccctcgcgtgccaggcccgcggcggccgaaatccgcggtaagggctgcttcgggacgccggaggcccggtcgcccctgccg

SEQ ID NO: 35467 - DNA, 2300 bp, Homo sapien
aatgctccagagaatgaatatccattcacactgtagactccttaggaagatctgagagagtttgttcacataatattatagcattcaacgtgtttatttagtcttattaaattttgactgcaatttaaaaaaaatttgcatagttgcatggttgaaaataatcagtggtgatgttactcagttgtgcaaaatatttgggataataggcagcactattcgtgcttatgttctcattcatattggcagcagcttcttcccttatcctgttaacaagagattataatttatgaatggtaatttgaaaagtggactctgtgttgaactttggtttaaggctcaggagatttgcatcaacaccaatgaataaactaacctcttagaggttgctttttatctttcctagttcctgtccaccaaaatggtcactataccaagaaaattccttgaaatagattatctcagaacctaagccattgctaaatctgaaggttggacttcctttgggatggttttcatttacattcaccttcctcatgtaactcagatttaggtctcattctagcttggcctgtgtctggtttgggccaatctcttaaatcttcctggacatcagtttccttattttttttttttttttgagacagagtttcgctcttgttacccaggctggagtgcaatggcgcaatctcggctcactgcagcctctgcctcccaggttcaagcgattcacctgcctcagcctctcgagtagctgagattataggcacccaccaccacgcccagctaattttttgtatttttagtagagacggggtttcaccatgttggccaggctggtcttgaactcctgaccccagatgatctgcccgccttggcctctcaaagtgttgggattacagatgtgagccaccgcacccagcccagtttccttatttttaaaatcaggttatttgctaaaatagctaggaagacttttcaagctcaaatatcctaccgtgggttcttttatcatcttattgcccctgtcctttttctcttcctccctgactggtgagctggtcctcctacctgccctagcatggcacatgtagatacactgtgttattcagcactttgctttgacctagaggttttcttcaacttggagggctgagaagcaatgtttgcttgtgtcgtttggaatggtgcctgttggcgtgcacagatcctttccacaaagggcctgtgagtcccttccttttaggaagcacattcctgacagtggttgcaaaagtagagagggattgcagagtgaacacagattcttgtgtcagagcgacattcctaaatggcaatgttcagcagacttaggtgattgtgatctatgggggatatggggaatgagtaggtatgcgattcattatgaatgtcacacaaatgaagtgtccaagggtttggagcaaggaagcacttcataatacctcacagcttctggattattttgttacatttttgtttaattgagggtacaaccagttaagttacaaagcacttcaagtgaaatcattgtttcatcaagaagtgtctgtattttatgaggtaaactaagattattcccgatttgattcacaggtattctaatttcatcattagatgcaaaaggacaagtgaggtacaagctgttttttgatgagatgtgcatgggaagtgtttctataaaacagttgtctgccacgtgggaaggcaggtctgggctgttagaagtagaagaaagagatttaaagagctgggaaggagggagaaaataaagaaaggtggcctgtgaggatatgtacagacagagaggtagcaggcgcttaaggccaagaggtgagctgtccctgtctgggcagaagaagtgcgctaggggcagctgcctgcaccccctgctctgaattcctgcaacagcggtcccaggagaacaagagacaggtcctgacaagcagtagagtcggtgcagcgcgcccgggttcggatagggttaaggccaacacctgcagctgaagtacgacccacatgggaagtaggaagtgcggcgcctgagcttcctgtataaataaacgcgctgctaccgctgctggcgagctgtgccccacgctcccgctgcaacagtcccgggcatcgcagctgccagtcaaggctaggaggcggtcggggactccgcctcctcccgacccgtaggtctgggagcgcaagtcctgttgcagtcttgcaaagtgtaaagctgtcagccgcagagcacggaggaaagacggagagaatggaagagctcctgtccggtg

SEQ ID NO: 35468 - DNA, 2300 bp, Homo sapien
ttaatcaattccctgtatttaacaattaggttgtttccaatttacagcattaccaggattgcggagattgatatttttgtgtttatttagattatttttccataataaattctcagaaatgaaaatattgctgaaggatcaaaacacttttgagatttttgcacattttgacaaattttgacctaacagattcctagtagcagtgagtgagagtactcatttcatcatatacctgacagcagtgagtattattttaaaagacatacatgccaagttgagggaataaagtgttatctctgcttcatctttcatttctttgattaccagtcatgtgggacttttaaaacataactgtgttaatggtcatttctatttactcttttgtaaatgatcattcttttatttgatcaatacttattgattgcccactatgtgtgaagcactgcagaaggtgtaacattcagcagcaaatgagagagagacagcccctgccctaatggaacataaagttttttttttcttttgaggacagagtctcagtctgttgcccagactggagtgcagtggcacaatctcggctcactgcaacctctgctgcctgggttcaagtgattctcgtgcctcagcctctggagtagctggggtttcaggcgtgtgccaccacatccggctaatttttgtatttttagtagagacggggtttcagcaggaatcactgctgacctcaggtgattcgcctgccttggcctcccaagttgctgggattacagacgtgagccactgcgccaggccttttatggtggtttttgatgtgagtaagtgatatacaaaagtgtaggaaaattggtctccctctctttctggtttattttttcctttatcattgattagaaagatatttgaaattctagattataaattcacatatttattatttcttctgggtctcctgagtgtagtttttacacttaataattaaatccatccaaaatgtacattattgtatcttgtaaggcagtgatttatcttctcactgaaacagttaactctctattttaacactatttatgaaataatccttcctcctcttgaatgattagtcatctcacctttatcatatactaagttctttttgagtagatatatattaggatccatttctgggctatttgtttctaccatcaatttttatgtgtgtactacgttattgtagtgtcataatatgttttattatctggtaatgtaagttcacttaatttatgtgagaatcattaattaaactggttttagtagctgctggagttcagcctgactgatgagattgcatggtttttatgatgtcgtataaagatatataaaagcaaaaccttttctttttttcatatggacttttttcctttgactataatgtagcacatgttgtaaaactttggatcttccagaaaaacacaaaggagaagataaacatcacccaattctgtcaccagagagagccttttaaaatattttgaatcttatacctctggccttttagagatgcacatgatacatattattttatattatcctgcagggattgtgccttttatttctaacgatatctcagtggaacactttctatgtcattaaatactcttagtcttttaaaacattaatttaatgatttcatatgacatgtagaatgtatcatactatatttaaccatccttaggtttatttgcagtctctattttaaatggtgccacgatgaacattcttagggagtaggttagaggtttttttctctttttcactcatttttcttctttctccatcgtgtttggaaagaggtattttggtaaactggagaacagtgatagctttgatatgctaaacgcatcagacttatcccaaggaaacctgttgatatggtttggctgtgtccccacccaaatctcattttgaattttaattccaacaattcccacgtgtcgtgggaggaacctggtgggaggtaattaaaacacggggggtgggtctttcccgtgctgttctcgtgctagtggataagtctcacgagatctgacggttttaaacacgggagtttccctacacaaaccgtttctttgcctgccgccatccacgtagaatgtgacttgctcctcttcgccttctgccatgattctgaggcctcccagccacgtcgaactgtaagtccattaaacctttttcctgtataaattatccagagttgggtatgtctttatcagcagcatgaaaatggagtaatacacctgttaagagtagcaaggaatgatgcc

SEQ ID NO: 35469 - DNA, 2300 bp, Homo sapien
aatttactgtctcactaacttacttcttcctcatctgccttttcttcctatattccttaaatgagtgaatggcaacaccatttaaccaagtgctaaagctaaaaacttgggcaacatgttgacttttgtgttgttctttctaaaccccaaaccataatatgataatttgatatcatttcttgggtacctcctacatggtaggctctgtagtaggtaccatctcaattaatgttaaaaacaatcctctgtgcaacctattattggtccattttccagataaggaagttgaggcacagagaagttaaatagcatgctcatggtgacacaggcaataagtggcagagccatatgcactactttcagcttcctcaacgtatctcaagtggttgcctagaagttttcttctctgtttgacttacttttttttttttttttttttgagatggagtttcactcttgttgcccaggctggagtgcaatggcacaatatcagctcactgcaacctccgcctctggggttcaagtgattctcctgcctcagcctcctgagtagctgggattataggcatgtgccatcacgccagactaattttgtatttttagtagagacagggtttctccatgttggtcagactggtcttgaactcctgacctcaggtgatccacctgcctcagcctcccaaagtgctgggattacaggcatgaggcaccacgcacagtcgacttactgtttctcatctttccgatgggactcaacttaaaatgtacttcttccaggatctcggtcttccaagtctggtctggataccttccccatccccagcccctacatctcatccccatgatcatccttgtcacactctattttagctttgtttaattgttggcatccaccattatactgtgagtcttgtaagaatgaagactgagctatttcccttaccattaaatccctaggccatagcatatagcccatgctaagtattggtttagtgaatgaatgtgagagtggaagactaagaaacataaattctgttgatttctaaattactgcctatggccagccctttgatagtttcctttttctagaactcttctgtatcctcagagctgttccgtcttagctctcatgcattcaactcattgccaggttctggaggctgctgacttgcagagagcaaatccaagtatttaccaagtttgtttaacaaagcagaatgttttgcttttttatgttctatcataaaatcttggaagagacatgactttcttgtttatcctttcttcatggtgtcattttataggattatatagtgtcaatgttcaaatggaacttagaaaccatttgattaaatccctcagaggaaagagaatcccagaaagatatggcaatttacccaaaatgctgttgctagcaaacagtagcctatttctactttatttactcagcttctcactattattttgccttttgggggtcaggttgatctccagccaggttgggtgggtggctatacctgagagcctgggctctaccgacttgtctctggaggcactcaagagggctcagtgctatgcctcacttcttcaaggtcatccaagactgattgtaaggcagtcttgttatctggtgttgtaacctcagagcagcctgcagcatgaccagtcacacactgaacagaacaacagccaattctgtcacccgtccaaggatttgtagctcagccacgacatctggggaaagtgtttacagagtccagagctggactcactgaaaccatgtactcacatctggagtctagacagcgtggctctctcatctgggctcacagccttttcacacctcctgcgcttctctctgactccttctttatcccgtttttcactttgccaaagcttgttccctcccgccatgtgcctctgtctcgattgttttcttctttcatttttttttcttttttcaaatcacattgggcttaagcttttccagatactcctgacaaacttcttagaaacaggttttcccaacaatgaggagattgtagaggcatgacgtcatcgtagacaatgtcctagcaacgttctgatacaacgttttctactaaccagctgcatgaccttaaaaaagatatatcactggggctttatttttcttacctttaaaatgaaaaagttagactacatttggcgtagtccaaaagtatgtttttttaaaaaagcaacaaaatcctttcttcaaacaaaattgtataaggaacatcaatatgggggaaaaatgaagaaaagcttttctgattaac

SEQ ID NO: 35470 - DNA, 2300 bp, Homo sapien
agcagatattgtattttctttttacaaactgaaggtttgtggcaaccccactttgagcaagcctcttggcatttttccaacagcatgtgctcagtttgtgtctttgtgtcacattttggtaattcttacaatatttcaaactttcacattattgtaatatctgttatggtgatctgtgatcagtgatctttgatgttactactgtaattttggggagtggcacaaattgcatccatataaaatggcaaatttaatacacaaatgttgtgtggttttgtgtgttctgaatgctccaccaaccagccatttggccatgtctctccttcccttgggcctccctatttcctgagacacaacaatattaaaattaggcaattaaaaaccctgcaatggcctctaagtgattaagtaagagttgcacatctttcactttaaatcaaaaactagaaatgattaggcatagtgaggaaggcatatataaagccaagatgggctaaaagctaggcctttagtaccaaacaattaaccaagttgtgaatgcaaaggaaaagtaattcaaaaataatattaaaaagtgctactccagtgaacacacaaatgataagaacacagaacagttttatggctactatgtagaaagtttaagtggtctggatagaagatcaaaccaaccacaacactcacaacattcccataagtcaaagcttaattcagagcaagactctaactctcattaattctatgaaggctgagagagatgaggaagttgcacaagaaaagcctgaagctagcagaggttggttcatgacgtttaaggaaagaagccatctgaggttggttcatgacgtttaaggaaagaagccatctctagaacatcaaaggataaggtgaagcagcaagtgctgatatagaatctgcagcaagttatccagaagatctagctaagatcattgatgaaggtggctacactgaacagccgattttcattgtacatgaaacagccctatattggaagaggatgccatgtaggacattcatagctagatagaagaagtcagtacctggtttcaaagcttcaaaggacaggttgactctctgttagggactaatgcagctggtgtcattaagttgaaactagtgctcatttaccattccaaaaatcctagggcccttaagaattatgctaaatctactctacttctgcttcataaataaaacaacaaaacctggatgacagcacatctgtttacaacatggtttattgaatttttaatttttaatttatttattttttaagttattttatttaattattttatttaatttttaattttttatttgtatttttatttttatttttttgagacagagtctcactctgtcgcccaggatggagtgcagtgacgcaatctcgactcactgcaagctccgcctcctgggttcatgccattctcctgcctcagcctcccgagtagctgggactacaggcgcccgccaccacacctggctaattttttgtatttttagtagagatggggtttcactgtgttagccaggatggtctcgatctcctgacctcgtgatctgcccacttcagcctcccaaagtgctgggaggtttactgaatattttaagcccactgttgagatctttcatttgggaaaaaaaaagcctttcaaatattactactcactgacaatgcacctggttacccaagagctctgagggagatgcacaggagatgaacattgtttccatgcctgctaatacagcattcatcctgtagcccatgtatcaaggcgtcatttcgactttcaaatcttattatgtaagaaatacatcttgtaaagccatagacagtgattcccctgatggatctaggcaaactacatggaaaaccttctggaaagggatcaccattctagatgccattaagaacaaccatggccgggcacagtggctcacccctgtaatcccagcactttgggaggctgtggtggaggataacttgagcccaggagttgagactaaaaccagcctgagcaacatggcaaaaccctgtctccaggagaaaaaaaaactaactggagccaagatggccgaataggaacagctccggtctacagctcccagcgtgagcgacgcagaagacgggtgatttctgcatttccatctgaggtaccgggttcatctcaatagggagtgccagacagtgggcgcaggtcagtgtgtgtgcgcaccgtgcgcaagccgaagcagggcgaggcattgcctcacctgggaagcgcaaggggtcaggg

SEQ ID NO: 35471 - DNA, 2300 bp, Homo sapien
ctcgaggtttgtaaacacaccaatcagcaccctgtgtctagctcagggtttgtgagtgcatcaatggacactctgtatctagctactctggtggggacttggagaacctttgtgtggacactctgtatctagcatcatctagtgggaatgtggagaacctttgtgtctagctcaggggttgtaaatgcaccaatcagcgcaaacagaccactcagctctctgtaaaatggactaattagcaggatgtgggtggggccaggtaagagaataaaagcaggctgccccagccagcagtaaaaagccgttcgtgtccgcttaggtgctgtggaagctttattctttcgccctttgcaataagtcttgctgctgcttactctgtgggtccccactgcctttatgagctgtgtgctactcaccgtgaaggtctacagcttcactcttgaagccagcgagaccacaaacccaccagaaggaatgaacaactccagacaggccgccttatgagctgtaacactcacggggaaggtctgtagcttcactcttgagccagcgagaccatgaacccaccagaaggaagaaactgaacacatcagaaggaacaaactccagacacgccgcctttaagaactgtaacactcaccgcgagggtctgcggcttcattcttgaggtaagtgagaccaagaacccaccaattccggacaccatgttggtcaggctggtctcgaactctccctcggccccacagagtgctgggattcaggcatgagccgccaggcccttaacttttattccaaaaaaatttcagttaaaacttccagtacatagtatttgcatagcagggaccctgaagtgtttgttaaatgaatgtcacatatatcacatactgtgataggaataaagtcattcgtttgaaaggttgataaatacaatgatagactgctagaacttcatgagtcttaagagaatatctcaccagatctcatcttccagatttaaaaaggggggcacagacttcagcaggaagggctgatttaacgacatctactataatgtgagtctgggccacactctggttttccagtttcagtaatgatgcatcactactcttgaaaaaccaccagaaaccaacaagtaagcacccaaaaagatgtttaggaattcagaagtactccttttactctagccttaaaattatttgctcttgcattgtggattacccatcaacaatgtccagtccttaccaggagtcagggagagcgtcaaatgctgggcatactgaaatgaccttaacccagtacttggccacctacaggacactgtaatggagagcaaagcaggacagaggtaatgcaaaacacaaaaacaccaaaaaattggaaatctttggagccatttgccttctagaaccttaaaggcgccctatagtcccacactatagaatattggaagagcagtcggctgtaagtctgaatcatgagttccttacacttttttctacccagttcaattttgggaacttccgagtcctggtcctttcattgtttgtgatacccaacacccagcacaatgcggagagcacagtaaggtggcagtgaattcatcaatactttcaaagtctattttatctacaaggacaagttttattgtatgtttccttttaaataagtgccacagtcgcagtaagtgaaaacatcctgacaccaccccagcggcccccccagctcgtgggcctccccgcagagcgcgcgcccgtgggggtaaccggcggaaaactagggacgcgggcacagccgcagactgggcgtggggggcaccggaatggccgagcctgggacgctgggacctctggccgccgcggggcgaccaggcgggcggagacgtctcgcgccctcccgggccgcgcggctccaggcgcattcctgcacccagctcccgcgcgccgcgctgcgctgcctcccccggacagctgattcattggctcggccgcccagactgcctggcgccggctgcgtgacgtcacccattcacggagcccgcctcccccgctccgctggcgccggccgggcggtcgccctgacaacgcagacgccagcccgcacaatgacttccagctggagcagcccagccagcctgcgcgctcactcgcttgcttgcgctgggcttcagggcgcccgggtgagtttttttctctccctctcgtttttttttttttcccaggctctcgcgggtttcccctgccagggaatccactcgctgtagttttctagggctctggtcccagtcctttctgaagcgcgct

SEQ ID NO: 35472 - DNA, 2300 bp, Homo sapien
taaatgtaagtgtgtcctgggcatattagcatagttttattttgccaaacagaggaaagtcttgggttttgaatttggaagcaaattttaaactctaggaaagagaaagatcaatggaacaaaacatctgtacatatatccatttattattatcgtctgtgctcatatgactggctccaagataatagcttacaaccagtagtgctggcttcaccgacttcccatttaaaattacaacattttctctgtatttgcattaatttaatgatgtatatgactatgcctgtctttagaagaaagcccttctgagtttcataattctgattttctcgattaatgtgtatgtagaccatctacgtatgcacataaataaatgagaatggcacttgtttccaaacaattattagaagcagtaacatacaaggattaggggagaggagggttattgcatctacctgtgaaaccagaattaaatagttgctcctcatttcatcaggagaaaggaatgtgctctggggaatagtgcgatagtcataaagcactgacatagctaaacaaaatatctgcctggtgcaggtatttcagttctgggaatggatgtagaaaaagtccatataggggtagacaggaagaaatgaggtccatgtctctttctttcaattatctatgaaaatgaagacaccaatccatgtcatgtacacgaatgaagaaaattcttgggttaattcatctccaagcgtgtctaaaggtgggagggtttgtagagtgaaggcactcaaaattcatttccccattgtctgagaatttttatgcacctttctcatctgaagggctcaattttttcttgaagggtacacacaatgctccaccaaagctcattgtgcaattttattttgaacccttgaaggacagcttttctctaagaaatctaacacaaaaacgcccttaattaacaggcttttttttgcagggtggggcccaagcgggatcccagagactggaagtgtgaattttaatgctttgctgtcaaaggaggcgactctggacattctcatcaccttatttaaagcggggtacgctgactaatacgtgaagctgtgcattaatggcctaaattaagttacaggtatgaattttacataaaacagattaatattatatgtcataatggaattttaaatattccgtgtccatgcatttttaatctttacgtgctctaattgaatgcgcaaggcaactgcatttcttgagcccacttttgcatttagatggggtaaaagaaccccccccacgtttttgttttatttatattcccttcaccaaaaacctgcattcgattcggcattcttttccttctttttttttctacttttgctaagctttagcattttttaaaaagaaaacggaaaggctacacattccattccatcattatggtttcggcaaatgtgaaaaggcgaataatgaaacggaggagggaaatatagaacagaatgaacgtgccttcttgaacagcgcgtctttcttaaggcactggaatcccacggatggagtgatgggtggcggagggtccctgggcgccgtgctattaggagtggcagggtatccgcgagcagggcccaggcgctccctcagcagcctagtcgggataaggggggcggtggagagtgaattccggccgcacattcccgcagttcttcgcaggaacttcgctctctcttttcccctcccttgggcacacatcagcctggcccgactcccactcagctctcttttctcagaaccccgacccacagcgttgacggaatggagtgcccttcccattggcccgagcgtcattccccgaggtggcactgcccgcctgattggctggccactccagaccccccgcccactcctccactcgggtagccggactccccgccccccagcaccgcccggagcccccgccctcgcctctccctccgcgcccccgcccgcgcgcccagcgggctccgctcggctcgcgctgcgacccggcccgcgcgctggtcccgcccccggggcgcacggctctataaatacagctgcgcggcgggccgggcgagagcgtagtggaggaggcgcggttgtgagtagtaccgggagtggggtgatcccgggctaggggagcgcggcggccgcgatcgggcttagtcggagctccgaagggagtgactaggacacccgggtgggctacttttcttccggtgcttttgctttttttttcctttgggctcgggctgagtgtcgcccactgagcaaagattccctcgtaaaac

SEQ ID NO: 35473 - DNA, 2300 bp, Homo sapien
tcataggattaggtcgaagagctgaagacctttctgctgaacaacatcgacttgctatcaagtaagtgaagtgtaacgatatattaacaagccctttgcatatcagtatctagagattttcctcatttaaaaatatctacacattaattctgttctatggatataatatcatttattttatgaatctgctattgatggacatgtgcattgttaccagtctttggtttttacaagtgattaagtgatgaataaccttgtactaggtcattttgaaatgtgttagggtagaactgtaggatagagtctcagaagtagaatcgttaggtcaaagagtaaatagaactgtacctctgcgaggctgtccttccctggggttgttatgtttactctggaagtattcttactggccatgtgtcttgggggtcctaaagaatagtgaatgatcaatgtcagtgtgattaaatgccactctgaaaaaagataggaagtagggcaggagaggtgagtatagctgagttaaatacaggaggagggctacaggtggctttgccagtgttgatgtgaagtaggaagggggagtgttggagaagaagtgggaggggaataactttgatctgagagtaaagatggcatgtggggtagcacatcgggtgcagccatggtggaggggcggggggttcctgctagacagaagcagggacaactggcataactgaggaaggttccaggtggtagaggagattgacttcttcattcctgcattaaggaattgggacttggaagcagtggagcactattgaaagattctaatgaatcagccctttcctaagcacaatggaggtgtaaatgctgtagggcagcagtctccaacctgtttgggaccagtttagtggaagacagtttttccacagacccagggttgcgggtggtggtggggggatggtttcaggagggccttacatttattgtgcactttgtattgttattacatcgtaatatataatgaaataattatacaactcaccataatgtagaatctgcgggagccctgagcttgttttcctgcaactaggtggtcccatctgggggtgttggggaacagtgacagatcatcagtcattagattcttataaggagtgtgcagcctacatccctggcatgcacggttcaccatagggtttgcactcctatgagaatctaatgccgctgctgatctgacattaggtggcgctcaggcggtaatgtaagtgatggggagaggctgtaaatacagatgaagctttgtttgctcacatgccgctcacctgctgctgttggcccagttcctaacaggccacagaccaataccagtctgagccccaggggttgggaatccctgctataggggataattccggcgactggttagcaatgacatttcagggagtctttattctatcttgctagaacaggccttccaaaatgccattaaagcaccacacagaacagttctctacagacttttttccctccactaccttggtctgttactcaggaactcaggcctggttgccaaagcagacaacaggctgctactgcggttcttctgcgtggcctctttcagtggaaactggttccacccatcatttgttttgtatttatgttggcaatcgggagggagttttcccatttggaagcatctcgatccgctaacattaggtcaggttccgccctgctttatgtttattaccttcgttttgtcctgtagacaggaaaggttgatgagataaggacatttcccagcctgagttgcacttgccctcgcccagctctgagtgcctacggctgtgtctggccagcagagggcagcatggagctctgtgcctgctgtgagccccctgcttctttaacctttcctttccacaagatttctcctcggctgactttgtagaaacaaaacaaggaaaggtcatgtcatgtatcgaatctacagagataacatttgtgtttgcttatttacagattctgaagaaaaagcaaagactgaagacttttcaatttatttactttattttcacagagtgaaaccctcttttttggaatacttaagttaccttctcaatttcatgagtgtcatagctggtccttgtaacaatttcaaggactacatagccttcattgaggggaagcatatacacatgaagttgctggaggtgaactggaagcgaaaaggtttccacagcttgccagaaccttctcccacagtaagtttttagtgtctagagaatagggttttgctgccagggttgactctctctaat

SEQ ID NO: 35474 - DNA, 2300 bp, Homo sapien
aaacctccgtcccctgggttcaggcgattctcctgcctcagcttcccaagtagctgggattacaggtgcctgccaccacacctggctaatttttgttttttggtagagatggggtttcaccatgttggccaggctggtctcgaactcctgacctcaggtgatctgcccgcctcggcctcccaaaatgctgggattacaggcataagccaccgcacccggccatttttaaaagaaaaatttagactaggttatgaactgtgttttgttagggagaaaaaaacctgtgtaaggctaatacatgtatatattttacatatacatatatacatatgtatatatcaaacctgtgttatatatatatataaaaactgtgtaatatatgtatatataaacctgtgtaaggctaatatatgtacatataaaactttacatatataaatatatttatatatgattatataaattaatatatttataataaatatatatacacacgcacacacacacacatatatatatatggcctatgtgaggactattctttgaagtctaaaaggcatagctttgtgaaaattataaagggtctgaggcacttgctccagaaatacttcccaaactgacctacttctgttttccagcaactcatatctgagtgttgatttttttttccttttaaacaaagctccgtctgctctcatatacctcacttcagctgtcatctagctccagataagatgaatgttgctccaatgctggtcattttccaggactctatgatattaaatgaacctatctagcctagtgatcctcaagtatatgcctgtgtgcgtgtgtgcatgtgtctgtctgtctgtagtgtgggtttgcttgtgagtggtagagattatcatctggtggtgacatctccattcggttagcttgtgggagtggtggtacagacttttttttttcctcctccacaggggacataggttgagaaactctggcctggcaatttaatgctcagtgcagtttgatggtgataaaactcctgaagaaggcaagagtgaggcctgagtcttggagagtaagttgttgccagtgcctgacaggccttcggtttaatttgaagctggaggccacattgataaagtcggccccgaaagtcattgcctgtctgatcgaatgccggtttacccagcggaggctgggggccacgtgagctcactttctttggttttctacccagcagcccagaatattaccttcctgaaaccctttttcatcagctagcgattcctgaaaaggatcttcaagatttttatgtttctcagaacctagcaataacttggaaaagttttccaagtaacattgatgtgtgggtgttcgggggcagacaagttaaggagcaaggcaccctttttgaggacccgtggcatgcaaatgacttatcagaatgcacatagtatgacagtaaacaccgtttcttacagaggtgaaataactctcactccacagagacggaagtgacccgaagctagcagtcccctgtatttgcttgtgtgacaccgaacatgtcagatcagggtgtaggaaactatgcctagcgcagaggagggtaaaggaagtagggagtctggtggctgcggcgctccagcttccagccaccggcagaggaaccctctacggcttgaaagggaaacgcagccactcagccgcttcgactgcggcggcgaaaccaaaacagggtggggcggggtgggtggtgctctctagtggaaggcgcccgctgggtgaggtcgttttgtctggcggggggctaggacggtcagcccgggaggaggaaaggcgcgtcccgcctccagctgcagggccaggcggcggcgcccgctggcgtcgctttccctctcccggtcggcctcggtgcaggccaggctgggcgggccgggcggcgcttgggggccgggctcggagtccccacttttcctccctccttccctcctctcggggccgtcccgagcggccgggccaatgggcgcggagaggaagggagcgggaagcggggcgccttgggcccggccctcctacggcgcccgtggctgcagcgccagcgccaaagccaagtttgcgcctcgagagtttgcgcctcgagagtttgcgccggttcgcattccccggcctcccgttcgctcccccgcgaaccaggcggccgtgcgcctctcggggcaaccacccaagagcacccgggcgggaggacgccgagcagggggtgttgcgggctgggacaggggcagccacctcccgaagatgcaggatggcag

SEQ ID NO: 35475 - DNA, 2300 bp, Homo sapien
ccaaatgcaagctgccagtgatgctctgcagatggtaatatccaagtagtgacagtactagtttcttccacaggtatatccatagaggaaagcaacattgatggaacaagagcagggaagctgctggtatattacacttctagctcatgccctttgagtaccacttaatctgccctaaagatagtgtcacttctggccaggcgcggtggctcatgcctgtaatcccagcactttgggaggccaagggaggcggatctcctagggtcaggagttcaagaccagcctggccaacatgatgaaaccctgtctctactaaaaatacaaaaattagctgggcgtggtggcacgtacctgtagtcccagctactcaggaagctgaggcagaagaattgcttgaacccaggaggcagaggttgcagtgagctgagatcgtgccatggcactccagcctgggcaacaacagcaagactctgtctcaaaaaataaagatagtgtcacctctaccagtgtcgacaaatgtttagggctatggatcctcaactagcctgaatgcaagactaaaatattcctgagcctggtgcaaggtttaatggaacttttaactcatctgtttcagaaaaggtaacaaggctaaaatattaaggagtcctagcctgatctgacacatcttgtcaggtgtttcatagcactctgagtaagagttttgggaaattaataatagtaataaaaatcttgtgaaagggctcaaggtgttgcaatcctcatcacctatgagcaccaattctgcagctgttttgcacgtaactataaattatgatctagtctctacatacataacttcccccacattcctgcaggggtctcttttcctgctcaatctcaggagcaagctttaattttaagacccatgaatacttgaacaaattcaggagtcagtttgacacatcattttatatttttctgatgacaatttctagtttactttttaaaaaaagacactattttaaaaatactttgggataggtttgagtcgttgtgtttgcttccagtcagagaacttcctacaaaactgaagatataaagtgctgatgcctgggcgtgcctgcgttcgttgggggcacgacgtcatcgtgggaagcgtgtactttttcggattactgcttggcggattagaaacccgtagatcagttctaggttagccctgattaactgccctgggtgtttctgggccagagggaatgtctgctggattcaaaccaatatccgttgtaagacaaaagagttaatttgtactttacccctatccaggctaataatgaaggtaccgggaatgatctggaatgttaactggtgcccgcaatcgcgtctgctgaaccttctgcccccacgattctgtctgcccacatgcttctgtctatcagccccggcctcgggatcagctctcgccgcgtcattggttggatttcaggaagggagaagcccacgatttaaagggctccttttgcacctgccagacatcgtccgcatggtccaacttgcctttggcacgtatctggaaaaatctcctgcgctgttcgtttattgcactgactggtcaaaggaaagagtgttcccttagtcaccttgacaatttccaaaagcgaaacttgggctctagactagatctacactgagtctgcggggcgcggagtccctgcccaggtcagtagcgccggcccggcgggcgggcggggacaggggcggagcctaggccaggcgtggtcttccgtgggagagaaggaaattctttgccccaccccctaaaaactgctcttctgccagccaatcaaggaggcctatgcaaatagggtccctgtcgccccggtaaccatgatgcacggcagccaatggaaaccagcaagtcgcggccctgctccatgattgggactgaagtaaggaggtagcggcccaatgggctgtgggaacggtcctcggcgggttgaggggcggggatatgcaaatatggtttgaaaagccggcgggaaatccgagtttcgcgggaggaccttggcgcgtaaaccgtatcccttcattcattgtcagcagcagcttcctggagccatttttcagctgccggccgcagcacccgggctgccgccgccgcctcgcaatccgttgcatcggccgcccccgacgcctccatccccgcttggggcccgatatccgtgcggccgggaccctcctctctccagagccccgattatttttggcccccggggcctgtgcggtgcggaaaaataaaaagaaaagagagagagggg

SEQ ID NO: 35476 - DNA, 2300 bp, Homo sapien
cagcaagtcgcggccctgctccatgattgggactgaagtaaggaggtagcggcccaatgggctgtgggaacggtcctcggcgggttgaggggcggggatatgcaaatatggtttgaaaagccggcgggaaatccgagtttcgcgggaggaccttggcgcgtaaaccgtatcccttcattcattgtcagcagcagcttcctggagccatttttcagctgccggccgcagcacccgggctgccgccgccgcctcgcaatccgttgcatcggccgcccccgacgcctccatccccgcttggggcccgatatccgtgcggccgggaccctcctctctccagagccccgattatttttggcccccggggcctgtgcggtgcggaaaaataaaaagaaaagagagagagggggctcggaagcgccgggcggggaggagagaaggaggagagacttggaaactccgactgcaaataataaagaaattgaaaacaatacattaatataccataacactaaaaagagcaggagcgagagatgagaaagggaatccagcccgctctggagcagtacctggtgaccgccgggggtggggagggggcggctgtcgtcgccgccgccgctgcagcctccatggacaaaagggcactgctagccagccccggcttcgccgccgccgccgccgctgccgccgccccgggcgcgtacatccagatcctcaccacgaacacttccaccacctcctgttcctcctccctccaaagcggcgccgtagccgccggccccctcctccccagtgcccccggcgcggagcagaccgccggcagcctcctctacaccacgccgcacggaccctccagcagagccgggctgctgcagcagccaccagcgctgggacgcggcggcagcggcggcggcggcggccctccggtaataccctccctccccaccgtccccagccccggcgggaggtgggctcgcaccgcgcggggtcgtgggcgcgctgcgggccgctcggggagagcactgggccgagcatcgtgggcctcgggggctgcccctccaacgagggttcattgttagacctgagtgctcttcccggcgccaggagggtcggggggctcggccaggcgcgcggggcggcggggattgccttggcgcgaaccacatcaaacactccaaaacttttcgcggcccccccttcttttcctgcacttttccctacccccactctcccttcccctccaactcgaagcttcctctttctcgggcgtaggaaggggtcacgccccggatggagaagggggtgggggagggagtagtgaactggggtgtggggggctctgaggggttgaaaccgggggactgttggggtgctagcccccagtcggccttggaggctcgttggcggccgggggtccctgcggcgtgctcggagcgcaggggatcggcggggctgcgcttgacacattttaggatctgtaactcccggcaacaaaggggctgggggaggtggaggggagtcgggcgtgggggaggtggggctggaagccgggtgcggactggggcgtgggctgtctggggtgaggggctcgcgggctggcgctctggcctgggcgcatcctggcagtggcagcggcggcgcccgcgtggcccaagcgcccaggccttcctcgccgggccccgggcctgcccttgacccgcctctccccttgccccttccttccccgccctgtccccctctccgccccccggcgacggagggcgggggcagctgggttcccgtcccgccgcctgggtctgtccctctctccgggacccgccggtgacgtttcgcacacgtgcgcgcaggacgcgcctgtgactggggaggaggcggcggcgggagggggcgctggagggggagaggggggcacccacttcctcctgctcgccggctccctggcctgggacggtcccggcgccctcgcacccgcccccggcaccgccaccctccctctcctctccccacccccccaccggcgcccgccctcgccctgcgccgccggtctgttcggccctccgggccccctctccagccggccccccacctccccccggagccaggctggtttcggaaatgcccttacagcagcaggttagtgaccgggacggctcgggggccgccgacgccgcgggggcaccggattctgttgggggctgaagcggtgagggtaggcggttgagcggggttttggagtgggaacggggggttgggtgctcgagggaaatgagtaagcaagaaaaatctaactaagtaaatgcccc

SEQ ID NO: 35477 - DNA, 2300 bp, Homo sapien
tagggttactgacttcaaaggatttagactaaaggtgcttaaagagagaggtttcacctgttagttagtttttgtagccaaaacttgaaaacatcctttcttcctcttttttcgtacctatcaatcaccaagtcttgctgctgttacctcctcaatttgtttaaatctgtccttccttcccattcctcccagccaacaactcaatttaggcttttactatttcttcatgtctgaaatatcgtcctcaaacccattgtcctgagagaataatctgctcgaacacattcatgttgcctactacatacatccaggattaagtctaatgcctttgaatacacaaggttcaccttgatctagtccctgtgcttccctttctctggtagacttctcccatcaccagcttcactctctttgcttttacactgtggaataattcatcatttcaggcctccttgcttttgctctggctgactctccagcttggaatgccttcatccatttcccttacttcacctttgtgttcctgtgcattcatctttcatagtgattgctattctctactgaaatgaattttttcaaaatagcctgcaattgcaataggcagtactttttttctttctttttagctctagcatctatcacagtgcttgtggtcatggggtacatactcagtaaaatatcttttactgaactcaactagatcttgggggaaaaggggtggagtcattcattcattcattcattcattcaacatatgtttattgagaagctataaacataggcacaaggttatgtgctaggtagtgcgattacaaccaagaagataacccagggcctacttttggtctagtgaaagagatggaattagatgggtatggtggtgtgcacctgtagtcccagctacttgggaggctaaggcatgagaatctcttgaggctaggagggagaggttgcagtgagctgtgatggtaacactgtactccagcctgggtgacagaagaagaccctatctaaaaaaaaaaaaaaaaaaaaaaaaaaagtagggcaacataaatacacaattttaatttaggtgggtaaagacaacagtggaccccagggcacagtttagattattttatggatatggataaacagagaaaagggtggtttttttttttttttttaaatctattttagagactgggtctcactgtgttgcccaggctgttttcaaacttctgagctcaagtgatcctcccacatcagcctcttgagtagatggatggcattttaattagatgaaattgtactaggaaaggcatttgcaaaacaaagtaattgccccaaatcactatgaaaccctaagtcaggcataaaactcacgatttctgacccttcttcatggcctattgcctcctattacctttactttttcaagtaaagatattcttctggtaaacacatggtcaaatacagtgtcttgggtaacgaatagtaaagtgagataacatatgtagagaaagcgggtgagaatccgtactccataaaagtattttctttccataggtgtctgctaaactgccatctaagttttccaaaacaaaaaacaaaaacacttgtgtggtgctcaatgatgtatattaagtgaaacctaccaactgacctttatcctttccttcctgtttttttaatattaaagaagagacctcttttcacaaatgattgaggaggctagtaaaatgcagtgaaaagagcaagttctttgggagtcagacagcatcggatccagcccagagcgcagcacgactagtagagtaacttagattaagtccttaaacttccagtgtcctcttttgtaaactgggaataataataataataaataaatagtgaataatatttatgcaaagtacttagcacagtgtctaacacataaaagcttaggagaagttggctattaagcatttctaggaacccgaggactcagggttgttattttagttcttggaatcaaaggaacttgaagcgtagtcattcctaaactaagttaaaccagaactagcgctttcagcaatgatgtaatttgatctcttcgggccaccgtcgctgagcatgcgcaaataaacgtggcgggacgtatgtgtcatggcgctctccatctaaagtctgtgcagcttccggagagtggcgggttgattttctcactttggactggtttttacttcccgacttctgggtaagggtggccgatgggtccatgtggggcagagtgtggccacagctccttttatggccaagccttgtttctccagtttcag

SEQ ID NO: 35478 - DNA, 2300 bp, Homo sapien
attctcctgcctcagccacccgaagagctgggattacaggcacctgccaccacacccagctaatttttgtatttttagtagagacagggtttcaccatgttggccaggctggtctcgaactcctgacctcaggtgatccacccaccttggcctcccagagtgctgggattacaggcatgatccactacatctggccagaactgtttaaatgataggaaagttgatattctatgttttgacattggagccattttccctattgtttatggactcagagtaatactggatttttaaataagttaatgtaattctgttattgttatactattaaaatagaacaacgtctgtgccatatttatggaggcactaaatggccacaaggaaatgacttccaagatgccaacatttgggcctatcaaaaacaaaggcagcttgctaccttatcgctgaatgataaaaagattttaatgctttgctcttaaatgtaaaagaacagcaagaattgttctttagtggtggaaagtctcaaccgtgaatgagagtaatcaacagacaaattgcagtgaacagaagaaaaattacaaaaacctttaattgacatcctcagataaataagaaaagatattgtgtccctaaacaagatactgtgaaaaggaaaattgagaaagagctctgagaaatgtaaatagtaatattgaattaattttttttgcaataaaatagttggaaggtatgctgaagtaaaatttccagaaaataaaagggcagagatgaaagagagaaaaagctaagagatcaacccagtggtttcaacattcaaaagaaaggagtccctgagagaaaaattattaaagaaataatatcagaaaacttcctcaacctaaagcccatgagtctccagactgtaccttgtacaaagatttaaagacccaatccaaggcatattatcacattgagcataaagttaatatcttaaaagcttctaaaaagagaatggtgtgggcacatttaaagaagtgcgcatccaagttaatccagacatcccattagcaattttttcagcttaaaaaaagaggaacaatgcaaaatttgtatggataatactttttgacttggagtgctacacacaaccaaatgtcggtcagttgcgtggcctaagaccacgcatgcagagacaacaacaaaatttccctggtatctttctgatgaagcttctgaaagaaagcacacccctacagaatgagggagctaatcaagaattaagaagacttaggatccgggaaaaaaagattattgaaaaaaggataccaagaagcaacattcaaagatgataaccagttcactataaaagcaacacacacctgaaaggagtggcatttccagaaaaagaaaaggggactggtacattatacaatatgtcaaaggtttagaaaacagtattgatttttgatagccctaatggagtctggaaaacatcaacataggtatatagaacattaagctaatttttttaaaaagagaagcaattattaactctaggaaaaattacacattgtggaaaaacaaaactgaatagtatatcaattggctctacagtgaaagttatctttgcaattgtaccaatggaagtactgtgttaactaggagttgttcattgatttctttgggagggtaaggatagagtagttcaagagttaaagcctcatttaccataatagagaagttagtaacttattgcctaaaaattagtaaatctagaaatggcagaattagcatctatttttaaatatagaggaaagaacaaagaaccatttaaaagaatttaagatgggtttccctggaaatggcaggcagccaactgtttttcattttaaacttttggtatttaggactctttgaaactatttgcacgtgtgctttttataaaaataaattttaattaccataaaattgtatttaaaatgtcagggaaatagaataattatggcttatagtcaagtttttacatttttgtcttgttattttctagagttcctggaataactattgctacagatattatctgtggttttcctggagaaacagatcaggattttcaagaaacagtgaaacttgttgaagagtacaaattcccaagcctgtttattaaccaattttacccaagaccaggaactcctgctgcaaaaatggaacaagttccagcacaagtggtaagatctttttcttgtaaggtattgttttttgccagtagctatagaaatgcagctgtgttgcctaccttcacacaacttgctcatgtt

SEQ ID NO: 35479 - DNA, 2300 bp, Homo sapien
ctaggggcgcccccaattactagccctccttccctggccatctaagttggcctgcctttgcccaccgaggagcctgacttctgtttcagcatcagggtttctactcctccaggtgggagagcaattcaaaagtgactgaggaaaagagagtgcctctttcagggtcattgaccctggcaagggccaaggccagggaagagatgggatacgccctcctctcccatcttatggtagcctgtgtctcccatctcatgatagcctgtgtgggagactgtcatgggcgtacggagattttcactgatcattctggattgtattaaaatcaaatggagcttcctacttttttgcttctttcttatcagataagaggtgaaaatgtttgctatggatcatggctggaattagagcttgagaagatgctgaaggccaaggtggacaagtcggatgagggatgggcagaggaagcaggctgcctgtgtcagaaggcaggaaagcaggagctgaagaggcccccagcattgacattccccagggaatcatctcagactgggcagtgcgtccccaggaaacaggggagcttttcaaagcccagactaaacgtgctctgttcagtaccggtggagactgcagttgaggaagggctcccagcactccatgtctggcctgcatcgcttccccatttccccatctcattaatataccccagagggccattttcctattcaggccaaccttctgctcagccctggggaggagcttgattgcattttggttgcctcttctctctcctttctcttgccatctgggttttgcctcagcagggaacttttttcccttcattttaaaggcagtggcatgcctcgttagctgcttcctccaatttaaagcagtcgggctttttccaattattaaaactggaggaggggaaaacactgagcccttcattcagatcaaggcagcagatcaaggagggttatttttccccagaatagtaccaaatctcccagggttagtttggtctagagattttcttattttataaaaactgatttaaatgggctttttatatcctaacactaaagctcttttagttctttttgcctgccctaagtaattcaccacccaggtgacctttttcttctactttgatgaagcagtgtactcagtggtcataaaaatcaaactcagaccaagattcaattttgcctttcagagagattggctgtggaactcctggctctcatctgacttttctgtctctataactaagcatatcaaagattttctaggaattatttttctaaataagatgagttccagagatgaagattgtatctagatatccaagtattactggattagaactggtctatttattttggattctaacttgaaaagactggcaagtcgctgcagtgctaaaatagaagtgtaagggagacatcacacacacaagctacctgtgggtcccaaaggaagggaaacgtttgcttgaagtaaacaagtacttttatcaggaatctctagtggaaagagaccacctgacagtttcctgtgaacaagccaaagtacccttcagaggactggttctagatggaggtagattcccaggactgacaaacacatgccttttctaacagagcaagggaaatgaacggcagctgttagtttcaggagtcatttagctccaaacagcagtgtacagtgttattggaaggttcttttaaatgtacctccttctccctcaaaacacagcacacacatgcacggacacaaacacgcaggcctgtttgaagtgtcttttcaaaccattactctgacagctcacttggaaagtattaaaagtataaggctttcatcagtattgtctcggttttcctcattgcatggaatagccaaaagcaagatatcaaaggcctgtccagaagtggctggctgattgctgggggatttcccaggtctgccttccacgtgcctcaggacatcaggcacatcctgcactggaaaagcactgcccaggggcccaggagcccctcccaggagtgcctttccttcctgcaggctctgcagacccttgagcagctagaagatagagtccactttgtaggggatcccagaacagaaaaatgacattgagggacaatgaggaaacctggataattaggtatgccttcggttaataatattaatatatcaatttgggttcattaattgtggcaaaagtgctatactaatgtaagacggtaaataataagaaaactgggagttaggtatacaggagctctccatactatctttgc

SEQ ID NO: 35480 - DNA, 2300 bp, Homo sapien
agtctgacaacctgggcctattgccagcctacatactttaaaagtttgacaagatacatagaaatttactacccagcactagtttaatctgaatcaaaagccgacttaattattttggattgactttacctaaccacttatggttagcctgaagaatattagtttcctattatagtgttaaggaaagctgatttttactacaattctaattttcagacactggaaaacaagtaatttctgtagccaacgtttattttgaataccttggcatcctttctttgccacattcttcttagtattcttcatggagttcctttcttttaaaatcaatggaatggcagggttgccactattgtccttctatggttcacatcaatgatctgtgattactttttttttttttttgagatagtcacacgctatcacccacactggagtgcagtggctcaatcttagctcactgcaacctcctgggttcaagcaattctcccgccttagcttctcgagtagctggaattacaggcgcatgcatccctgcccagctaattttttaattttttaatttttagtagagacagggtttcaccatgttgaccaggctggtctcgaactcctgacctgaagtgatccacccaccttagcctcccaaagtgctgggattacaggcgtgagccaccgcgtcctgcctgttattacttttttacataagtggctattctgttttagcctcttgaacaacatgcagcttttactaggagtgtgtctggcatttgaattagaaaggaagatattagtattcattgagggcttacaatacatcaggtgcttcatagtcacaaattcattgaaccctcacaacaaccctctataaagtagctcctagtgttcccatataatagatgaggaaaactgagacttggccacatccccatagttacaaaccattaagaaggattagcagccaggtctactatgaatccggaggccccattctcttctgctaccagttatcacctccttctacagtttctctttgccttggtttttcagttcccttcgattcaagtaacaagaggaaatatataagaaggaaaggaggaagatggctttgggaggaggagagggaagagagtgaagcaatctttaattttgaaaacagggaaaacaaatatttagaaagtaaaaccgatttccatcctttacatgccattatacatcctatacaaaactctggaaatctgcctattgaggtaattacggagcactacctaatgtgtttcaagggaaagctcccctgtttgggctatgcaggatttacagggagtttaaatcattaaataaccatagttgacccttgcttggttaagagagtaagcaattattgcaaagtcctcttccctgccttccacaaacagcacaaaaacggttctgaagggatttacacaatacatcaacatctgtgctgtacctagagttgttaaaataattgtgatgacaggtgtctaggtaccactttcttaatggttttcaatatccattgatttattgttttgtggctttctcttcccctttacagctttggctttaagaaagagctggggaacagattttgcaccagaggctgattctttattccaatgctgaaaagaactaataaaaataatcacttggcttttaagcagaaagcttccatttacagtatttcacccttaccccgccccgttccaagccccttgttatctaacataatggttagaatacatttccgtctctccccttaataatttcatgcattaacatcctcttcacacactatacacacacgcacgcgcgcacacacacgcgcgcgcacacacacagcaaaaggaaaaaagaggcagcagaaatctcagctgtacttctagcccttttaaaaagtttgctctgtaaattggaatgaggtcagatttggagcttctcattgcacgcggagattattattgcatcgggttccaagccaatgggaagcccgggggaggggtttggcatgaggaagcgttggttacagcagctgattggctgcagccaagactgtgaaaggataaagaggcgcgaggcggaattggggtctgctctaagctgcagcaagagaaactgtgtgtgaggggaagaggcctgtttcgctgtcgggtctctagttcttgcacgctctttaagagtctgcactggaggaactcctgccattaccagctcccttcttgcagaagggagggggaaacatacatttattcatgccagtctgttgcatgcaggctttttgg

SEQ ID NO: 35481 - DNA, 2300 bp, Homo sapien
ccgggcggtccctgagtcctgcctcgcggctgctcgctgggatccgagggcggaacgggacgcgcaggaacccggcccgacgggcgcggctcacacccgtgctcttcctgcgctctcggcctcactttgcggccagagccgcggccctgcgcgtggccggcggccgcttctttatctccgaccccactgcccagtactgtacgcgtccagactaaagaaacatcattcgcttaaggggctgggaaaagcgcgtgctccgctcgccctggcaccgcgggtcgcccagctcgcagactgggacgggcggtgcaagaggtggtgctccctgtccaggaggggacgcggaagagggcatctctggtcccgggatgcgattgtcccggtttctccttctggcccactcgccgcgcgcacgaactctaggggaagttggttgtaaagtttccgagagcggcgtgggctggtgcgagtgaagcgcggggcgggggaggcgaggacagaagctctcctcgcggcgtctttgttctgctctggaggagagaccttggcaaggagtcgccgggcgggtgcagggacctaccgccaccacattccggacccagcgggagccctcctcttaatgcccctccccccgcaagccaacccaggacatagcccccaggtccccaaggttccgtctacctcatccttctacccccaaacttcaccaacccgaaaggattccaagtctgggatggggagaaaggaaagagggtggaggcaaaggtgcgcgacgggctggataccaactggagggtgggtgttcgcattgaaatgtttttttcttttgccctagaaattgcttccccatgcgggcccctactctctcccatttcccccacctccctgctttctttttcttcaattctagtggatctagaaggaaaacgagtgctgctctgagtcactcagcgagctaatgctatggcccgaagttgggatcagggtcgaggggtgggggaccatgtggatggggtcccaattctggaggttgagaatgactggaagggacctggggaagggtcgggagctgttcctggtccgagacacctgatttgtcccggacaaggcagtgggggaggggaaggaaagaggggatgctcggctgggacgtgtcgcggcagggggtggaggatgaggaggcggcctgggaccccgagtcagatctttggggtgagcacgaggacgtggtgtagggaagaggacgagtgagcagcgcctggctgtagggtcagagggcgcctggtcatcctgagagccttgccttcgcagtttgagattaggggaagttcggggcctgagaaggtgggcgcgatgctggagctgggaattcttcctcggagcccctggaccgagttgcgctgcgcctgcagcaacaggtagccccgagggatgggcggaggccccggccgaacccggagctggcctttgtcctgccaattagagggctctccagagggacagcgtgggtgggggtaggtggggaagggcgggagaggagtttcctaacacttggagcccctttgagttgttctgtgtattgggtggaggagggtgaatccgagaggagggaggagggtgaatccgagaggaggaaggaggatgaagagcctagcctgcgccccacctctgattgtgtaagcgcctttatctagggttgaccccctaccctttgcattttgtctcttgggatgacgaaaaatggacagaaactcgacgcccaagtgaatgtttcacattgattggcagggaaagtgcaaacaaagaggtgcatctccgggaaacaatgattttggagatcccctgcccaccaccccagacttgtgcgcggtgcggagggggccagggctggcatctcccggggaaagtttcgagcctggcagtgggaggagaccgtctgggcagagttgtgatgaactggggaccgagcagccccagctcgcctcggaggttcccgagccgggcgggagatgcggggagagggagggggcggggagggaggggagggagagaggaagaaggggtgagagggagaaacctgccgccgctcgccgcctctttgtctgctccgggacttggaacaaaagggggaactctgatgaactctctttcctcccctctcccccggacgccggggtatctccctctcgcaactttgccgccccgactttctctgctgtcaggccgggaaaaagtgtccgaacgcctcgtggactgcagcgggggaaatgtcccttaaaagtgcgacgaagtggggaaga

SEQ ID NO: 35482 - DNA, 2300 bp, Homo sapien
ggagtagcccagtggcaaagtttggctggtaaattgtacctcctttccccgttcccttctcttttgttctttaaagaactcgcgcaattgtttcatttgtttatttttaataggcaaaagccaagtaggcatttatcttatgtgcttctttatatgaggggctggggggatggggaggagggtttcaaaagggtggggtgagggggtattgcttcgcgttcttccagctgcactcatgtagggatgaatatgcagaaattgagagggtcaagtccagcctcgcccccaccctagccctgaccctggtcatgcaaaagaaagcgatatggatatgggggtcgtttgtataacttagctgtctgcagagcgctctgtagataccacgcacaatataaaaacgctgcaacaatggaaggaagaaaggtttgggttggaggggattggtcccttgtgttagcggtcaaggagaggtttacaacaaacagctaagagttcagaaagttttcttcggggctgagatggggtggaggaagccacaggttacagactgtcagagatgcagggatggaggggatggggcctggaccactagttagagccatcccgtccgcccctttcagtttcacgatccacccggaataacccaggcaatccttggtatccgtcctcacctctctcactttccatcaccccccgcccccaaccccacttcagtgtgtttgaatagaaagcagaacgtgagccccagaagctcctctgacccagccttccgccccgccttttgtgttttaaccttttgtttctatctgccacgcccgtccaaaagagggatggctgtttctgctgctgcggggtgaagaggcagcgcagtccactccgtttttataggctaaggaagacgccctaactttgtttcctaagtagcttaacttaggaatgtttctaggttgggtcatgcgcgaatgaggggaacactcaacacccagtaaacgttgccactttaggtacaatttctcccagcgcttttccactttatacaggagttgtttatcccatactgtcatttggtttgtagaaaaagcattttgggggccgggcgcggtggctcactgtaatcccagcactttgggaggccgagacatgtggatcgcttgaggtcaggagttcgagaccagcctggccaacatggcgaaaccccgtctctactaacaatacaaaaattagctgggcgtagcggtgcgtgcctgtagtcccagctacttgggaggctgaggcaggagaatcgcttgaacacaggaggctgaggttgcagtgagctgagatcgtgccattacactacagcctgggtgacagagccagactttgtctcaaaaaaaaaaaaaaaaaaaggaaaagcattttggagactgaagttgggggtttattgaaagtgggcaaatgtatgccttatctgaggtgatatctaaatattaggaatatgcagaataggctttttgaattctacatgcagaataacctaaaggttattatcttcaggtatgttttgtgagatcatttctgatgccaggatagtttattaccttctccactttcttctctcatatattcccaagtgctagaggctttcctcacttccttggacttacttttgacaagacaaatgaaacatcaaagcgcatgcactgtcaataacttgaggaaacgcccaaacattgtcttttaacttcttcaacttttgattctgtatagtagtagttactattgaagtagttactattgtacctagaaatgattcaactgctagaactatgtagttttgagttttcatatcaaagactgaaatatattattgcaacaattactttcttttacaaagtgaggaggcagaatgacctggaagctaactttaattaatttcaattgtataggtgtaattactattatcagcatctagaaagcatcatgaatttgctggagtacttcctagcactgacctccttcattctgcgttgttcttactggatctttccatcagccaacaatatggaagtaccaatacaaggtcaaatcattcctggattcatctggagttgcttaaaagttaaatcattggaatttttgatgataccttttctatatggattacaatttgatcgctgggaattctccaccttaaagaaggtatgttgctttttagatactctacgaggacttcatttttggtctggggcttatacccagagatttgactagttattttgagcggctgtgttatcagagtgatttatgactttggactt

SEQ ID NO: 35483 - DNA, 2300 bp, Homo sapien
ttcgtctttgtgcctcatctgtcaagtcccttcttccctgtccctgcaggtaaccactgtcctgtttctgatgtagcctgcattgtccactgatgctctgtgggaatatgagtatctcttctgtatttcctgcttttacacaaaaggtagcatattgtacgcatgcttcagtgtcttccttttggttttcacttaactatacatcttagaaatcttcccatatcagtttataaggggcttcctcttataagcgccatatatatatacacacatatatatatacacacatatataaatatatatatacatacacatatataatatatatacacatatatatatacacacatatataaatatatatatatacatatatatgtgtgtgtgtgtatatatatatatatatatttttttttttttttttttttttggacagagtctcactctgttgctcaggctggagtgcagtggcgcgatcttggctcactgcaacatccgcctcccaggttcaagcgattctcccgcctcagccttccaagtaactgggattacaggtgtccgccactgtgcccagctaatttatttttatattttaagattcaggtggccaggcacagtggctcatgcctgtaatcccagcactttgggaggccgagatggggagataacctgaggtcaggagttcaagaccatcctggccgaggtggtgaaacctcgtctctaccaaaataaaataaaataattagccaggcatggtggctgacacctgtaatcccagctacttgggaggctgaggcaggagaatttcttgaacctgggaggccgaggttgcagtgaaccaagatcatgccattgcacttcagcctgggagacaagaacaaaactcttgtctcaaaaaaaaaaaaagattcacaggtagttgcagtatagtccagacagttcccatgtgccttcactcagcatccaccaatgtaacaccttacataaccttagtacatagtcaaaactaggaaattggctgggtgtggtggctcacgcctgtaatcctagcactttgggaggccgaggcgggcggattgcctgagttcaggagttcgagaacagcctgggcaacacggtgaaaccccgtctctaataaaatacaaaaaattagctgggcgtggtggcatgtgcctgtagtctcagctactcaggaggctgaggtaggagaattgcttgaacccaggaggcagaggttgcagtgagccgagatcatgccactgcactccaccttgggtgacagagcgagactccatctcaaaacaaaaaaataaacaaaaacaaaacaaaaaaaaaaccactaggaaattgacattggcataatgccattaactcaggtaagagaccttatttagatttaaccgatttttacatgcattctttttttggaagggggtgtagatttttctttttttcttttttttttttccccttttctgtttggcttatgtaatgtagcatgtttttaaggttcatgcaaattacagcatgtttcagagcttcattcctttttatgtctgaattaatattcattatacatatatactatattttgcttatccattcatcagttgatagacacttgggttggttccacctttaactagtgtgaataatgctgctatgaacattggtggacaagtttctgtttgagtctctgttttcaagtattttgagtatataccactgaggagtgaaattgctgggtcatctagtaagtctatatttaagtttttgaggaaccaccaaactattttccacagcagcccaccattttatattcccaccagcaatgcccaagggttccaacttatccacattctaactaacactggttttctttcttttttttttttttttttttacagtttcaactattaattcaacaccttagtgaacacctgctcagtgcgggcattattatgtgttaactagaggttttttttaaattttttttatttttattttttttattgatcattcttgggtgtttttgggggatttggccgggtcacaggacaatagtggagggaaggtcagcagataaacaagtgaacaaaggtctctggttttcctaggcagaggaccctgcggccttccgcagtgtttgtgtccctgggtacttgagattagggagtggtgatgactcttaaggagcatgctgccttaaagcatctgtttaacaaagcacatcttgcaccgcccttaatccattcaaccctgagtggatacagcacatgtttcagagagcacagggttgg

SEQ ID NO: 35484 - DNA, 2300 bp, Homo sapien
ataggtaggttttggaacggatttcatttgcattaggaaagagcattgggaagagtgccctttagaaacacttgcccacatatttatttttggatttatgataccagcatactgcattttaatttgttcctttttgttgagtgctcagatttttatgtctggctttttattttgtcttgtgaatttgtataactttcaaaatgacaacacccattgcttagcataagggacaaaagaaactctttttttttttcctcccctcttgtgcctttttaaaataagctatctaacaaagacacaattttttccctccctctcctaagccccagatgacctaaggatttagaggtctgaggtcagatttctttcttctttgcttcacagacaactgtctcttctttatattgtgatctttctgatttgtatagggactcggcaggtagaagaatgtgtgtgtgtgggttgtgtgtaaaatatgtacgctttcacatgcggcgggggcatctttatgctttggctcagatggcgcatatgaaagaaattaggtgattctaattatatagcccccaaatagtgaggatcccaattcttctccttccctctttgaatctatttaatagtttacctttgaaccaagttaattaggaaaagggacaggctacagtcatttcatttggctgtttttggcatccaggaaagtgtggggtggggagctcatcagagggaaaccaagggaagctcgtagacattgaacttgctctgatcagattattaattttcttctccttgtacgttgttaaatctgtagaaaaggaacatcagctcaagatctgtcgctctggctccgggccagcatgccaaattctgtcatctttgcagcatggccaagcatctttattacatgttataattctggtttttgagcttgatccagtgatcctgctacagcatcagatggtttgggatgtggaaaaagaagagggctatattcatctgtagatgaggtttggggagaattgtaagagccagaaaggtggagtggttgtctagggcagggacttttcatggatgctacagacacctcctttgtgctgcctcgaatttgaaatgcattattaatttctgttcaatacagatcgttgatgtcaaaccaaaaataaatgtgggccctactcctgctctggccattacatctctcagcagcccagcaattagcaccaaccttgagaacagagtgccatcattgatgtgacagtttcgtccctattgtcctgttcctgggtgcatgggtgacccttgacctccattggtctcggagtgggaaactgaacttatgaactgttcgggctgcgctggcctcagattaacctgggcaaggttaactttctcactctcttcttcaaaagtgctttagagggtgaggaagtactaggagtaaataataattttaaaaaatggttgggaggggaaaaacaattgcatcaatttcctgagtacagacacccctaacctgccttttgcaaataatctcccttttgtctgctcttaggggttttgcagatgaagccttggctttggcttgtcaatgaggacttttcagaagctccagaatgcctttagcggctttgcaggaagcggtgacacaaagttccagccagtctccccctccttccacttattgtttcagaattgtcagaaaacaggctgggatgaggaggaagagctactgtgagggctttttttttgttgttagtttggctgctgaatgaaagcaagcactttatttagaagtgagtagggagggaaatgcagcttagggttgacacccttctggtgcttatccataaatatgaaatggtgttagaacaccagacaccagagagctttctgattggctgttggtgatgtcatcatgtcattaatactgtgctcagaaaataaactgatccgcctgttttccttctttctctctttctttctttctttctttctagctgaaatgtatgaaatccattttgtaatctaaaatgaggtgcttcagtcaggacatttcgaaagaattattatgtttctcatgtgttcagagtcattttggtattcacttgagcaaagcaatagtcacccacaagtattcagcctatcttgtcttattgcttaaaagtaaaggcagacgctattcaacacctgggtaccaacagttgacatttacccacattaagtgctaaggctgtagatgaggatttcttcttgtcggcctttaaacatcctagtaagcccagggccaacgctggcacagggga

SEQ ID NO: 35485 - DNA, 2300 bp, Homo sapien
gtcagtctgtgcttttattatccctatgcaggggataattctgaagtaagactgtgataaaacactcgtggctgggtgtggtggctcacgcctgtaattccagcactttgggaggccgaggtgggcggatcacctgaggtaaggcaagaccagcctggccaacatggtgaaaccccatctctactaaaaatacaaaaattagccgggtgtgggggcaggtgcctgtcatcccagctactcgggaggctgaggcaggagaatcacttgaacccgggatgcagaggttgcagtgagctgagatcgcgcgattgcactctggcgacaagagcgagacttgtctcaaaaaacaaaacaaaacaaacaaaacaaaaaaaaaccacactcctttctccagtccctttcagatacttgaactccagagacaatcgtctctttgaaggtagagccttcctaggcacagtggctcatgcctgtaatctcagcactttgggaggctgaggtgggtgaatcagaaggtcaggagtttgagaccagcctggccaatatagtgaaactttatctctactaaaagtacagaaaattaggctgggcgtggtggcgggtgcctgtaatcccagcactttgggaggctgaggcaggcagatcacttgaggtcaggagttcacgaccagcctggccaacatggtgaaactctgtctttaaaaataaataaaaaataaaaaattagccaggtgtagtggcaggtggctgtaatcccagctactcaggaggctgaggcaggagaattgcttgaacccaggaggcggaggcaggagtgagctgagatggcgccactgcactccagcctgggcaacagagtgagactctgtctcaaaaaaaaaaaaaaaaaaggccgagtgcagtggctcatacctgtaatcccagcactttgggaggccgaggtgggtggatcatctgaggtcaggagttcaagactagcctgaccaacatggagaaaccccatctctactaaaatacaaaattagccgggcgtggtggcgcatgcctgtaatcctaagtactcgggagactgaggcaggagaattgcttgaaccccggaggtggaggttgcggtgagctgagatcatgccactgcactctagcctgggcaacaagagcaaaactccgtctcaaaaaaaaaaaaaaaagaaagtagagccttctggcttggtaataattttacagatgtgttgtattaaacaaaacaaaacactgaaaaaaaccttaactgtgaatacacatacgatccaagataaccccaggaaaaaagaaaatatgttttctctaactcttagaagtttagaaaagcttttcttttctcattctttcaaagcaagatgatctttttaaaaatctgctgcatcttaaaattgataccttcttgggtcagcctcatgtactatcacacttctattatcaaagaatgacctttcatttgttgaaagataatttttatgaaaaattgatgttgaattccaccatgtgccttttcaaagtcctagcttgatctaccaggggattattgttatatagtacttttattcctagacttaaacaaaacaaaaacctttcttgtaccagccaactgtgtcccaaaattcataactcagtactcatcattctctgttgaaattttatcttttcagtgttgtgcaatattttggatgttgtccatattataggctagtcaggatctgccaccttgctatttttcaggtatgtagaaggaggtggaaaattagtctcaatatctaaatcaaacaaaaaatccgtttatgaaagttctgaattccttaggataaatttttgttctttgaaggctatgacttatcaaatggtacctaatgctgtgtggatagccgtgcccgccaaagtagcttatttacccggcaggattgagaccactgatttttgtagagtaagtcataacagcctattaacattccgttatgctgagcatagaactaataggagaacatctgtgaggtcagagatcagaagtagacttcagaatgtactattcaaaaaaggatgcaatggagaacatttacagaggactgtgggtaaagcaaagtcttcaagggaagataacaaaggatgaaacaatggtgttgtgtgacttcctagtgagtgagatactgtgaatttaatctatagctaacttaatttactcttcatcaaaatttagctgactccaacatgcatacaccttttgagcttcctctaattttctgttattagggttttacatatttagctca

SEQ ID NO: 35486 - DNA, 2300 bp, Homo sapien
gttgttattaacaaaattgagcccccatttttttttctgattcaatggaggatgtgatcagaagatcattaatagaccaatctgtttaaatagacaatgaataatcagataatagattgtcttgactggtagtgtatgaacgtgaagaaataaggagccaccttggttttggacaaagggttgtctaacccatctggacagtagttctggacatcatgaatgtggtggtttggtacgattagtttggtggcaggctgccaaatggaatgaaacaaaaagagggtgaccagattggagatcattgggtgggagggtatgagaacctgagcttggactctaggaatgaatggagaagaaatcttaaatccaagggcagatggtaaagaaacaatatataggatttgggagatcatagaggatgttgaaaaggcaagggtaaaaagtgactgctggatctcttccttggttaactttggagaattcaaattgggaaaaggttgtcttgaaggacaaaagatgtgtgcagttactggaccttgagctccaagatggcagagaccatgcatctcttgctcatcattggaaccccagggtctgggaccatccttgacacacttatacagtgagaggctgaaagggcatctcaaatgaattaaaggccacttaccttgatatctacacagtccaataagacatgttgtagacaattacctcccacctgtttaatgattctccggttctagttagccggcataatcaattttgctaaaaaggtatacctctcacgtcttgggaaggacgtcccaaataggcaacttacttaattccaggatgagtgacagaatctacagaccctgaggccatctcacttgtacttgccttaatgtaactagtaaagcatacctggcagtgcagcacctccacaggaaggtgctccagaaagcaattgtttgctctcaccctgctgagaagtagcaatatccatgtggcttaagggctgtagctgcagccatgagcagtgttagaaaaatatcaccaccatttgccagcatgagatgccaaactgcaaataagagacatgtcgattcaatgaagcagaaacatttcacttgtttttaagattacttgcgagaactttattgctatgtgtttgtctgcctttaaataagaaattgcatttttaaaaaaccatctcttctcttctccctacaaagggacgaggctttcctactcgggtgaatattgcctgtgctgcttaccgaagaaagggagcagtcttggcaagcatcttattagtctaaaaataaattattcagaatgcaggttcagatacagattgcagggagagataatagaataggttttccaagcctgatcatgctatgaagacgtggtgtgtgcttttcaggaatccacttaagtggaatcagctttgactaatacatactagaaataatattgctgccatccagctagtgtctgtggtacagcatcctcagaatgtcttcaagtatccacggcctctttagtctctgtaagtgcgcatatgtaaaagtgtatatgtattcccaagcaagcttcagaggcatgcttctcattgttcttttaaggaaatgtcttcctggccgcctgagaggggcatgtctcacttgaggtttgtctccctcctgctccccctgcctgggtgaaatagttgaccacatcagcagccgactgcagtttgtcatgtggtttctcatgtgatgctgggtctgcagcacttgggagcaagagtctttgtgactggcactcatggacagacagtggtgttcagggacagaacagattttggagggggtggggaggccaataaaccaagaaacgtcagaaataaaagtcgcatgaagtactctgatctctgtatttccttttttttttttttttttttgaaatttgattttaactcttgcttttttttatggtttgtgtctgttttttccacccccgctggcgccgagctgcgctgttttgtgtttctttttttttttttttttctattttttttttttaaattctgaagccagaccgtctttcctcacagctccacggctgcatctccgtgggcacgcaagcttcccctggttacctgagctgctcctgccgtctcccgcctgggcttcgccgtggtgcacccgatcccggaatcgtgcgtctgcgccctgcgaaagaaggacctgctggcggagctccggccggggtctcctgcctcgcagctgggcgaggggacttggaggacagggtgaagctgcagaagacctggg

SEQ ID NO: 35487 - DNA, 2300 bp, Homo sapien
agcctacggaccaatcagctcctcccactgtctctttgtggaggctgtagtagcacccaaatctccaagcacaagagacaagggagggaagtgaacgtggccttgaaatctcaacaactgtggtaccctgacttcccataacgattactgactagctgctgtttggcttcaagacagcaaaagctccttcaaggtttaaactcgggagatcaccaaaaatcaaaactccttagttgttttttaaattctaaagtgggaattttagaatttaatttaccctatttactcgaatgtaacttttgacttctctctattgaaatgcacaaaaacaaacaaaaaaatttatgtgtggatacagagataggagactggcagtgccatttttggctatttagtaaaacatcttgtattgatagagcttgcactgatattttctcgcatgattaatttgcatgtttaagcgttcacagtttcatttaatgaacatatcccccctgacaaattgataattcagccttcaattacgcagaattcagttaagtcttatctgtgtaatccatcagtatttgatttacaaacagaaaatttcttaatccatttgcccttgtttgaactgggtttgataacttagttatgactatcttcttcactttgtggcacatatcacatagttattcttggatagatacagtcactgacgcaaccatgaactgctaattacaagctggtgacattctgcttgtctatgcagctttgaagttctaaggctgtttttctcttgtgcgcttgctctgtttcattctcttctcctcatgccacccacccccaatcacttactctctctttcctcttttcactttaaagcctttctggattcactctaggactatctggagaaagaggtaagaatgatcagattctgtaacttattgcttttcctttccttctgtactatccctgcacacagatctacagtttgaaagtacagtaataagatcctcacccagccccatccgcaggaatgcatcaacagctggccaaacataatccaacacacagagctgcctttgtagaattagtaacaaacagtggaagggccagacaggcgtcccagaagagctccccatgacaactgggaaacctcctcacccccagggttgagctgactccactgagctggggttggagaaccccagctctcacatctgaatctacaacaagcctcaagtgcctgccctcaacctcactagaagctattcagagggcattcggctctccataacagcaagttagaagcaagcattctccatactaacaacagccatactctgcctcatggcacatgccttttgaaatgcaacactgcaaatctccaaatcacatgaacagcatttacacctgtacctaaccatcagctgtgagctggtaggaccacctctcgtctttagaaaataatttctttttgcaaattataggctgatcccggcactctgaaacatgtaaatataacactgtattcatctccactgagcatttagcatctgaagcctgtggtagccagctggtctcaaagtcatctgggatacatttattttgattaaattgatcagatttctatttacaggatagaatttttttgccattactgaatacagctgtgtttacagggatttgtagaagaagaaaacaaaaccccacaatcggtcctagcaaagcacagagcattcagaactggaaggagttaaaacagagggggcttgctttcacagtaaaaagaaaattctgcatgcagctgctttggccatgctgtctcactagtcaggaaatgggtgttgaactggagctgaaaacacaagctgcaatcaagcccgatccagcaaagtgacagacttcctgtgtaaaatggtcagaaaccttttttcatgtctctacatgcatgcacatgcatttaaatccatgctgcgaggctgcgattttctctggggacactggtacagtcacctagcccatcagttccttcgtcgacagcgccggggacatccagactacaatttacagttcctctatccatgtgctgggttataaattatgccatcctccctagaatgagaatgcacagcaagcggcagacaatcacccggcattcggcatctctttcttttcacgcgctccctcgctccgcctttctccagctctgccttctcaggcagatacatcagataccttgtttatccatcttcagctccactctgaggtaaaatgccaccacatctcgccatgggttgtccccccagactaaa

SEQ ID NO: 35488 - DNA, 2300 bp, Homo sapien
cccaaagtgctgggattacaggcgtgagccactgcgcccgccctgtgaaggattttaaatatactttgcttcatacgtgacagaagaaaaaacaaaattattccaaacttaaaaacagataaacaaaagaaaatacaaactttgttctaaattaggaataaaaaccaacctgatgttacttaatgttaaaaactagcgttctttagaaaagatggcaaccttgtttattagtttcaggtactaaacatagcatgggaactttagcatcatttgagctatttattcagctacttgacataaatcaatcatcacccctcagttgcatcacaagctctcagaccaaaaatggcaaacaaatgaagttttgtaaagttttaaaatgtacaaccctattcttactgaacttctttattgttttaaattaagggcacagtttgataaagagaaagcctggcaagaaagcacatataaaaattaaggtgaaagggggtaacatgcatagcagttagaagaattaggacaactatgatttttgcataatatatgtctttgcattatttatatatttcaatattccattcacaggaaatgtggggctatggagcagcaaggagacacacaataaattttacagagaaacctgtacctctttgcagtcaaataaatcgactgacagaccctgaataaacacagcttaggttttcttagattgctcttatcctggctatccaagaatgttgcaacacctttaaattttaagattaagttgtcattgtcagttcttataacagattttcttactcttaagtttatgggagaggaggagaatataggataatgttaatttctctgccacacagctctgctttcttaataattcagactctctccatccagggaaaaaatgaatacctaatgtgagtatatggaatcctgacccagctttcagattgagagagtctatgaatcatcacatttgatgtttatgattcaaaatgtaggattgccttaaactaaggcaattaggaagatagtttttcagagacgttagtctttgttaagatttctaggtccccataagagcacttagtcagataattgctaaagcacatatgtggctctaggaactaaggaaaaagtaaatgccataggaagactattttttaaattacctcattcatcagtctattgtaagagacagcaaatttgaaactaaaggtcacaggctgctttagatgcatggacttaaaaattagagaaagtcatcaataaaacttagttcttattcattatagtcatttcatttaggaaatttccaaaaggtgaatggaatttttaagcccatgaaagatgaatttttgtcaccttggcctcagagtggctcagggtcagagaaggtagagagatcataagttaataacagtttacacactgctatccttgaaaagagtggaaattactggctagaatttcagtttattacatggtataccagaatgatgggtgtaagtgtgtctgtgtgtgtgcacacacatgtgtgtttgccctggaaaactactgcatcacttccccaaaataaactcttaaatcaggggttatagcttgtttgtcttagaagtgggtccacaggatgtttacaagagaattcatttcccagccttcctcatatgactcctgattttccgtgaagtaataattgttccttcatttaactcaactatagaattattaggctggtgcgcaagtgactgcagtttttaccatttaaaagtaaagcccaaaacctcaattacttttgcactgaactacttctttcatattctttacctttagtctctccaagcttctgtttcttcatctgtaaactggagagaataataccacttaacacatatgttaaaatcaaaagaaataaacagatgaagatgtacattcaaagtaccatacagatacgctatttttaaaaagacaaaacacatgtatttttaaaaagacaaaacaaaatgtgtatttcaaaaagataaaacaaaatgtaaaaagcaacaaaatgaaggaaatttaatgacagtgtaacaggggactgaaaatcctgatttctcaatccttattctatatctcttggtatttagtgtaaaaattttaaaatctttacctagcaatcttgaggaagaaacttgataactgataatacatgagattgttacctaagtgaaatataatcctatatattcaacaaactttagagaaataagataaattttaaagtaaatgacttctgtagttttatagatcctccaaac

SEQ ID NO: 35489 - DNA, 2300 bp, Homo sapien
attctcccttctggatgaaacacactatttctcatctattaagttaattttataaggtatcagtacaaaaaggcctgtagaaaagagaacattcaaatgccacatcacctccaatggtaataatagcatagcttctctcaagtggtcgacagataaccttttatctctttttttaatttacaagaattctttgagtttcattccactaatgatgtagaagtgacaagtgaaaaagttaaatgaaaattttatgacacatgcaagactcatattagtaaaagaattcttagagactgaaatggcagataaatcaaagaccaatttgaagacgaaaaaaattaatagcttctcatcccttatctgcataactcattaagaaatagtctaacaaacgtattgtttttataacatgattcagaatcacacgcaaattatctttgacagtggccatgttttcttaaagatgctgaattcttcagaacattccatttatctctcctctctctttggaaacccaattaccttggcatttttccttgaagtaataatgtgtttcacaaggtgtcttcgaggtcacatctttatttcctcaccaagacttaccatcagctgcataagaagctcagtgggcacataaaaaggcatacagaagtgggcagacagaaggcaagaagaaatattaccagtatggcaggagaaagaattggagttccagtgccagttctttcagtaattaaatatgtttacatcattttctttatttctgtaatgtgatatttggttagaattagtccatgtttcctctacctctgcaatactatgatttagacaaattagagattgtccagaagttgagcctcaggatggttaatcttaatggatgaacagattgaaattgaattgaacataggcaggagaaaatggaggagaagctattgtaatatgcaggtcaagataacctggagaaaggaggaaagataattttatggagttagagagacagaataattgccacctgccaactggttgagtgtgatgcaagggaaacaaaagaaaaggaaataaactcaactctgagatgttaagtgttgactgagaagctgtttgagagaaaagatgaatcattaaggattttctttaataaatcagcatatcttacttgtagacatatagattgaaatgtctagcaggtaattagtagctcagaagtcaacttagggagagataaacagagctgggatcatcttcatggatgtgacaaataaagtcatgacattgaataagacagccaaagggggcagtacaaggttgaatgccaacaaaaattaacatagataagaactcaaggaattatttagattcagccattaaacaatcatggtaacgagtaagagaaaacaaaacaaactaaactatttatatattatttttgccatatgttctattgtagatgttctaggtgcttgaaatacacacacccatatcctactcttgagtcttggttaatttcccctcacatttgtttaatgcatgcttaatatttttgatcctattattgattgcaaaaagactatagacagtctcatctccattattgactgcatatcaatacaatatcacaaagtactgtactatgctttaacatttttgcctagtaacaaatttattactccagcaatttaatttgcttgctgtgattttttgtacttcaacgtttttagacactccattttaatctaggtttttcaaaagcagcactactgacatttggatggcataatattatgttctgagggctgctctgtgtgttgtaagatgtttagcaacatgtctggtctctgctcaccagatgccagcagcacccccacttccagttatgacagtcataaacatcttcacacattgccaaatgtctcctgggaggcagaatcacctcctaactgcttgccctttgaaaaccactcatttagattgatggggttcagaacacactaccacaaaatatggcatcttggcatttcagaaaacagcaaaaacaggaagttcactctgtaagcttctcccacccttctcccctgaagcaggccataaaagaatcctctgacgtttctataaagtaggtcataagaaccttcattccagaagtaccctcaaagacagagacaccaagaagaatcggaacatacaggctttggtaagttccctacagtttattaatgttcagtcatttcagatcatactcctttttggacaattgtatttctacatgactgtccactttttatcaaccttaagcataa

SEQ ID NO: 35490 - DNA, 2300 bp, Homo sapien
taatagaatctgtactgttgtttgcagacgtagatccttctctactagatctttttgcctttgcttcctgctatactttttatctcagttttccataggttttggttattgctctaacccttagatccccagtcctgccttcacaccctcatacttgttcacctgctgtagttcaaccacccaactattgatgttggctttttctagtgaggcacctttgccaccttcagcttcagcagctggcttttagaaccggtcctgccttcagattgagctgatggtacaactaaatacctcttctagacatgctatctagctagatttttttcctacttcagcaaccttcatacatgatatgtgcattggtacagcatacttacctgaaaaataatggccacatatagcaatatctctgcttacagaaattccaaattccttcctattatgggctccatagctacctattatttcctattttcttctacagccactaaacatttctagttttctagcactttccctgtaaaactgagaggagggaacttgtcatattcatctttgtagcaggatgttgatttgtaaacgaagtgttgatgcattgttgatgttacttatttaataaaggtataatagatattagcagggcagataggcattctaagaaaatggcttgacataagagctgaaagaacttgtttagaattttagaattatcaaagggcttcatgttcatttcaccttgttagggagaggatatctccttttgcctagagcatgtctcaaccattcagagttaaaatggctgttccagcccagcaaatgggaaacaaatttgagttttactgaaatgggttaagggctctaattctcgtctagtgtgttggttacactgggaaggaacatctgtctagttataatagtcaagagtaccggtatgataaatttgggtaggtttcagagtgcttgctcacagctagcaaggaggatccaaaaaagatgcagaaagttgtgtaaacaactgcaattgcactgacactttcattcatatgtttagaagagacatatctgaagaaaattctttttaaaatagtttctcagctgagattatacttttttagtgtgtagctcacaggaagttctagttgccaagagcatgttcgatatgagtagatctctacctaattcttatgcataatgaacccaattttcatctcttctagaaagatactgaaaacatgtgtcgtgatctcaatgttacaaccatgtagcctcatctttcacaatacggtacaatcaccaacgaagtttaaacttcatgtctggcatccaaggtgaacatttccatagaaagtaggaaatatttagatgtctgtttgccgtggtggtggtgttcctatatactttttgtgaccctaaagatataataatgtttgacatttttgttagccagtaatgtggacttaagacatcctaaccacactgctgactctaaccctttaatagactttcacgtagttcttgagcctcactgcaggctccagtgctagtcccggaggaaatcagaaaagggttgaaaccactgacacagccatctctttagctcctcctaacgcaggtgtacagtttcctgtagtgagcagatcggggcctacagggacactgcatgcttgcactgggctgttactagtttcatggaaatatgtactaattgtgtcactgtgttttcttgtcacactgccccctttctaggccgctctggcaccgtttatttaaactgtgcaaccatctggcccaggtgccgtagagattgatcagtagcacaaggccaccacaagcacaaccgccacccggccatcccagctatttcctccagcattctagacatcatggcgtccgagggtgggtccaacgggcttcgagtgttcgggagataatgcacacttcgcagtggatcttctcggggccccgagcgttgcccgcccattaggtggcgccggtcccctcgaacaggtcgctcaacaactcccgcccagcagccgcccttactgcgcgcgcgcagacttcggcgtctacttccggtgtggcccaggcggggtccgcagaaccagctatgtcggcctacggcatgcccatgtacaagagcggggacctggtgtttgccaagttaaagggctatgcccactggccggcgaggatagagcacatgacccagcccaaccgctaccaggtgtttttcttcgggacccacgagacggccttcctgagtcccaaacgcctgttcccgtacaaggagtgcaagg

SEQ ID NO: 35491 - DNA, 2300 bp, Homo sapien
gacagctataaaactagagaaggaagttctagctcatgaagaccttggaagggcctgttaaagagttagaactatagtatcccactagcaattggtaaccattaaaatgttttaggctgaggagagatttgctcaggatcgccattaagtcagtgttactggctcaggcaatgctggagatgctagtaacattcactgatgtacagagcacaaataaaaatgacagtttgggagaaagtgataaattccattttgaacacaattttttaatccctgtatttccatcgagtagccgttaatggctgtgaagtccaggggaaggttatgaatgatagacagatcttggaatcatcaatcatccattcaatagatgttcattgagttcctcctatgtgctacaccaggtgctaaatctaggcatacaacagtgaataagaggaggcaaggttcccaccatggtgaatcatgcatgtggatgttcattgaaactctaggagcacaggagatcaccgagaaggggatgcaactaaaatgcataaggatttagatggtgcttggtacacaggataaactagcaagcaaaaatctaatagtgataattgcaaaacagagaattagaataagttgaaatgatgccaagtgatctaatgcacataaaatatctctttgaaaactgaatgacattttaaaaaagctagcaatgtgaattatgaatatcaaaggggagggtagtaagaggcagagggaatggctaacgtgaagaccctgaaatgggagagagcctggaagatgatgagagaaacagagaggacacatgagtatctcctgctgggctctgaaagccaggttaatgcattggagttttagtccaaatgagaagggaaattattagatggttttaagcaggtaagtgacatgatctatattatatatatttttacacatcactcttgctgttgtgtggataattgattttggaagattgaaagcaaggagatgctctaggagcctatttcagtcatccagggaagcaatgaatgtgtcttggtctagaaatgattgggttcactttatgtctctgagtgaaaaagagcagatttgctaatgaattaaatgtaaagaaattttaaaaaaggaacaaagagaactcttagattgagagagcaatgtggacagtatagcaattcatgagatgcagaaagatataaaagaacaagatacttgagtttttcagaaacacttatgtttgataatgttttgttctccaattacaatgttaattgatgtcttctttctccaactacaatggaagctacttgaagaaaaagaccacagctcctatcaacaaacattttgttttttctaccctatttttcccaggtttttgatatgacaatctgaaatgaagaagtgtttattgaatgactgaataaatgaaagaatatgtttttatgtagaaaataaggcactgtgtttctgctgcttaatcttactgtgttccctcagaccattaatctctaccatgaagtacttggtctttattcactgaaatggcaataaagacaagttgtagctcttccccacacttttagaaaaagaaatatgagaaacaaaagaaaatttctttcaacaggcttttccaagagagcaaatttgccctagtagaggctattgagcatccaagagctatttgactccaaaagaatgaatatggagtcattcacattccgcattccataagtacgttatgctagatatcatctgcatgtgatttaaacctcacagcatcccaaaagggagacgaaatgataaagatgatgatgatgatgatgatgatgatgatgatgatgatgatgactgccatttcatagatgtggaaactgaagttttagaagaggaagtgacttgcataaagtcatttaactaataagggacatgcatagtcaggactcaaacctgacaagtcagtgttcatagcttttgcttttccacactaaggtttccagtgacagatattaataagacttatgtctgagcagtcaaacaagacctatgaaagtcctatccatgacttcactggcattcaatcatttttctccaggtttcacaaatgagcagatcaagggttctccaggaagacctgccatgcatagacacctctacattagtgcagtcaaggatcaggaaacccctttctaatttgagcaacacacatatgaaggtaaggaagcggagtcaaaagtgctgtcagatacttttttctccactaaaattaaacccagaacattgaggtggttggc

SEQ ID NO: 35492 - DNA, 2300 bp, Homo sapien
gaaacttagaattcttgagactccaaactggaaatactcagcggcttttaaaatgtttagctaaatcatagtaaaattaaaatagcaataataatataacaataatagctagaatttattgagtacttactatgtaccagatactgtgatgtcttatcaatataatttcatttaattctaataactagcctatgaattaagtattattagaaacatttaatagatgaggaaagtggggcatagagtggtgaggcaactccaactgtaagtcttaattagactacccctctgaatgaacagatgcattaccaatagagatcaggacacttagcagacaccaacgaggcagacatttcccttcctggagcctaatctctgatacaagagcagctcagagcccctggaattttatatatgtgctgattcttacagactttcaaggatgcaaaaacatacacggccacatttaagtgttcaatggatccacacactgcaagctaacaagcaatatgttaaaattcatgaaaggtgtacttttatgcaggctgggaagggagaaagaaataagtggcacctatatatttaagctgtgttgaagagggctgggctagagttgtggacgcgaggaagaaacaagacaaagccatccctgtccttggtggccccctaaacattggttcaacaattttctttggtctgcccactgtttaacaagacagaggtgtttcttagtgttttttaggctttttcctgaaacctatgtggaagtgaggaaataatgggcaaaatatcacttatatccttaaccctttccaggagatcatcttgcagattgcagatttagtagctatatgaccttcgacaagtaattgtgagtctgtatcaccgttgagtgcgtgtcacttttctgtacctcagcttcttctgtaaaatctggatcagagaatgcccaccacattgggttgctgtgaggattaaatgatataatatacatataattaatatatatgtaatgtacttaacacaatgcctggcatatagtcagcactatgtaaatgttaggtattattattattatgtgtagtatagccatgcaaatattaactattttagtaattattctcattaaatgccacttacaagaggtctgcagaaagtctcctgaagcagaggttattgtatttatacactaacttgcccacaactgtgcacattttctaaggcattcgcgggtaattttctaatgtgttcttgcctttatgcatttgtgcttttttcttgaacgtcataatttaatttattttcttcatctttctttcatcaaacccatttggacttcctgacggtagggtaagggaaagagtgaggattaaaactacccaatattcaaagaggtgagaaggttcttcatttgggcagtgctctaccagcaaagagaagctcctcaccttgtgtcccatcagggacagaaaacatctctaatagggtggcagtggaagaaacacacatcatgaccatctgcctcttcactcattttaaaaatatgtacagtcatgcactgcccagtgatgttggagtcaacgacagattctatgtatgacggtggttccataaggtattttcactgtaccttttctatgtttagacacacaaattcttactattgtgttccaactgccaacagtattcaggagggtaacatgctgtacaggtctgtagcctagaagcaataggctctaccatatagctaggtgtgtagtaggctgaaccaccttggtttgggaaagtacacgctatgatgttagcaggacgaaatcgcctaaccacatatttctcagagtatcacatccccatcataatgcgacgcctaactgtatattgaaccagccttctacgaccaaaatatggtctgggcagaaaaaagctttgaagaagcactaaggcagagaaggtgcccatcctggggagcctcggcagggcccagtgaccagccttccatggccctgacagctgccctaacagaagctccagcctcacggtgcaggcaggaacaagcctggcgcgccagacagctcggccccgcccactcgccgctctcggaaagctggaaccctgcccctttggagggggaggcggcggcggcggcggcggctgcgcgggcctcgggtgcgcgggcacgcgggactcccagctgtcaatcaggcgcgggctgagctctacgaggcggagcggcggcggtggcgacggcgatgggaccccagcgagagatctgcagctaggctggctgcacttgctccacg

SEQ ID NO: 35493 - DNA, 2300 bp, Homo sapien
gtctcacatttgaaataaataagggtttaatagctacctgatgtttagttatcgtttcaaaaatattagaaaaatctaagtgaaagcaattcaagcagcgatttgatcagttccatttgaaaaagatgttgctgtctttcccaacatttagggtctaaatgaaagcccacgaattgtcctcaatatcgtttgggctttcttttgttctgacagtttctccattctttacataaacttataagtgctaagtttcaaatatattcaacattcaagtattcttggcttctatcattataaccgtagatactacttctttaacacaaataaaatagtcatctgtcagcatggaaacctaaccatggacactgttataacaaattcagttttttgtgtatgaactgaaagcaaaaataacatgcaaatctcttagagagacttgagtacacttttttatttggtgtggaactgtaccttttttttttaatcttgtgagttggtaggatcaaataaacaaaagaacatgaactataaaagtgagtctacaattttcagccgttcagagattctgaaccagactttcatttccacgaaattgctttagacggaaatatttaataaaaaataaagtatgtaacaaaaggaactggtcatagaggtgtcttatatttatgtaacactttggtgtttacaaaacacacatctatagcatttactttttatcacagccctgtgtggtacaaatgattatgcaccttttctgtattaagaaactgattagctgagtcaagcgacttgcccaaggacacagagctgatgagcaactcagtcttcagtctcctggttttaagtttcctttaagcatgcaatttcatttagcccttttttacgaagtttaacaaagcatgcttaagaagcttcaggggagggaaaaataaatccaaatatatccctcactttccatgaaaagaatgtctgacgtaacaaaaagtataatagaatacctagaactcaatttaaacaaatataggagaagaaggattacattcaagaattttagtgatattttgaaaaatatttctatgtagttataagactttatttgaattttaattattaagaatccaataatgcttatgaattcataagcttagatttatggtcaaggcttttttctatcctggggcccaagatgaatttcaattaaaatgttctattaaactatggaatacagagttaccatgtgatccagcaatttcactcttaggtatacaccaaagagaaatgaaaacttgtacacaaatattcatagatgcattattcataatagttaaaatgtgaaacaacccaaatatacatcaaactgataaatggataagcatggatataaaaggtaatatacccaaatcatggaatgttattcaacaataaaaagaatgaagtattgatgtatgatacaacatggatgaaccttgaaaatgttacagtaagtgaaataagccagacataaagaccatataccgtatgattccatttatatgatatgtccagaatagacaaatccatagattcagaaaatagattagtggtttccagatgacaggggacagaggaaactgggaggtacaaatgttttggcgggaggggtggaaatgaactacaattagttggtggtgatggttgcacaactctgaatacactgaaagccaatgaaatggttggacttcatgccatgagaaatctatctcaataaagctgtaaaaaaaaaatggaatgtaaaattctacctgtcctataatgaccaccccaaccaactctcaactcacaattcccacataactttatttttctatgcacatatccctttgtagcttgcattaaaattgttagtgtgcaggtagtccagttagactgaaagctcctaaagacaaggaatcatgccttgctcatctttgttccctgaactgacggtttcttaattcactgaacactcactatgagtgagctcaagagctgggaataaggacccctgcccttgaaggtctaatcacgttgctggagacagacagtcgacaaatacagtcagccagtaaactcttcctgcattatgctaacagcataaacatgcagggggtgggagcagggtcacaaaagtgagtgttgtcaattctacttggaatgaaaggttgaaataatttaaacagtacgggaaatgcagagcaattttctcctctggtgacaatatagtgtccaacacttggaagtgatttttaagaatgtttatttaaattaaaaggatggat

SEQ ID NO: 35494 - DNA, 2300 bp, Homo sapien
aaacagcgggaaataacaactccgttccccttgggtgagagaggcccgcagaggtaacagcagctggaggaacagcgtgagcggcgcgcagccgccgcagagttcaccactgtgccacccgagccgcaccgccccgcccccgcgcggccggcgcccgagctcccctcccctctccagcacgcgagtgtcggtaggtactacggcggagggcacctcctgggcccgcctccccaaccagggccccgcttgcgcgctgcctgctgtcttcacgtgatgcgcacccgagcttcgccgccaggcggcgctgatcatcggggagggggttaggggtcctagacacgcgagtcttcgctctgtttctcattcattcattcattcacttaaatgttatttttcccttccttccttccctccctccttccgggatggggtcttgctgtgctgctcaggttggtctcaaactcccgggctcaagtgagcctcctgcctcagtttcccaaagtgctggggttacaggcatgagtcacggtacccggattctctctttctctctctgaatatatataatatatataaaatatatatataaaaatatataatatatataaaatatataaaaaatatatataaaatatatataatatataaaatatatataatatattatatataaaatatatattatatagtatatataaatatatatactatatagtatatataaatatatataatatataatatataaaatatatataatatataatatataaaatatatataatatataatatacataaaatatatataatatataatatatataaaaatataaaatatataatatatataaaaaatataaaatatataatatatataaaatataaaatatatattatatataatatataaaatatataaaatatataaaatatataatatataaaatatatataatatataaaatatataaaatatatataaaatatataaaatatataaaatatataatatatataaaatatataatatatataatatataatatataaaatatataatatataaaaatatatgatatataatatatatgatatataaaatatataatatatataaaatataaaatataaaatatataatatataaaatatataatatataatatataatgtataaaatatataatatataatatataatatataatatataaaatatataatatataatatatataatatataatatattatatatataaatatatataatacatatatattatatatattatatataatatataaatatatatataaatataatatatatatttatatataatatataaaatatatattttatatattatatataaaaatatataatatataaataaataaataaaatatatataaaataaaatatataaaatatatatataaaaaaaatatatattttattttctaagacagggtcttgctgtgtcgcccaggctggagtgcagtggcaaaatcataggttactgcagcctcgacctcctgggctcaaacaatcctcccgcctcagcctccgagatagctgggtccacaggcgaataccctgcccacctactttttttttttttttttttttttaattgtagagaccgggtcaggctggtctcaaactccttgcctcaggggatcacaggcgcgttatagagacgggggctttccctgtgtttcccaggctggtctagaactcctggtcttaggcagccctcccgcctgggcccctcaaagtactggaatttgcaggcgtaagccaccgcatctggctttgcacatttatcttccagcaaagaaaaacctgggcaactacatccaggaacttaattgctttaatttgggagcaagcaggagattgaggggtaaaggtgcaagaagagagaaaagaaaaattaggctgtttggaaagggtagcacagatatgatgtaagaaattgggtttcaccatatttgtgtgtgtgtgtgtgtgtgcgtcctcctctctcctgccctcactaggcgtgcctgtttgaaggccccgcgcgtttccggctcctgctcagaagctgtccaccttgattctgcccgtagcaggtgaacctggtgtggtgcgcgcactgcgggtcctgattggctgtgcacgccacggtgaaaaacttgagcgtctactccgagtcctgcaagctcctagtgtctcctctgggtggacgcctaggcgcacggccgttacttctctttcacctgtggattcgtcagtttctcgttcgt

SEQ ID NO: 35495 - DNA, 2300 bp, Homo sapien
aaattttagttaaggcatttctaaaactttatttcaattctaaatcgtgttgtaatcttaaaaaatatcaggtaacctgctcgggtccccttctgtgccgtggggaagctttgtcctttcgctcttcacaataaactttgctaccgctaaaaacaaaacaaaacaaaacaacaacaacatcaaaaatcattgtaaaagtcagttaaacttaacatctgagataataaccatgcacacatctcatctaaagtgatgacaatgtgaacagtatgatgaagttctgatttgctcatgcaatcacctatgccgtgaccaccacctggccaggacaattacttgtaagagttcattgactgtaaggcacatccttatttcagagatttaaagatgtggaaaaaaatgtgcatcttggtgctagagaggatgtggagaaacagaaatgtttttacactgttggtgggagtgtaaattagttcaaccattgtggaggatggtgtggtgttttctcaaggatctagaactagaaataccatttgacccagcaatctcattactggatatatatccacaggattataaatcattctactataaagacacatgcacacatatgtttactgtggcactattcacaatagcaaagacttggaaccaacccaaatgtccatcattgatagactggataaagaaaatgtggcacatatacaccatggaatactatgcagccataaaaaaggatgagttcatgtcctttgcagggacatggatgaagctgaaaaccatcattctcagcaaactaacacaggaacagaaaaccaaacaccacgtgttttcacttataagtgggagtcgaacagtgagaacacatggacacagggagggaaacatcacacactggggcctgtcggggtgggagtgtagaggagggatggcattaggagaaatacctaatgtaagtgatgggttgatgggtgcagcaaaccaccatgggacgcacatacctatgtaataaaactgcatgttctgcacgtgtaccccagaacttaaagtataataacaattaaaaaaaagtgcatctgggaaaaaatgaagtgtggtgatttgtttcttttttttttttttttttttgagacggagtctcgctctgtcacccaggctggagtgcagtggcgcgatctccgctcactgcaagctccgcctcccgggttcacggcattctcccgcctcagcctcccgagtagctgggactacaggcgcccgccaccgctcccggctaattttttgtatttttagtagagaaggggtttcaccgtgctagccaggatggtctcgatctcctgacctcgtgatccacccacctcggcctcccaaagtgctgggattacaggcgtgagccactgcgcccggcctgtttcttcctttctcttctcctcctctggtttaagtaaattcctgatattcgttttgccatttgtctccctcagattaaaatggagttgatcatggttgaaaaattacatttaggtagggttcagggtgtgctgagtaacattttactgcatttttaagttaaatgttcttaaaacttttttattcataaagatgcttcaaaatgtgcttttaaaatctacatgcagtatggtttcattgtattatctgaaaatgtcactgggaaatgatcaaaaagattcccaaactgaggggttgaaaaatgctatattgggcaattactgaatcttctgtagtttttgagtaagctggaacccaatatatgtgagtagaaaatattaggatgtctatccttaataatattatctcctctgctgctcacagtcttatcaactgatacaaaattttttaattaaaattttcaacctttgacatcagaacatcatagttcattaaagtagccctttccattaattccagaaactggactccagttaaccagtaacttctgtatcagtgacataatttcctgcacaattgttactttgtaatggttaacttctctcttagttgttcgcagcagggggtagttttcttacttttttttttttttttttgagacagagtttcgctcttgttgcccaggctggagtgcaatggtgccatcttggctcaccgcaacctctgccttccaggttcaagcaattctcctgccttagcctcctgagtagctggaattacaggcatgcgccaccacgcccaggtaattttgtattttcagtagagacggggtttctccatgttggtcaggctggtctccaactcccgacctcaggtgatcccactgcctc

SEQ ID NO: 35496 - DNA, 2300 bp, Homo sapien
acatagcacatgtttcagggagcacagggttgggggtagggttacagattaacagcatctcaaggcagaagaattgttcttagtacagaacaaaatggagtctcttatgtctacttctttctacacagacacagtaacaatctgatctctctttcttttccccacattatcaagtcaaacatcctctcttctgtgaaggcttctctttgtgcactgccctcctactccatccccagtcccagtaccctgcagaataaaatgtttctatctctgtctccttagctttgtgtccatacatagatattgaaaggaagtctgtggaacttgtgtctgccttgtattactactgtggaagggacaataaatttattaactcatatttttaaaatatgcatacatactgtatttaacctaagacttttttcatattttaaagactggaattgagatatgtctttcaatctacatgtttagaaagcataacttatcagtttttttttctttcttggtggtacataaaataatggtaccttaaaattgatgctatcttacattttattaaatatggaatagaaatcttatgtgtctgtgctcctcattctttatagcaaaagtttaatacatgacatcattccatatgacagttgattatttttgccactactggggctcaaaccataataccccaaaatatgatgttttggcatgctgagtctttggggtttgtttgttttgagatgggagtctcactctgtcgtacaggctggaatgcagtacaggctggaatgcaatggcatgatctgggctcgctgcaacctccacctcctggattccagcaattcttatgcctcagccttacaagtagctgggattacaggcacctgcaaccacacccggctaatttttgtatttttagtagagacgggttttgccatgttggccaggctggtcctgaactcctaacctcaagtggtccacaacattggcctcccaaagtgcttggctcccaaagtgctggattacaggcatgaggcaccacgcccggtggcatgttgagtctttgaattaaaggaaattaaaagggtctcagaaagaagcctaaaaatcaaggcctctctctctcaccttcccccttccttttgtctctctgatactcttactttttccaagcacctgaaggggctctcttttcctgcacagccagataaggaatttccttatctgacagagaaaactcttttccaaagaaatgcaattgtcttaaaacccgttccttaggaatcgcattaaataatcagaagagattaatcacccagagaagagacaaaaactgaaagtcatagccacactgagacttttcatagatacttctgagggtagctccaagagattacctgggaaactttacctgtataataggacaatttttgttcagagtgaagtttcacagcttgtccacaagcgattgtttgtacttctgtcccactgaatgtccaaggagaatcatttgcaaaccactgtctggctttcgggcccattcatacctatctccctctactcaacaaagaagggtatacaagcatctggaccttaattgagttattgagtaatcactcttctgtgatttttccctatgcacgttaagcaaattttgtatgcctttttctcctgctaatctgtctacttagttcattccagcaactttcagagggcaaaagtaggagctttccctcttgctccctacaccacgttaaatttaaatataaattaaatgatgtgggaatgggtaacctgctcatttccaaactgcaattttcataggtatgaaaattctccacaaactacaaaaccatgacactccaagcgcccaagaacctaggttggacagctcacttagtgcaggtaaacgtgctccacccatctcccagcccgcctgccccctcacttaggtacaggtgcaggtacaggtaggcaagcaaacgtctattggctgtggacttaacaggctcgcccacaggtaccttccgagcatgcgtggggaagtagcacgcaggcgcggcacgccccgcgcatgcctggtgcacagagtctgcaggtcgggcggtagcgacaggtcagagctgcggcctgagcagccagcgtccggcatgaaggtctggggtctggctgctgcctgcttcttgctccagcaccatggaatgcctgcgcagtttaccctgcctcctgccccgcgcgatgagacttccccggcggacgctgtgtgccctggccttggacgtgacctctgtgggtcctcccgt

SEQ ID NO: 35497 - DNA, 2300 bp, Homo sapien
tttgtgcccagagctaaagtcccactggactcggtgttattatgtatgggagcacagggaagcggcctcttctctagaccagcgagattaggaaaggcttcccagaggaggggacacctgagccaaattctgcagggtgacaggagtagccagcagagggatgtggacaggggagcacgcggagcatatgcctctattccaggcagagagcacatcatgtccaaaggcccaaatttaagacatagattgggctgtggtttaagttcattttggtgaagtgtgggtgaaaaggttaatggcgctagatccccaagtgggagtcagattctgtaaggccttgtgaagagtttggactccatccagagtccacttgcgtttggatgtgtcagtcatgggggtgacctagtttgtgatacgagaaaataaaaaggtggctgtgtggagactgtattatggggataagactggaaaaaagaatacctgcctggagggaaatcactgaagctctctggtgtttgtgccttggtgcccaagctggttgtacctccctgactgccggagatgaccagctccgaaaccgactgtcctgtaggatcccgagtgatcagtgtcacttgaggatggggtgctattccgtgttctgtaatgccttcctttctgtgaggccagcaggaactgtggttcgtttcagatgacgtgtctaaggtggcattcctgaccgtgaccctacaccaaggcggagccactcgcatgtacgcactcacatctgacgcgcagcctctgctgctcagcaccttcagcggagaccgccgcttctcccgatttggtggcgttctgcacttgagtgacctggatgatgatggcttaggtaagaaaggaacaggaccctttgacaagaattgagtccctttgcccagggggtgggtcccctaattgggtcatctgggctctgcccttataattgacagcccagtggcccaaggacctttagacagatcttgaatgaggcaagaccagagagggagttgcacttcttgaagctggtaatatgagaatcacctgtagtaattgctattgatgaatgaagtaggaaacaaaagcctttgccaggatgaaatcacagccgactaaaggagatactaatattatttgtaagaggttgggttaggatccagtagcggaacaaggaaaagatgacagtgaggagtcaaatacttccttctgtcggtttttattgttttcagatgaaatcatcatggcagcccccctgaggatagcagatgtaacctctggactgattgggggagaagacggccgagtatatgtatataatggcaaagagaccacccttggtgacatgactggcaaatgcaaatcatggataactccatgtccagaagaaaaggtaagtgttctacaaaattctataacttattgggaaaggatcactaattgctgattccttgttaactcatgtccactataaagtgcttacctgaattcatacctcctagggtcaggacaccatcatctgtccatgttttgtgggccccagctgcctgcagttcttacagttctgcaacatttgtgcccagagctaaagtcccactggacttggtgttatgtaggtccctggtcacacagcctgccactgcttggttaggcacccacagcacagaagaaagaaaacaggccatggccattggagtttctctttttaaaatagagacgggttcctgttccattgcccaggctggagtgcagtggtgtgatcatggcccactgcagcctcaaactcctgggctcaggtgattctcttgtctcagcctcccgagtagctaggactacaggcatgtgccaccacacccggctaatctttttattatttgtagagatggggcctcactatgttgcccaggctggtattgaactcttgggctcaagcagttcttctacctggcctcacaaagtgctgggattacaggcatgagccaccatgctcggccagccactggagtttcattaaaacgtcctctcttttgctttttgtttcatttctttgtttattccttttttgggtgagtttccttaagttacatttcctgggcctaaagcatttggccattatttaactttttttttttttttttttttttgagacagcgtctggctctattgcccaggctggagtgcagtggcacggtctcggctcactgcaacctcctcctcccaggttcaagccattttcctgcttcagcctcccgaatagctgggactacaggcatgcaccaccacgcctg

SEQ ID NO: 35498 - DNA, 2300 bp, Homo sapien
atgcgaaatggctgttggccagttagctcagttgtggtgctaatgacaccagggtcgcaggttcagtccccttacaggtcagttgttttggccaggcatggtggcgcatgcctgtagtctcagctgcttgggaggctgaggcaggagaattgcttgaacttggaaggcggaggttgcggtgaaccgatatcgcaccactgcactccagcctgggtgacagagtgagactccatctcaaaaaaaaaataaaaataaaaaaataagtaaaatgtccattggttcagtccagaaagatgggacaactcgaagcgaggaggaggcttccaggtcataggtagctatgagacatccttccgaatttccaattagcctttcactgaaaatgcagtttacagtaatagtgtcacttatgctgtagtctggtttagtgaaacaattaggcaaaggaagcaatcagatatacatttgtctcaggtgagcagagggatgatatttgagttctatctgtcctttgcccacatgaatttccttgtgggcaaattgtgagggaggtatgtagcttttaatctttgtagcaatctcacttagaaatagattgggagggccaggtgtggtggctcacgcctgtaatcccagcactttgggaggccgaggcaggtggatcacctgaggttgggagttcgagaccagcctgaccaacatggagaaaccccatgtctaccaaaaatataaaattagccgggcgtggtggcacacgcctgtaatcccagctgcttgggaggctgaggcaggagaattgcttgaacccgggaggcggaggttgcggtgaacggagattgcaccattgcactccagcctgggcaacaagagcgaagctccatctccaaaaaaaaaacaaaaaacagaaaacaaaaacaaccacacagaaaccacacagaaatagattgggaggcaggtttgccctacacggttcccagcttgacttttccctttagtttagtgattttggggttctgagatttattttcctttacaatatttttatactttggtatacttttttgtatactttatatactctgaaattaagatgtcagggtgaggagacatttttataatagtgtttttaaaataattcttttcaattcaacttgaaaccatgaaaatactttaaattacttcttgaactctgaattcacaaaattaaccactctttttgtacgttatagttagtttccaatctgagtatacctacataaatatttgatttaagttaccagttgtttgctctgcatcattgggccaattatttaacttttctgtgccttaatcatttcttcttatgtaaaacgggaatatgatagtactaaccacctgaggtcattgctaggattaaataactggtgcatgtaaagacttttacatggtgcctggcacaaaataatcacggaataactggtagctgctgctgctgttgttactattttcagcttcagaatcaaaacaactcttactttattctgcatttttcaggtatgtgccagtcaaagatctactgggaatttatgagaaactgtatggtcgaaaagtcatcaccgaaaatgtaatcgttgattgttcacatatccagttcttagaaatgtaagcgtaactcagaggacaatttgcagctgattttgttgtgacttcctttgcacagtttttatgtttttgtttcctgagactggattttggatttatggattctgcttattcaaaggcagttgcatgacggtggaaaagggtggatggaactttttcttcattatttgcttcatttctctgttacaaactgcaactcacagccaaaattattgtttattttgcaggtatggtgagatgctagctgtttccaaggtaaaggcgtcattcttccaaatcttaaaggattataaagataccaggaatagtaccatattcattttattttttctttctctctgccatagttatatcccacttactctacaaagtccccgtttttggtggaacaattccaagagtattttcttggaggactggatgatatggcattttggtccactaatatttaccatctaacaagcttcatgttggagaatgggaccaggtgaattcatattgcatttctattaccaatcactctctgcctttttaccccatcccccaacataactctcaggtttttcaactgatcacataaaaacaaaacaaaacaatctcatgaagtgcttttctaacctattcaaagagggaaagaatggaaactcagtgatcttata

SEQ ID NO: 35499 - DNA, 2300 bp, Homo sapien
gaacccattccttttttttttttgaggtggggtcttgcccaggctggagtgcagtggtgtgatctcagctcactgcaaccttcacttcccaggtacaggcgatgttcccgcctcagcctcctgagtagcttggaccataagtgcatgccaccatgcccggctaatttttgtttttgtttttttcttggtagagacgggattttgccatgttgcacaggctggttttgaactcctggcctcaagccatctgcccgccttggcctcctaaagtgctgggattataggcgtgagccaccacacctgttctgaacccatttctttggtgctttttggatgggtttgttgtattatatatggttagatatcttttctagcagtatttttttcccctgtaaccattgattgactgctcttggatgttctgagagacaatatccaaagtcccaattaataattgtgactccctcacgcacagtctgtagaaggcccagagtgacagggaggcaaactcaaaggcctctggtggccagaaggggtgtggaaacctgcacacattgcatggatggtggggactggaggagcaggacatgctctatcagggggcagctggctctttggctgcagctggttgtcgtgtcacatgggagcgtcagttcatgatgccagttcttttgtttttaagagagccagaaatctagatttctacgtgaattttctcatttagaaaaagttcataaacttgatttaagtttataaaacatcctgttagccaaacaaaacacgtaggcatatggcctctggactaatcaggagtagctgggcctactgcccctcaggtctgggggtagctgcgggatttctttccttggggctgtgcacatggctgtgttaagcttacaggggaaactgttggggcgacaactgttgtcaaatcattccactttctttttttcttttctttttttttttttgagacagggtcttgctctgtcacccaggctagagtgcagtggtgcaatctcggctcaccgcaatctccacctcctgggttcaagagatcctcccacctcagcctccccagtagctgggactacagtcacgtgccaccacacctggctaatttttgtatttttagtagagacggggtcttcactatgttgatcacgctggtctcaaactcctgacctcaggtgatccaccagcctcagcctcccagagtgctgggattacaggtgtgggccgccacgcccagccaaatcatcccactttctattcatcctttcatttggcaaacctgaagtgaatactatttcctcccactcttttaggagcccatctcttgcttttaatgtaaaatatgcataatttgtgttttaagattaccatcagtttcatgaagagcttaatttttcccatggatgaagtgtaagtgggtacctgataatatatcgtgagcttaacattttccaaaccctgtttcttggccctaaatctgcccccttccttccacctcccaagtggaattgacatctttgcttcagctgcaggaatctgaccttgcaacaggctctggataagccctattagaacagccagaggtagagagaccaggagtggctgctcttgtgtaatcccatacaagtgtcagtatctgttgccaaatactgaaaaggaagccagttccagctgattaccataaaactttcccagcacttgtggcttgggaggcggaggaagcaggacagcctgataaatgtgtagaaaggatgcatgagagatccacccttgtaaggtgaggtggtctaatatgttgactatctgcacaggtgagcctttttatagaaagcaaaaaatatctggagacaactttgcttgcatctctacacaaatttcatgttaaaatgaaatccagaaaaaacctcggtcagaagatgcagtgcttctggcctaaggcttttcagatttcagtttatcctcccaaccccaccccccaggagcacagagtttgtttgctgttctggtgaagctaaacagtagttggacagttgacttcattggaaaacgatattattttgaaatgaggcttggtttcctcggtcagtgacctgcttagagagaagcggtgggtctgcacctggattttggagtcccagtgctgctgcagctctgagcattcccacgtcaccagagaagccggtgggcaatgagatcatgtctgctttcaggttgtggcctggcctgctgatcatgttgggttctctctgccatagaggttcaccgtgtggcctttcaacacacgt

SEQ ID NO: 35500 - DNA, 2300 bp, Homo sapien
aaaaataagtaaacaataaatagaaatcacattttacatctgcattggtgtaagattaacatattaatatgccacctaaaacttcttttcttcagattttagaataaattaaacatttgtgagtgctcctaaaagttttatgggcccttggcatcgtacctactgtgcgtaatggataagtcatctgggaaagggagtgggtaccgtttgaaatagaaccttaaaaaggtaagtgggctagggtaatttttgaacaagagaggcagccacaattaacttggcttttctgggcctcagttgattgaggcctcaattgaatgatttccccaggccagtagaaatgagccctgtaatcccagcactttgggaggccaaggagggcggataacttgaggtcaggcattcaagaccagcctggccaacacggtgaaaacctgtctctactaaaaatacaaaaattagctgggcttggtggcacacacctgtagccccatctactcgggaggctgaggcaggagaatcgcttgaacccgggaggcggaagttgcagggagctgaaatcgcaccactgcactccaccctgggtgacagaatgagtctgtcggtctcacaagaacaaaacaaacaaaaaacaaaaaccaccaccaaaaacaaaacaaaacaaaaacaaaaactccctccgcaggcaggagatgtaaacacgccagctccccagccccacctgtgatacctactggcccacatccctattaggactccctggttctccccagttcctgcaataaaatacagagcaaaatagtgtgaaattgattaaactctactgttatcacttctgccatatgtgactggctcaaaactcaatggatctgactcagcaaaagacaaagtcaaaatttaaagttactgcctcggcattttgcaaatgtcctagaaaaaaattcaacgtcctagaaaaaggtgaaagctagcaagatactctcaacgctgtaggagttgagaaagggagatatgtaacctaaaatcaatgcatagggctgggcttcatttgcacccacaaattcccagcatacgcctgctatttttatttttatcctcattaggttttaagcttccctgctgctttcagagtcttaagcccaagtctaattttttaacggatgaagaatgctgtttaaaggtgctcaaataccttggttggatagtatgctcaatccttataccttggttgattcaattttgacaaatgcttccatttactagttggtgacccaactttaatcttactagtggcttgactagggtagctagtatgactttgaacgctatattgaatttaatgtggcaactgtaatgagcattttacgttatctcacaacaaaatggggtagatatggttctattttataagtgactggactaaggttaacctgtcggtcacacagcttgtcggcaacagacttgagtttggatcctagtctgtttatttccaaagcgctgttatttatcgggagcaaccctaggagaatgcctagacacacacccaaaaaagcagccaggcagcagaacgcggggtcacacttcgacccctcagagaacgatcgctcccaatcaatactacgtgctcaggagctacaactgaagaagcgtgatcacggccttggcatttagggcaggcaccagcgcatctatggaccgcgcacaaattccggggatgccgaatttgggggatgctaaggggagagagtgggtctctagcagcgattgggggctcaggagcagttagtgacaaatgagcacccgaaaagtgaaaaggtgacagcagtccgcaggtgcatctactggcgagccttctccatccccgaacccaaccctcccccgggagaaggtcgcgccaggagagaagccgcgcggcgcttagggcaaggtgcagagggcggcgcggcggtgcagcgagaaagacgcggagagagggcgctgctctgtggctctgcaaccttccgccagctcccacgctttccccgcgcgtccccggcgcctcctcgctcctcttgcttccccgcgacccctgcgttcccgtgcgcgcgcgcccgcttgcctgtttcctgtcgccgtcgttgcccgggccatggcgacctgcatttggctgcggagctgtggggcccggcgcctcgggtcgacgtttccaggctgccgcctccgcccccgcgccggcggcctggtccctgcctccgggcctgcgcccggcccggcccagctccgctgctacgctgggcgcctggcgggcctctctgcggcgc

SEQ ID NO: 35501 - DNA, 2300 bp, Homo sapien
tatttttccagatattcttcttcctttcatttatgcttttctagccttccaagtagtctattattgtgatacttctacttctgtgccctagttctcttgtctcttcattccatctcttcattcctgattcattcctgatgccttctgcgagtccctcccctcatctgccagcatattaatgcattcttcagatatactcattctggcttccatcccacccaccaagatctttatctcaacaattgtttttcccatccctgatatctccagtgggttcttccccataactgattcttcctgcttcattattctcccctactttgctgtggctatttttcctttttaaaaaaaacatttttattctcttccaccatttctgtctcccgtggtataggttgtgctgctttatctttcttagtctcagagctcctcagacatcttgtaattttccctgtgagctcatctttaaccccttgcaccgtcggcagccttggcttgtaatatctcccatgggttgtggtaaaaagcttaggccttggtttgtgctcctcatacatttggagggcaaagggttgagcctcactgaggatggctctagtgttaaaatccagtctcagtgccactcctccaccccaagtatcctttccgctggggtattttgcagttccctctattggaataggttggggagaagaggctgctggtgttgccattgcctacacttgtttcccatggctggtgtacctgctgggcacgagcactggctcactgccccaagccagccctgctgcttttctacctgtagcaatgtcgcattgatccagggacccaggtttgtaggcaggatcacctggaactcacaggcgtggtaggagacgtgcagccctgcccttgccctgcccactcctgcatgggtggtctcgagctcgctctcacgtgaggccatcattctcccccaggatccaaccaatttattggcctccagaaatgtcttgcatttttggtgctagtttccgattgaggttttgttgctgttgttgttggttttgactatgattctctttctctgtcctctggcatgtccagcattgggttcacagagacagctggcagctggtgctatctgtaccgtcttatccaggaccagaaatctttcttattatgtacttcactggccttgttacatcttgcttatgaagtttatttttattccactgttggggaaatggacccttgaagaactttcatcttctttgttttaataaaaactttttacataaaatgtgaactggacattttcacaggaaaccaacggaaggcattggttgagaatgcaggctttgcagttgactatgatgtagctctagactttgctacttcataactgtgtacccttggacaaattgacttttcggagctggctctacccagtccccctttgcaagccctgcagagagacagctggttccaactgctggtagatctctgaatttagaaattggggtgcttagaactttttgccccagttacaattctggaacaacagaaaaatatcactgacatcttattcctgaaataaaattttaaagctagaagagatggcctgggctttggtgcattccttcatttcagagaggaggagactccaagcatcgtgccattgttaagcagtggtggaggacacattagaacctggccccaaccccttctgaacgttttctttctgctacatcaggcttgcttctaaagtagttgttatgattgttatatattcccagtgggtaccaagaatagtaatcctttttttttaaagggattttgtttgatattctggatatgccacagttccctacatgttggtctgcttttttcttgttctcttaggagagatgaagccagtattgatttgagcatgctagccttaatcgctgagttatatcggggaatggtgctgctttcttctgcaatctgctcttggatctctttgcaaaactctgatttactccttgtgattatttgggaaacaaatcagaagaaaacaaaactggtttcctttcctctcccccttacattttttatgacctatcttaactttggcaggttcgatacagaggaggaggctatagcaatcgctaacgcagctgatgttgggttagcaggtaggtgtttgtccttgttcaataccagtcataatcatttttctccagctcatgccagatttacccttttaaacatcaccctgggttttgagacagaaacttcaatgaggtatgtgttttgttgctttccaagtggtggaa

SEQ ID NO: 35502 - DNA, 2300 bp, Homo sapien
tatactaaggatacatcattttatccttactacctcttgcagtgtctggcatatagtaggagctcaatggatgtccactgaatgctgaaaagaagtgaaaggtagtagcctcacatctgtgtcctaaagaaggagactaacattttcatacaataccaaaatagatatattcattaaaaatgaaaatagatattcattacagtgtctctgagttaaaaagatggtatagttaaacattctgggctaagcctgtgtgtgtgtgtatgtgctaaaaatatgtttctttaaaggctaatcagccaaggatcgttggggacaaaatcagattcattggcttgatgcattgaaagagtacctgtggaatgccatgtgagcacagaaaggaggaagtgtcttttgtaaagatttggcttcctattaaaggattccagggagagtcttggaatcagagctgggatccagttggttgctgtttctgaggcagattgagagaaagggggattaatgagggattgggtgctgtcaggaggtgaagggagtttagcaattgggtatccccagttatggatgggaatagtaaagcaaaggtagaaagtagtagtcattcaaaaatggaacacaaggagttgtgttgttttgtacctgctgcgtgacttcagaggaaacaacattgcctgttaattttgcttctgactttgtcctctcagcctgatcattgatcattggcagtactaacttttccaagtccaagctgattttcactctttgagtcctggacaggtttttactctttagtttttatttatttatttatttatttatttatttatttatttatttatttatttattttgagacggagtcttgctctgtcgcccaggctggagtgcagtggcacgatctcggctcactgcaacctccgcctcctggattcaagcgattctcctgcctcagcctctcaagtagctggaactacaggcgcgggccaccactcccggttaattttttgtatttttagtagagacgggggtttcaccgtgttagccagaatggtctcgatctcctgacctcgtgatccgcccgcctcggcctgccaaagtgctaggattacaggcgtgagccaccgcacccagctggtttttactctttaaatgtgcattatcttatttgattcccagaatcatcctatatgaatgctattatcttcattttataattgaggaaacaggtttatctagattaggtaacttgtctgaggctcttcggtaaatacgagtagccaagaagcttattcatcaacagtgtgtgactcagccctaagcactgcacttatacctcctagtaatgagatgtgcgaggaatgccctggctaccttttctgctcatgatattatccctagatgctttcgcatctttattaaaacagtaaaaatgcaagagtcttccacccaagttttctgtggtttagattatcacgttcctcaagatgcaaatgtcaaactatactgggcatccagttaacctgcaaggcctggaggtgatgggagcccctcctagcacaggttcccagtctcagtcagaaagcacctgctcaaaatagaaagataattacagagtaggggccaaagagactcccactggaagaatggaacttgtgtagctggggtgacacaagctggggacaagctgggggacacattcgcgaagggtgtttgacccaggcagtgcacccacggctcccttgagccaccctggcccgggtgtttatttggaaggagtgttcatcccccagactgtttagggccacggtgacagggaagggcttggtgaaggaaagcaggtagggtatgaaggccgctcaggttcacgaaagacttttgcttggtcccctgcggggtgggagtgtgtcgccccggtgcgggtacttagagcgcaaccggggagctgagcaggggagctgagcaggggagctgggcaggggcggctgccgcgccccacatccctgagggcgtgtgtgcgcgtgcgcgcgcgtcgccgtggtaaccgcggcggcggaaaggcgctgaatcactggcgcgcgctttccccgagcctgcagaagctgccgcgggcggtgggcggggatcccccgggggtgcaaccttgctccacctgtgctgccctcggcgggcctggctggccccgcgcagagcggcggcggcgctcgctgtcactgccggaggtgagagcgcagcagtagcttcagcctgtcttgggcttggtccagattcgctcctctggggctacgtcccggggaagag

SEQ ID NO: 35503 - DNA, 2300 bp, Homo sapien
gcctattacaggaaatccacttattttgttactatttattggttacaatatagtctgttgcaaccaacagacattaactcaggttggtttgaccaaaacaggagaatttataaggaaacaaacatgtcacagagcctggtacagaaatacagccatgtttaaggaagggcagttaagggctttctctcaatcctacacttcaacttccctctgcttcattgtctctctgcagacctctgttctcagcttctctgtacacaaaaaaagatatgtatgaatcctcacaggtgctaagttaacatgttacagttccagctccataggaagactcagacttgactctcttggtcctaattctgaaaccaaggagaggatctgactggccagtttgagctaggcaaacacctcctagtccaacttgctctggttagtaaaacgggagccagagacaaatcactgtgggtgagtaaacaattccccaacaagaggcaagacagagaaaggaacctaaagaaaatatcttatcacatctgtaagccagtgtagctgaaaagaccaaagggaaaataaagtctccactatgaacagtcaattttacaggttgtacatatagctgggagaattttatacattcagtaaatatttattgggagcttattatgtgtcaaatgttgtgtcagactttgggaaattaacaatgtacaaaacagatactccttactagatgtgcagtctagtaggagacataaaataatgaacagcaattataatacggactaaggtattgtaacaggggtcatgcaggatgctataagagtacctaaaaggggactcttacccagacttaggacatcaggaaaagcttcctagagataaatcatgtctcagcttggggctttaagacaaatattagcaaggaagggaaaagaaaaaaattccaggcacaggtaataaagatctttacgaagtttcaaagacaggagaaaatgacccgttggaaaaaagtaaaagtttgataggcctggaacctggaaaggcaggttctaagttatggagccaaatagtagagggccttgtaaggcagctacactttttaagtgcaggaactggagaggggcactgaaataacaggagtaggtgtgcattaaaaaaaaataacaacaacaacaaacctgttattctggccggtcagcctagggcctagaataaataaacaatacaggaagcaaggagacttccaagttgccatttttcgatagaaggtttagccttcgttcatttgtttcaaacctctcgcttacttatttcctttcatttgagttaaacattacatttccatcttttcctccctggaccccaaatcacgttcgaagcgacagtctggtgcagtgttagatccgctgctggggcgcaactccgcgcagcagcagcaacgcaagccctgctcctctggctacgcagcttggagatctgcctcagcatcgtccgcccagctccacggcaggtcccaggacgcgcagggctacctggtatcaaactgcctccgtgcggactggctcccgctcccctcatcacttactaggtcttgggctcagagatggtttcaggtcggcgttccaaggcgctctcctccaccggaggctcgaagtaggagttcagagccctctgaaaaacaaaggcacaagggatgaggtttgtgcgctccaccgacctaggtaatggagccggaagcgaggacagcgaaagcgtacttccatctcccagtcgttctcggccaggaagcactgagccactgcggcatcgcagcttgcgaccgaggcaaactccacacacagaagtcgccgctttttcacctcaggctcgccctcttcctccgccgcctccctcccgccctccaggcaactccccaactccatcttcctgccgcctctgcaccgcccctttaagcggaacaggaggccaacgcgcggctctgcgcaggcgcctgtgtcatggcgctcccgcatcaaccgcccggcggggaaatgcgctgctctcggaaaactggtgcagctgcgccgcaagggagccgccggggcggtgggtgcgaagcgcgcatgcgcgcttcgtcacaagggtgcgaggaaagtcagtgagcaaatcgcggaccaccggggctgccagctcgcctgactcccggcctcttgcgctcctaggggcggagaagggtgcgggctcttcgccctttgtgtcctccttctttcactaacttctggactttccagctcttccgaagttcgttcttgcgcaaagcccaaagg

SEQ ID NO: 35504 - DNA, 2300 bp, Homo sapien
ttcctagaactaaattgaaagtaaaaccctaacttcccacaccaagtaacaaaagaaccagaggcttctccctttccaaacccccaccttttctgtgtggcagatgggaaattgaaagtacctctgattggttgcaaaaagcaaaattacgctaagaagtaagttatcccttaaaaaaaattattctttctgcaaccaatcagatcttcccataggagtgtaactatgtaacttcaccatctgattgcacgccacgtcttcgtttgcatataagggcaactttgtaacttcactttagcctttcattggttgcttttcacagccaattgtgggtcaccacttcatttacatgagatgagtaccaagtggccaataggagacttcaatggggtattagggcccctgagctgctgctccacaccccaaacacaggagtgtcctttcattttcagtaaatccctgcttttggcggggcatggtggctcatgcctgtaatcccagcacttcgggaggccaaggcaggtggatcacctgaggtcagcagtttgagaccagcctgaccaacatgatgaaaccctgtctctaataaaaataaagaattagccaggcttggtggcgcatgcctgtaatcatcccagctacttggaaggctgaggcatgagaatcacttgaacccaggaggcggaggttgcagtgagccgagatcgtgtcactgcactcccgcatgggcaacagagcaagactccatctcaaaacaacaacaacaacaaacaccttcaaggtctggcgtggcggctcacaccagtaatcccagcactttgggaggcggaggcaggcgtttcacctgaggtcgggagttcgagagcagcctgaccaacatggagaaaccctgtctctactaaaagtacaatattagctgggcatggtggcgcatgcctgtaatcccagccactcgggaggctgagtgaggcaggagaattgtttgaaccagggaggtggaggttgcagtgagccgagatcgcgccattgcactccagcctaggcaacaagggcgaaacctcatcctaaaaaaacaaaaacaaacaaacaccttcgggctttgtgagtgctggtctcagaaaagcactcagtcttcctccaagggctaacttacttcttcaggagttgggtgcctttgagaaatttcccaaaccactacagaggaacaacttctcccttcgttcaccactctaccaagcacttggcttttgtaccttattgcaattatttatcttctaatcttctagagcctagagaattagactgtaatgtgccttaaatgcagaggtttctcttactcttctctggagcaatgcagacgtttgttggttgaaggatcaaactccaaagtccctcccagccttggaactgtctccacgagtcataaccatacttatctatgtttagatagagaacttacgcgttcgacccagcatatttaggggctccattaaagtaataatcattattactaaggtgaatttacaggcgtactagaacacaacctaacaagagataattattcaaagctcacaacggcaccaagcacggtgctttcttttccttcattagaagccacggcttctcccctacctttcccatacctttcccaaaactctctcaaaattgcgagccttggtcatggcctttatcacctcccgcagagactgagtcatgctggtcatcgtggacggttttccagcctttgggctttgcgcaagaacgaacttcggaagagctggaaagtccagaagttagtgaaagaaggaggacacaaagggcgaagagcccgcacccttctccgcccctaggagcgcaagaggccgggagtcaggcgagctggcagccccggtggtccgcgatttgctcactgactttcctcgcacccttgtgacgaagcgcgcatgcgcgcttcgcacccaccgccccggcggctcccttgcggcgcagctgcaccagttttccgagagcagcgcatttccccgccgggcggttgatgcgggagcgccatgacacaggcgcctgcgcagagccgcgcgttggcctcctgttccgcttaaaggggcggtgcagaggcggcaggaagatggagttggggagttgcctggagggcgggagggaggcggcggaggaagagggcgagcctgaggtgaaaaagcggcgacttctgtgtgtggagtttgcctcggtcgcaagctgcgatgccgcagtggctcagtgcttcctggccgagaacgactgggagatggaagtacgctttc

SEQ ID NO: 35505 - DNA, 2300 bp, Homo sapien
ggcgtgcttttatgacgacatcggggcggggcgaagagccaactcaggagactgggacttcctgaagaaggggggcggaaggagtggcggggagcccccccctttccacgccccttggatactccatactggaggagagaggagtctcaactctcaaactccccttttgaggggcgattactgaaatggagaggttaaattcaaaggctccacttttaaaagacctgtccctattccgtactcttgatctgttttcctctttttcggtaaccttgaaaactttcccacctccaatcctttctccccctttgattctgcgcaaatggtggggtcccgcagggcgcgcagtcgcagtcacaccggggcggtgccggtgagaggcgggtgacgcagcggccgtcgctgccattttaagttgtttgttctcgcttcttttctcaaacgcgactctgccccggacccgcgaggcgcccgaggccttcgccgcttctgcagccaccggcgggggggggaacgaggcagtactgccgcggacgctcaccaaccgcttcggcttttcccccctccgggtctcctcgacctttcctgagagccggaatccgactgtagggggaagaaagactcaagagcagatgcttgaactgaaataactttattttggggggttactttgctgacccttagcgcagggcttcctttcccttccccctccgccgccagtaccaatccaactccccatctttctctttgtttttcctctttttctttttctctccctgttgccgctgtctccgcgtccttcccctccgttgccgcccagggcgccgagccagactatgggtcccaggtgggggctgagcggcggcagcagcgcgggcggtccagtcacggtgcgcactgcagcggggatggaggggctcagttggctggtggttttctcttgacatggctcctgcccgtgctaccagcagcgcccccgccgccgccgcctcttccgccgccgccaccgctccgcccgcaggctgcggctagagggcccaaaccccgccctagagtcggtccgtgagtcccgggctccgcggggacagggaggggatttccccgtcacccaccccgccctagctgcctcaattccaccccctgcccctcgggaaacaactaacgaccccaccctaaacaatccaaactctggaaacatggtctgttcaacgtgagagagagctaatccgggaacttaattttttggggggagggtgggtgggcttactttagaagtaatattaacacaattattttctttttttcccccactgaaccttcccatttaccctctcccgcccactccacccgggcgggaattgtttccacgatgaaatgagtgaaaacctgagtgatcctgtgtctcccgtggtgcgagtgagtcgctgccgctgaaggcaaggggtgggggtgggacctgcgggggtggaaggcaggtggtctccgggcaccgcctgggatttgggagaagaacccgccacctttgcctcggcaatgctcacaagaagataaatcgcactccccaccattttgaacgggggcagatccacagggaagtctcccttggggaatgtaggactagttgcaggctgggggtgttgggaacccgggcattaatcaggtctaaccacagagccggaataattaataccgtattatataccccttttccttctgccgtcatgattctccttggcagcagcgttagcagccgcctgagggtgaaaatgtgggtgatggggaagttggtaatgactccgctgttttttctcatggctcctttgggccacagctgcccgcccccggtatacactgtagttgattgcagggaaaccctgtacctctccctttccttctctaccgattttgcacttttctctatgctcaccaccaagtgtaatcaataacaagcactgacaatacatagcaatagtgaaatctgaaataactaagaattaggtactacagccatggagctggctgggtaaaatctaattggatatttcagtttcattcacctaccctgttttggtgtttggttttggttttggttttggtgagttttttttttttttttttttggaaagcaaggatcacacttccccctccctgttccttaatcccttttctaaaaaggggggaaaatccggatggattttagggattggtctggtgtcagctgtgttttattgcacacctaaatcctgattataggcttttcatttctccgcaaagcctttattttggcagttaagccaaat

SEQ ID NO: 35506 - DNA, 2300 bp, Homo sapien
ttgttttgttttgttttgtttttgagatagagtctcactctgtcacctgggctagattgtggtagtgtgatcttggcttactgcaacctccaccacctgggttcaagctattctcctgcctctgcctcctgagtagctgggattacagacgcatgccaccatgcctggataatttttgtatttttagtagagacagggtttcaccatgttggccaggttggtcttgaactcctgacctcagggtgatccgccagcctcagcctcccaaagtgctgggattacaggcatgagccatggtgcctagtggttgctgaaatttttatggctaaacattttccagtatttctacctccttatcccatcatttaatcctttttaaattaatattttaaaaattttattattggccaggtgcagtggttcacgcctgtaatcccagcactttgggaggccaaggtgggcagatcacacgatcaggagttcaagaccagcctggccaacatagtgaaaccctgtctctactaaaactacaaaaaattagctgggtgtggtggcgggcacctgtaatcccagctacttgggaggctgaggcaggagaatcgcttgaacccggggggggcagaggttgcagtaagccgaggttgcaccattgcactccagccctggtgacagtgcaagactccgtctcaaaaaaaaaaattattattgaaaatcccaaacagatataaaagtagagggagtgaataaaaaatcttcatgtactcatccatactagcctcagcagttatcaacacaaggccaatactgttttattcgcaccagtggttctcaactggggatgattttgccctgcggaaggttatctgacaaggtctgcagacatttttggtcttcacaattgggatgtactcctggtagctagagggtagaggccagggatactgctaaacagcatacaatgcccaggacagcccccaccacgaacaatttgcccagtctaaaatgtcaatagagcccatactgagaaagcttgatttataccttttcccttgcttctctcaataattatttcaaataaaatatatggtataaaatttcatctgtaattaccatttataggtagaagctattacaataaaacccacaatattgtcattacaactaatctctttttttaacccattgctcatcaggtaaccttaaacaactcatatcttaccatcccaaaatattcagtcagtgttcaaatttcccttgggtatttttttaaatacagtgtttagttcagacgagatccatacattgcatttggtaatatgtcccttatttgtactcgataacgccttccttctgctttttatttttaaaatattttaaaattaatttttttttgagacagggtctccctttgtctgtagtcccagctactcgggaggctgaggcaggagaatcgcttgaacccgggaggcggagcttgcagtgagccgagatcgcgccactgcactccagcctgggtgacagagcgagactccgtttcaattaaaaaaaaaaaaaagaaggaaaaggctagacgtaattattaccaaggtgtttctgctccttcaaattgcaacagcagttgtaatttcagtgcctagaacagtagtaattggcacgtataaggcgctcaatgaatagctgcaggattaactgataatcggttgtctcctgaacaattcctaccgcaccacaccatagtcaaaacacaaaaagccaaaatataaaagcccctaatacaactacgagtccgtggagccagggctttacacaaatatatgtcgtgtactacatattaatatatatgcacatacaatattttgttcttctggtgctaacgactaatggaggcaaatctttctccctttcgtaaagggctaaaactttgcattttaaggaagttccaagagcagggtcggaggggagggtcaaagggcacaggcctcccagcccgcagaaaacccccacggtcctcaagtactcgctaccgttgaccgcgcaggcgcaggaaggggcggggccgagggaagaggcgattcgcgggatccagaggccccgcccctcgtctgcgtcagttggtcacgtggttgttcggagcgggcgagcggagttagcagggctttactgcagagcgcgccgggcactccagcgaccgtggggatcagcgtaggtgagctgtggccttttgcgaggtgctgcagccatagctacgtgcgttcgctacgaggattgagcgtctccacccagtaagtgggcaagaggcg

SEQ ID NO: 35507 - DNA, 2300 bp, Homo sapien
ggggcgcaaggcgcacagcctctagacgactcgctttccctccggccaacctctgaagccgcgtcctactttgacagctgcagggccgcggcctgggtaagggcgaaggggttgttgaacggtcgcgggagccggggcggggttgggaggtgagtcgagggactgccccattggctgggtcggttttggcgcgctctcacttccgcgcttcctattggctggctggcgcagttcccgaggcgcgcgccgcggttggtaggctcggacgcgcggggccacactgcccgccccctagcctggcgctgggcctccgggacaagttggctgggtccgggcttggggactgcaacgcgggtaagggactcagcctgggcttgccagctgtggggatgaggcgaagcatccatcctcttggcagttaagtggctggtcctgatctgagggatctgcaaatttggctcatggaaagaggtggctgaattctgcgtctcccattaaacggatactggcgttgttgatacgggtttcgcatggaccctgtcctgtgccagggtttttaatctagctattaaaggaactggagaataacaagtaagggttgcaaggtcgctgacaggcgtgggaaacttgtgaaggattagaatgctaagtggctttcagcttttttcacactaaggtacgttttacgtcgcaacctaggacacagctatctaaccaaatgagacgtgatggaagcaatgtttctcgtctcttcaattccattctgttcagttgcatttttctaagcagtgttgctcatgactcactaatttcgagatcacggcccgcgacccgcagtttgaagaacattgcgtagggtctgtttactggggcccgaacaccattttcttaacatgaaatagagtagaaaatagcaggatgcccgcacaaattagattgttttgttttctaagctttttttttttttgagacggagtctcgctctgttgcccaggctggagtgcagtggcaggatctcggctcactgccacctccacctgtcgggttcaagcgatactcctgcctcagcctcccgagtagctgggactacagacgagcaccaccacgtccggctaatttttgtatttttggtagagatggagtttcaccatattggccaggctggtttcgaacttctgacctcaggtgatccgcttgcctcgaccttccagcactttggtgatcatgcaggtgatccgcctgcctcgacctcccaaagtgctgggattacagatgtgagccaccacgcccggcctttcctaagcttttttgtttgcacatgtgtgtgcacgcgccaggacacaaggtaaaatgtattaatgttagaagccactgcactgagtaaaggcatggccacaaaaattagggacatctatcgacgaggcacaggcgcagacacggcaggggccaatgggtagtgggcagtgggcagtgggcagtggagcagcagttcagatgctgagtttggcccagtggtctagtcaaccgcattacatagatccctttctaccttttccctctttcttgcttgttagtccttcagttcatgttactggttaaacatttcctacaaatgtaaatgcatgatctcatttgaccagatattaagtctgtgttaagttattgtcagagcccagtttattataccttaaatctgtctttgaatcaggaaagttaagatgctgctctttaggatggacctgggcataccctagtatctgtttattttgctttttctggtgactatttaatccaggacaatatgtttagaaattttaaaccagttttagaaattggtttaaaatacattaatttcattttttcagctataattattatgtgtgtatatatgtaaaatatagatatcaagagtcattaactttagtcaccttagtcattgacagggctgagtttggattaagagagaaaaaataatagttctactgtacaatagtataatttttatgattgtaagtattttaaacctagactccaccttcgggggtgcaaaccatattgttttttaattactagtcttctgtgcttcaccatctacataatgaatcccagtatgaagcagaaacaagaagaaatcaaagagaatataaaggtatgtgattgaataactttaatttttttttgtagaaagcatggggctaaaagtattttgacataatttatccaaatttagcctggctataatttctgtaagccttgagttagtcagaggatgagtaacaatagagaacatttttaaaaaa

SEQ ID NO: 35508 - DNA, 2300 bp, Homo sapien
agctcacgcctgtaatcccaacactttgggaggccgaggtgggcggatcacaaggtcaggaattcaagaccagcctggccaatatggtaaaatcctgtctccactaaaaaaaaaaaaaaaaaaaattagctgggcgtggtggtgggcacctgtaatcgaggtaggagaatctcttgaacccgggagatggaggttacagtgagccgagatcacaccactgcactccagcctgggccacagagcgagattctgtctcaaaaaaaaaaaagataatgtacttttatgcagagattttttaaacagagcattcatttgccatgtatcaaactcagcaaatctcaaactgacattaccaccctcctcactggaatgtactgcctcctcctgtcttccttatttctgactgaatacctttttttcaatcaacttccctactgaaatctaagccatcatttccattccagttcaaacatttttgtgaaacttaccctggcactccgtaagatgtctcttctccaagtgactgacttaccttgtagatttcttatgggacctaatacatttcttctcttcagttccttctaaacagtcttagcatttctactacatctaagggctccttaaaagccagaatcataactctctcccaattttatttaataaattgatcccttatattctcctagagtcatggactctaggagaatatttcaaatcttggaatgacacatgagacaaggggcaggagcttgcaggcctttatgatgggacataaagaaagggattaacaccttaaaagaaaaagttaatgatctgggatcaaaaacagctctgagaaattttgccttcctcgttacttggtttaaaaaattacctttaggtggccaataaaagcccacggtcattatgttactcaataaattgatcccttatgttctcctagagtcatagtagatctaggagaacataagggatcaatttattgaataaacgactcttttaattaatatgaatttcaatggctttttttttcttgctctgaaggtagtgcaaaatgtgtaggttatatgctatagtttatctcagagagtaagaatgaggtatacctcttaaactacgaacaaaccaaaatgccttcatgaggtccctccttctctttcaggccttgctctattactgtgaagcactaacaaagacaaacctccagctccagaaagcagcttgcctggctctgaaaatccttgaggtaaagcccagccttggagctcccctggcagctcagcttggagccaggctaagctgagtgtatataacagcttttctttcatgtttgaaagtacttttttagcagtatttcttgtcttctttgcaccgtatgttagttttagtatttttctcccttaaacagtaattacatgtgactttgttttgttaaagtcaataagtggcagaaagcaatcatgttttgcactagcccaagggaaccagtttgcctttaggtcagtattagaaaagtacatcttattagccggcacagtggctcatgcctgtaatcccagcattttgggaggccgaggccggtggatcacctgaggtcaggagtttgagatcaacctggccaacatggtgaaacctcatctctacaaaaatacaaaaactagctgggcatgatggcaggtgcctgtaatcccagctactcaggaggctgaggagggagaattgcttgaacccaggaagttgcagtgagccaagattgtgccattgtactccagcctgggtggcagagccagactctgtctcaaaaaaaaagagagagagagagaaaaggaaagtatatcttattttaaaagggagatgagatgtatggtgatttcactcatttttattgtgaacaacaaaaagcaaggacaaataagatttgaaaagaagtactaaattcagtatgccactgaattcccagatccttccccgcaagctctctttattaagcagagaaccagttttgattgtcataaggaggtgtcgtgagcagggagagagctagaatgtaaacaagtactaaacggaacaataataccaccgaggaggagccaagatggccgaataggaacagctccggtctacagctcccagcgtgagcgacgcagaagacgggtgatttctgcatttccatctgaggtaccgggttcatctcactagggagtgccagacagtgggcgcaggccagtgtgtgtgcgcaccgtgtgcgagccgaagcagggcgaggcattgcctcacctgggaagcgcaaggggtcaggg

SEQ ID NO: 35509 - DNA, 2300 bp, Homo sapien
gcaagatgcaaacaccaggactcttcatccctaaattcttctaagaatggaaagacattctgtcacataggcattactaagccctcaacaccagtgagtttataacactggctcttcagctaacgtcacctggaattagtctatgttcatattttgccaggtgtcccaatattgtactaggtaagcaggtttttttttttttttcctgatccaagggccaatccaggatcatggctgatcataagtaccatgactgaagaaaaataacatccagatctttctttgtaaaaatgtgctccaaaaagtaaaaatagcctttgttattttccctcttcaaaaggaaacttatataaccatttcatctaacatctcctccaaaaccctctatactcatacctcttagcagggggtgagggtgtatcttcccttaaacattaaagcagtctgaccaaggagatattgcacaccttcccccaagagtatgttggatttcaaagtccttgccagctccatctctctatccagagtaaggatgtctttatttcttgcttctgactgctaagggggttttagctgatacttcctcatctcactaaaggagctgggttgtgtggctgctctattgaagtagaactaacaagagagagaactgcttggcatgagtgagcagaagggcacagtgcaatgaccttttactacagaaaacctgtaccctccctgtctcaggcaggcagaacttactgtgctttaaaagtctcgggccaggcacagtggcttatgtctgtaatcctagcactttgggaggctgaggcgggcagatgacctgaggtcaggagtttgagaccagcctagccaacatggtgaaaccccgtcttactaaaaatacagaaattagccgggcatggtggcacatgcctgtagtcccagctacttgggaggctgaggcaggggaatcgcttgaaccctggaggcggaggttgcagcgagccaagatcacaccattgcactccagcctgagtgacagagcgagactccaactcaaaaaaaaaaaaaaagtctcctccccactcatccccagctccattcacacccaagagtaagggggtggagggagagtaagggagaagcggagggcagcagtggctttaggtctttctccttttgatcttggtgttctggtggagaagagggggtggcaagacatgaaggcccttggatgtctcctctccagattttcatgaagtatggccggcagcggtggaaactgaaaggcaaaatagaagtaaatggcaagcagagctgggatggagaagaaacagtttttctgcccctgatagttgggttcatctccatcaaggtacagtattgtcattgcctgttgtctttcctggtgccacggctggatgatccattggtggggcccttacccgtgacccctgcctgttgcccctccatcccacagacttttctgcacaagtctattacaaagacagctgccctctcatcagagtaagtaaagtcaatctaagatacacttttgaaatatccacctctggccaggcgtagtgtagtggctcacgcctgtaatcccagcactttgggaggctgaggtgggtggatcacttgagcccaggaggtcgagaccagcctggccaacatggcaaaacgccgtctctacaaaagtacaaaaattagccagacgtggtccgtgtgcctgtagtcccagctacttgggagtctgaggtgggaggatcacttgagcccaggaggtcaaggctgcaattagccatgatcacactactgcactatagcctgggtgacagagagagaccctgtctccaaaaaaaaaaaaaaaagaaaaagaaaaatgaaaatccgcttctgatttcagatatgattctgaaagaaatgaccaacctagctcagtaaaaaaaatgacacattattctacctttctcctctgctgtgatgtaaggcctattctctcccactctctctgctaggtcacggagctcaaagggctagcaactcacatcctggtaggtagcgtgacctgtgagaccaaagagctgtttgcagcccgacctcaggtagtggctgtcgacatcaatgaccttggtaccatcaaactgaacctggaaatcacctggtagtaagtgcctcttcctttatttcatcatatagaaatatctgataccggctagtgctactcaaagctggtgcatggaccatccgcatcaccagggagcttgttatgaaaagcagaatctcgggccccaccccaggactactgtgtcaga

SEQ ID NO: 35510 - DNA, 2300 bp, Homo sapien
ttctaagactacaaaagcaaaacaaaacaaaactgctcactctagtcacattcctagtggccatcagttccatatgtaaatttagtgaaaagtttctcggttcttttttttgagacagagtcccccactctcgccaggctggagtacagtggcgcgatctcctctcacggcagccgccacctcccaggttcaagcgattctgctgcctcagcctctgtaatcccagtagctgggattacaggcgccagccaccatgcctggctaatttttgtattttcagtagagatggggtttcaccatgttggccaggctggtctcaaactcctgatctcaggtgatccacctgcctcggcctcccaaagtgctgggattacaggcatgagccactgcacccaaccatacatttaatgaaaagtttctgagcattattccccctcccaaagtatttgacaatcttaggatcctggacagacatttgttctgattttgagaaccttgtttacctgttacagaaaatgaggaagaaggaaaattattttacaatctggtacatatgttttactctccagcgtttaattcatttaatgaaagagttggagttaattaattgtagcagattattttaacagaagtcttaaatttgcaatgaacttggtatcttttctttttttttctgcctatcactagtgcaactgattgttcaatcaaaactcctaagtcagtggctctcaaacattggtgaacatcagaatcacctggggactttacaaccctccccatacccaggtgatatcccatattaattaaacagtgcctggggataggagccaggcatcagtagtttaaactaccgtgatccaatggataaggggggaaaattggcttgaaaaatataatttctaagaggtatgagataatgatatagttaaatatttcgaatactctaagttttttcctttgatcaaagagtgtctgtgatacaatagatataatgaataataatttacaaaataagatagaatactaaaatttgccaaattgagacattaaggtgggtgcttggttgtcaaattgagtacagaaagaacagaaatattaagaaagcatgatagtttattacaagtttgcatggcatacagtgataccacaggcatgctttatgaacctaagaaagatccccttaaagaaatgtagacagatttctcagtaaccagcagagagcacagaggagaacctcattaaggattaaaggaattgttaaatatagtgaaccccaagtttctcttcaaagaatcagtatgtcagtacgttcaggtctcctattctttgattctccattttaaagtttaactttctggttctcttcgtctccttgctcctagtttcagtaaacagcattcccaccagtcctaatcagtagttcacatttgttcccctggtcacctgcttcatcctgactcatcccagtcacctgttggacctgagtcacccctggtcacctgctctgacctaagtcacctttagttacctgttcctaaccgtccttcctgccaaactacccaccccaccactgtggctcatacccctactctctttaaaatagccaatcagaattagcttagactgtgcggtccaaccctagccaataggggaacgacacagcagtagggccatgcttcaggaataagaactcctgcccctcccctgtccaagtgtggtctcaccattactccattcataagttgcacccttatatagaagtaaaaattgccttgctgagaaaattaaatttatgtttgagtgctatttccttgtggcatcaaaaatttatttataacagaattaggagttttttgagccttgaggctggggagaagtaaccagagagaaccttatctgcacttgcattttgtctaaccatttgtgccctacatattacttttactgctcatacgtacttcttcattacttctaaaattctggagaatgccctaaaatgtaagctgctcctccccagctagtatgggatttgcatctcacccagatgaaagagcaagccgattgccatacctgtagccaagtgagtcagcacctgtacctcgcaagaatgcatacaaactccagggctgctctctcctggagagggagggaggggatttaaaaacctgcagcaacatgggggaggaggctgtttgtccttctctctctggggaagtaactcgctcaaactgccttccttgctgagctgcttcgcgtagctttgaggaaggtctagtgaaattggtctttccattacatct

SEQ ID NO: 35511 - DNA, 2300 bp, Homo sapien
tgctgtagtaaaaagagcacttgatttggaatcacatctgactttcaacactagcttcatctttgtgatcatcaggaagttacttgttcatcttctcagagtatcagtagtcttatcttttaagtggaggcagctatgggaaagagatgacaggcttcagtgggataatatctataaagtacctaacatcatctgcctcatctctcttttcatcctcttcctcctccctctcataaaaggttatatgtcacttacaacagtgccattcctgagtcaggaaggtgatgggagtgggaaggtggggaaatacagttggcttctctccagggtggatgtcaggcccttctccctccagattcgtcctatgagaccattagtactgtgctaatccgtagtagcgctttactcagttctccccaaacttctactgcatatttgtacttctttccaggtctctttctccagactccagtaaatagagaaatgtttggaaccatccatctctacacaaatagtcatgatacaaggtggaaggtgtaggcatctggagagtaaactaaggtgctataaaagctctgaaatgaaagggcaaaaaaaaaagggggggggcaagggatcttggaaaaatggatgcagattaaggtatttaaactggatcctaatgaatagatgtggccatttggaaatgagcaaaagctatgtggttgcagataagttgcagggtggggttggcaagggaaataaaaggatcaatgtaagagtgaaggggtgcttcagaatgactgggtgatccatctttcattcaatatgtagctatggagtgcctgctctgtgctggggacagcttatatcagacagagatggtccctgccctatgaactcacagtctagtaaaggcatgctcttgggcgttctttctggggatcaagccgattttgccctttctgttgtattcctaggtgagttatgacacagtttatcaggcgatggttctggctgcttgtattccagcccgaggatgcagtgcccagaccacgactggatgtgggtgtttcccatgttgacatgtctcctaggatgttccctttcggctaatgtctcagctcactgattattactgatcctttcacaaggtgactgaatctcaagtggtgtgggagggagtggatgtgtcttgtggtactattctagttaacatattctaaatacacaatttattcattatgatcacttaacagatgaggagactgaggcatagcagggaatccctatgtaaggatggagactgagtcaggaccttttccctgggtccttgtcgactcccagttccatacagtttccactccaaaaggcccttttttgggaatgtctgtctatcaggcagacccatgctttccccacaggaaacctttatcattcaaatccaccagaacaaaataaaaaacaattctctttctgccatctttatgagagctgtgtccaaagcagccccggtagagagagtgccctacaaagcagccctcttcagcggggctttccagcacaacccttgccgtgggcagccaacctcaccctcacaccgcccccaccccatacaccaccgcctcatttttttcaatgcacagcccagcttgtatgaaagatcccaaaaggttagctgaaagggcctttccttgcctcggctcctttcctctgccctctccctccagcgcgctggatccaccgggctcgctccccggcgcgattccacgggtcactccaaagctgccgcgccagctcttgcaaaggagcctggcgtgccggcgatcagctggaagcaggcaccgaagcgcagcctcctggagttgggctgaagtagctgtcaagcagctgtctccacccgccctcccctcccagcacaagtgacgccgccggcccccgcgccgcgcctccccctcctcacggctcccgcccctccgcccgctccgccgctctagctccgcgctccgccaccctcgcgcccgccagccccgcaacttcaccccgcgcgccgcagctgctgcgagcggacgcggcagggcagccggcgctggggacagctcgcgtccacccgacttcctcccggggtccccttcacccaagtgagccagctcaggctgtctgcaaagccggaggtgcgggcagctccgggcattgcattggtgcggaggcttttatatgccagagaaccctgagtgtgcccctgacatgacaaggagccgtcgtcgttaggtaggttcaccttttcatttctccttttttgcttctgattttgcgtacaa

SEQ ID NO: 35512 - DNA, 2300 bp, Homo sapien
taaatttgtggtaatttgttatagcagcagtaggaaactaatacacagaacttgtgatataaagtatcccagaccccctcatattgcagataaggaaacagaggcccagggaatttgccaactttcatgaagtcacatggctagttaataatagctgctgacaacattgagaaattcctctatgctaaacacaagtcttagtccttagcatgtatttactcatgaagtcatcagcataaccctaaggcagcggccctcattcttatcctcacattttatagattaagagactgaggcataaggatgttaatgtcatgaagatactaaatagggtgctacgagtttgcacccaggcatttctgctctggaatgcactctctttaccaccagacatagtgacagaaggggagcctgagctcttgggtgccagtccagtatcctaccaacttctaaagagttacttgatctcatttcctcttgacaactctgaaatctgtaggtcattcccattctaagtgaagaaaacaagacaccgagaccaagagatgtgcctaaagcactcacctggtcagttgcaattacaagccttttgactcccatctcttggtagtttcccccagtccctctgcttctggcaccatgagagacacaaaagataaatgacagagtttctgccatcagcaagtttatgggttatcttgggctaaatttggtaacttgggtgtcacttttttcagttccatcctcagggcaagactactcctgaggccttgatcaataactgtttgttctctggagcaatctgacattgcacagaggaaaagcttggaacaaagtaagcaatcaatgtactgagcttcccctgccaggggcagctttagaatgtctatgtaagagagtcttcagccacatatttggaagaggctgtagcacctaagtgtggtattatagccaacataatgtatttagttagagtgtatttttacttggggaattttgaggaggagctgatggagatttagggggctgactaaaactgccccaaaccaccccttgatgtaccacttccccatgtaaacccctgtatgttgcagctcagaaagaggaatatacagttctcgccaccaagaagcttactcagtatttgaatgtgggcaatttttttttcttttctcttttttcttcatacagtctttctctgttgcccaggctggagagcaaaagtgcaatcatagctcactgcaaccttgaactcttccctcaggcaatcctcctgcctcagcctctggagtagctgggactataggcacacaccaccaagaccaactaattttaaaattttttgtagagatagggtcctgctgtgttgccctggcctcaagtgatcctcccacctcagcctcccaaagcgctgagattacaggtgtgagctacttcatccagcctggatgcgtgctttaaaagaaatcagagaacaaacaaaacgcctaacaaatttgggcagtgcagacatgggccacctgcaggtgagagcaataggtgcgtggaggacagccccatgtctatggcttcaggaaagcctcatgtaaaatgaggctttgaagtatgaactagtaggtgaggggcaagtgtgatcgtaggtggagaaaaagaatgggtgagaaaattcaaatagacatatttgaagacagtgcactgggcagattaactggtgaaaaagaaagtatgaaatcacttatgttggttatcaccgaatcattctttcagtcaacaaatatttattgctcacctaccaagtgccaggcactatattagataccggagacccagcagtaaataaatcatacgccctaaaaggtaaggggtgttgctctgattcagctctagcagcaaagctctgctcttcatttctgcctacagagagggattcccatttcagcccattcctgcgtgcagtcagacacacctgccctccccctgccattgcacggctcctctgacgcgagggcagacacaggagcccggtgatcgtctctgcttgaataaattaccgccccatcatcttcatgcataaaacatggcacaggaggctagggcagcccagcacagcagctgccttcgggccagtcggaagttaagggaaggaaaggcaaggcaagttacaagataaaagaagtcaacggaagcctcaaatactcttttttttttttttaagaaaagaacaaaaaggggggggttaagttttctttttcatttttatacgtctggacttaacttccaggatagctgcaagacccttt

SEQ ID NO: 35513 - DNA, 2300 bp, Homo sapien
gagacatgggcttttgtcctgtactatgtcccagtcctctctcttactgagagctactgcttgaagcatgcaaagaaatgaggatctccgtgatcttcatttctttcctctacagcatgactttttctcgtctgtgcctactgttagaactacccctccttcaagcagcatcactgtggaaaatggaacttacctacctggttgatgtccacaccatgagcatttgatatgttctaacaacaaagatgaatcccctcagaatctcccgtcactttcacagtcatccttgaacagaaacttttctctggactctggtgagagtccagtttttcaattcctcacttctctgtcaatatgttggtataaggaacaaactgtctgtcatactagatgacactatttttttctcttttcaacctttccatctgtcttatcctagttaccccacactgaaaaagcttgctgggagaagaccagatattcccatttatgttggaaacacagaaaggcctgtattttggaatctgaatcagagcggtgtccagttgactaatatcaatgtcgtgccatttggaatatggcagcaggtcagaaatctgctttctttccatgctttccagttatgctttctgtgatgaatgttaggtgagatagtcaccgtaagattaaggaaaaaatgggtcaatgtggtatgtccctgatactgcataaacacaacctctatttgtgattcaaatgttaggcagactgtcctgggcaaagatgattttctttctattaacccatactattatagtacaactctacagaacaggtaataaatctagttctgaataaggaaatttcttcaaatgtgaggttcaattgaccagtctttccagaacaggtgattaccttctcaaatactgaattaaaaaccaaactgaaattcacagttgttggttttgttgttaaattccaggtggacaaaaatcttcgattcatgatcttgatggacggtgttcatcctgagatggacacttgcattattgtggagtacaaaggtatgtttttatccccattgataacgaaaaatggaaaacattcttaataggaaggatggtaatatctatatgaaatttcatcacatgttcatcttttagctccattttgaaagaatatagcgtgttatatccttgttctagaaatatggagctatctttcaaataatttttccagaaaacaaattagaaataatgtcatctagatagtgacaggagcaaagatttctttcataaggcaatagatattttacattccacctatagtgatttcttcaaaactacatttattaaataaatgtcttttattactttcacctagaaatatcatgtaatataatcatgcactgcttttcatatgaaaagatggccttactgccccaacaatcatttgaatatgagctttgcatgtaatttgcaaaaggtacagggaagtatgttaatccacttttttctgatcctttgggctcaacacctggaaaaagttgacagaagaaagcagtctatctatgagctagagtggaattaagataaaagtcttcatgagacacctagtatccaccaagtcaaatgggatgaatttagtcgcttgaaaattcagaaaatatactattgaaagctttaagttttaaaatcttactgtttgtttttcctttgatataatcaattcttctataatcaaataagttcaattatacagactgtatacagaagtccttgtcttggaattcaaactatgggtgttcaagatttcaccttgaatatctatacctctttgtttctccacaggtcataaaatactcaatatagtagactgcaccagacccaatgggggaaggctgcctatgaaggttgctctaatgatgagtgattttgctggaggagcatcaggctttccaatgactttcagtggtggaaaatttacgggtaatattttgtatgaaagtgataccaagtatcacgcatggcacattgctaaatgctgtaagagtaaatacaaatgtaattgagacatgatccctccccacaagaagcatgcaatcttattgggaaaccagatttgtaagttgcagattaccaactaaggtttctagctcaaaacatgatggagcatgaaggaaatgttgagatctgagagcacctcaggaggagccaagaaagagaatcatctggattcaccatgtagaccgtagagcagaacaggaaaggcctgaagtgggtcatccaggcttaggtgctcttggaatatggttcctaatg

SEQ ID NO: 35514 - DNA, 2300 bp, Homo sapien
cctgagggtctcccataatacaattgtatttttctaacgagtttgctagtatataggtttgtttgtcctacaatgaacttttaaagttctatatattcctttaagtataaaataatgaccataataatactattatttattaaatgcctgctttgttccaagcatggtgctagacactttagtatctattatttcatctaacctccacgacaactctatgaagttatgtatcataattttatagatcagaaaactgaggctcaggatactgctaataagcagcagaaataggattcccacccacatgttcccaaagccagcattttttctagttcatgactctaattttcaacaatcatataaccttgaaataataatatgtaccttcattataccacttgcattttcaggaacatcgttcaataatgcattctttatgtattcctgattttattaagaaagccatttgtgtttcaccattaaataaggtgatagttatgactaagaaaaatatttttattacattttcttaagcaatgtttaaaaggtattaaaaattaagtgaacacccatgtacccagcacccagcttaagacataaaatattaacaacagaatatatatctttccttgattatatcacatatcctcccacccatgctctggaggtaatcacttttttgaatggggcttcaggatagctattctctattccctcagctttattgaggtataattaattagcagaattgtatacaaatgctcctcaacttacacatggtgtgaagtcctgataaactcatcataagttgaaagtactgtaagtcaaaatgtagttaatacacctagcctaccaagcatcgtagcttagcctaacatgctgtatgcatactcagaacatgtacattagcctgcagttgggcacaatcacctggcaacatggtccactgtagagtatctggtgtttacccttgtgattgcacatggctgactgggagctgcacccgctaccgctgcccagcatcttactgtgtatcactagcccagaaaagataaaaattcagagtatggtttctactgaatgtgtgtcatttttgcagatcagatgcccctccctgtgcattcccatagcgcctcgaagtcatctctatcaatcattcatttagtcgtaaggaagtcttgtttgtatatgtgtatccctgacatgactgagacctcataagttctctaagtgccatatgaataaagaaatgaattggtgttcatcttaagtcatagtctctgcagatattgcttgatctaagggagtggcaccctttgttttgattttcctttgatctttggaagaccatgcattcctatttcagtgatgcttttaaaaagccatttttgtcattaatccagatttgttctcatttgattctagttgttgaaatggatgaaaacaacggacttttgcttttagaactgaatcctcctaacccttgggacttacagcccagatctcctgaagagttggcttttggagaagtacaggtaaggaaatattaaaaggataatattattaaaaacaaaaacgtgaccaagatgtccatttaacatctatatctgtaaacatcctatattaccttgaatactgtttgagatgggtatttaggacatatggtaaaaagtcatatgataaaacaaattctttaaggaacccccagaacttggcagggattacaaggaaaaaaacaatacaaaactttgggaaaaatccctaaggaaactcatgcaaaactatttgatgccagatcactactggatagaatggctggttgtattttctggctttagaagagaatttccttcagaggaaacactttaatagtttgggagaggtacacaatcaaaaatttatttttctgtgtatttaggaagtttatgtatatttgggcagctaattttaaggaaacaaatgagaacctgcccggaatagacataataaaaactaatctatgccttgacctttcctcacccactttgttgccttttcacatgacgttcccgctatctcatctctgcttctcaatacattccttttccatggaggtgccaggctgtggcaagagaatgaggaattggatttggaatccccatggtgccagtctctaagtcactgtttgtgtccattcttagaggaccttggcatccagaaggagtaattatttaacaggtaatttagaagagaaagtcttgcaagcctgttcagccagttgtcagttgagtctgcgtggctatgccaacccaccaaactca

SEQ ID NO: 35515 - DNA, 2300 bp, Homo sapien
gctgtaattttgttgagccaaaaagggaaggagactgtgtttcagccgccactttgttagattcacttttagaattcctgccactgttcccgtgttgctgttcaatgtttgctaaatatttctcatagtccttaaagataggtgtcagatcacagagggggtttgtattcacgtgcttcactatccaatcccgcacggagcagttcaaggcggccaactgcttgtgataggcatttccgacacaagctttactggaagcaaggccagaggaggagggctgctgagtgtccccattagttttgggatttgaaactttatcaaccaaggcggtagggccatttgcagcaagagaaccaaaggctaccttgggctctgccgctgcctttgcactggtgaagggaggggcactggttatgttgtttccattcgacagtccttccaaaggcttccctccagcgccactaccaaatccaggaaagcgtcctcctccagaaggtaccaccaaacctttaaaacctttaaaggctcctccagtgtcagattcgaatccaacatttctgcgctttgctttctttatggctctattcttcaagacttcctcactggccatggagaatgttcccacctcttaagcttcatcttcttgatcccaattcctatctgtcagttccttctcggcatttcttttggccgtgttttcgaacctcctcggcggccgccgctgcactcgctgggtcttgggtgcggcgaaacccagggcgcagcggcgcaggggtctggagcccgcaggggtcgccgggctgagcgcgctcggccgcttccggtgctgcgctgcggaactcagaggacttggtgttcggcaagcccagagactcaaacaccatgtccatggagggggggtcctcacgctgtgttcagcagggaggcgagagcgccggttcagccagagaccgctgggggaaccgcgccgaacacgctccgggcggccattttgtaactcgaatctacccccaaaaccaattcgaaaaaaggcaattcattttagttttaatgttttatagcaaaacaagaatttgctacagttttatttttctgattttgatagaagcaaattcattgatatctttaaaaatactttggggaaaagctaatcatttaaacaatacacagaaaagcatgtatataggtgcacatatttttttcttttgccttctgctccaatgtgactttcacgtggaactgaggacaaaagtgtggttgagtgaacctgttctacatggttgtgatataagttgaaatctaacagagaactttggctatatgaattcattcaatggaacaacaaaaatctagagaggtttgccttttaaactcttagactaattattccaggaattgcctcagtgcttatgttagcttggtgtcagatatctgtactcgtaagaacaaagtcaaaagagaagtcatgaaatttagaatggcttcttcctgtcaaatacatttagaacatatttttggaataatttcaagtccattgggaacacaattactaggaatttgggacagaggtgacaatgagaatctgctttgagaaagtagatcataatattacagagctatgccttcatcagtttaaaattggaagtggtttctctgttattttctaccctggagtgttcttaaaattatttttatctcctttaagaaatttgcagcgcttctaaaaatgaaactgaaagtgccacaaatatgcttgtgctccaaatcagttttaagttaacatgcaaagagaattttggctactttttgtttggagtcaaatataaaactaaacaacatgtgcccagatttcctaccatggatttgcaaaagctattttgaaacctttcttggcagaaatcatattctgttatgattcagtgttgcactgtaaacagagtgtttagaaattggggtttgagaagtgtaacggctagtttccttaaaagaaaaaaaagattcaaatgcttggtttgcggctggagctttttgtaaattaatcaaattgagtgcagtgggaggggtgattcattaagtagagagctagtgaagacatatcctgtgaaaggcagtgggctaagtggtagggggagaaggaagatacagagtgctttcaaaagtgcctaaatgtaagtcaacagggcagtgtgccaattacagtgttataatgttctacagaagagggatgtacaccaagaatgccagcctggacctctggtgtgtcttggaagacttaaccaggaaggggacgattcgtttct

SEQ ID NO: 35516 - DNA, 2300 bp, Homo sapien
cacgtgtttacctgtgtaacaaacctgcacatcctgaacatgtacccctgaacttaaaagttggaaatcaaaaaagagaaagggcctctgttctctgcctttcttatcttccagacagaactccctttacctgaattctaaagtcctctttgtttctatctgatatttaagtcaaaaagatgttgccacacctgttctctccttcagagaattcaggttcctgctattataatccctttttattccttgatgcactaaatttctttttctgaaaattcttccttgttttctttactaaatctatcttgcagaaagatatctttgccctgattgttcagcttatttctggcagctaatttttcccatatgtctaatgtttcttgtataagagaaaatagatggcttttatttctaatcagaggtctatttttctcaatgttggcaaatcctgtgggttccctaagcaattgtgcatctcagggttcagttccttctggtggtttcctgctttcttttcctatgtgaggcttacgtagaatttatttaacatgcaataaaatatgcacataacatgaaatatgtttacaatatggataaatcccacaatcataatggtaggagaaagaggccagatacaaaacagcatatgattccatttatacaaaatttaagagtaggcataaccagtctgtggtgatacagattagaggagtggctatcatttgagtggatgttgactgggaaggagttagctggagtcctagaaattttctatatcttgatgtgggaggtagttacatgaatgtatacctgcgtaaaaaagtcatagagctatacattcaagattagtgcacattactatatgtaagtcatacctcactttaaaaaatgtcatgtgatgtcatctagaactagggaaggaataatttgagagaccttcttgatttggagaggaaaaggatattttgagggcaggtgttacttagaagaattgctctacatagcagtcttttcttcctttatcctactatcagacatttctccaactagaataagatgtggttacaactgtcctcttgctgtttcgtgagaattgcttagttgtttcctacacagaattttaaacgttgtggtaaatacaagttcaaagtcacattgccagtgcttcggaaacttataatctagttggagagacaagactaacataaaagagaatttagtgttgcttttttttttttttaagtgcaaattttgaggcacagaattctccagggattcaggagaaagagcactcagtgggaaaaggaggaattgattttaatgaagcggggaggacttaaggtgagtttttgaaaatacctgggcaggcacaatgccagctagttcttcactgtattgtgtttgtttaaagaaacatagaacacctgcttgctagagctgaaacagtgactgggcaagacaggatatttatcaaactggggaaaataaaccaagtggcatacagatgtctgaagagatttagacttggattctgaattcccactagtctgagccctcagggttgagaggacagtacagtcaggggagggtagggatcgggaaggaacagaggccaggcctaaactgtatgccccggtgggaaatactatacagaggtcttttcttttacaacaaagcaattcttattatattacaaagaaaaccaaaatctgtgtttatgacaggatgacttacagaaggatacaaaaaattagggagtgatatattaagttctccttaatattttctcctctgacactacattcatgtatctgcaaaaacatacatgtgctttcagacacacatgtatgaacacatacacacacacacacacacacacacacacacacacacacacacccttcatactcctgtgctggtggggaattcggagtttatctaaagtacacacttcatactcctgtgctggtggggaattcagagtttatctgaagtgctctttgctaggctctgtgggtggagctgggagggtaatggtaaggttggcagatatatgaagacaactgaaattcatatcagcaggctgagtgttcatgtcaccagaagtctgactcgcctgctgtgctcttgcctgctgtgctctcgtaattactttcggaaaggttttctggctacaataaaatctgattaaatttgttaccaagcaaattgaattgttcaggctgcaacctttctagaagttttaaacgttatttaaaagaagatttcaacctcactccatttcagctttctctggggag

SEQ ID NO: 35517 - DNA, 2300 bp, Homo sapien
agtagagatggggtttcactgtgttgatcaggctggtcttgaattcctgacctcgtgatccgcccgcctcggtcttccaaagtgctcggattacaggcatgagccaccgcaccgggcggccttttttctttctttctttctttctttctttctttctttctttctttctttctttctttctttctttctctctctctctctctctctctctctctctctctttctttctttctttcttctttcctttcttttttttttttttttctcgcccaggctggagtgcagtggcccgatctcagctcactgcaagctccacctcctgcgttcatgccattctcctgcctcagcctcccaagtagctgggactacaggccctgtttgtatttttagtagacacgaaagtagccaggatggtctggatctcgggacctcatgatccgcccgcctcggcctcccaaagtgttgggattacaggcgtgagccacggcgcccggccgggtttttttctttttttttttaattttaatcttttaaaaacctttaaactgacaaataataattgtacatattcatgggggtatatagtattgttttgaaacataatgtatggtgattagatcagggtaattagcatatccatcatctgaaacaatggtcatttcttgggttgggaacattctgtatcctcctcctcctctagctattcgaaactatgtattacctacagtggtatagaacaatagaacttattcctcctatctacctgtaattttgtcctttaacaaatctctccctatcctgcccccgacccacccttcccatgaccctccccagcctctggtatcctctgtcctactttttacttctatgagctcaacattttttttttttttagcttccacatatgtgtgagaacatgtggtgtttaactttctgttcctggcttatttcacttaacataacgtcctccagttccagccgtgctcacattggccttttttttatgctctagaaagttatattgttttctgccacagacttcataatgctgtgttcttttctactcttcttttttacttcccaccttgttctcctgcacttcagatgcacagaattgtgttaaccataaactttgggtgtttatatgccatcatccttgatccattcacaataccattcaataatataataaacatccaacccaacaatcagaataagtaacctatatttatctacatgtgcctttcttgtctcatcccattgcatctccctcaaataatattttgatcctaaatgttagatttattgtttgcttgctttttgttgtttttgcttgcctaaccacacacaacaccacacacacacacacacacacacacacacacacacacatctctattggttacatggtttaattttttttgttgttgtttgtttgtttgttttgagacggtgtctcgctctgtcacccaagctggagtgcagtggcgctatcttggctcactgcaagctccgcctcccgggttcacgccattctcctgcctcagcctcccaagtagctgagactacaggcacctgccaccacgcctggctaattttttgtatttttagtagagatggggtttcactgtgttagccaggatggtcttgatctcctgacattgtgatctgcccgccctggcctcccaaagtgctgggattacaggcgcgagccaccgcgcctggcctttttttttttttttttttaaatagtccagaggtcttttattttatttctttaacacctattatgcatgaattcatagggaatagattccagcagctcaagctctttcccgttggttctcacacagtgtgcttctctgggtggagcaggctggtgcttcagttgaacccaggtacttttctctttggcttccttctttttctgatcattttccttcacgcatttcaggaagctacctcggctcttagagtgtttaatgtgctcaatatgcacattaattctcttggcaagaatcttgcccttaacttgtttgtttaaaacaatgccaaaagcatgctgggtaaaattgtagactcttccagttttgccatggtaacacctgtggggcattcctttttgaacagtaccccttcccttgatgtctgcaatatcacctttcttatagattagcatatatgtggccaaaggaacaactccatgtttttgtaaaggcctagagaacatatatccagtgcctttcctttttgcctttgtattcatcattttggcaaattactggaagatgacggttctg

SEQ ID NO: 35518 - DNA, 2300 bp, Homo sapien
agttttatcttactaacagctttcagattatcagtactagttgtatggcttaaacacagccacatgtaaatacttacttagatgaagctatggctaatcacatatgtaacacaatcagtttcatgtagtggtttgatcactcgtgtattcaagactatataaacagggatgaatttgaggaagttggagtgatggagtgagaaaagtttgtttttgcagcagtagcagtagaaggggcaggccgattcagtaaacaagcacacatttcagaatgcaaactgcattctccaagctggcaccatggttttacggtgctagggatgtttactgcttgttgggtttgcagctttataaacagtgctccttggagttctctgcttgctattctgaaacatatttgagttttgcaaccgagaagtaaatgactttgatttccaaaatcagtcagtcatttttcagtgttgtgataggagattcatttgaattcacttcttcagagatgcaggagccaatcaggatcctgttgcagtgaaaatgattcttttattgaaaccccagcttcctttaaaagaagccaaagagtactgaattacagaactgccatacagccttccctttattctttccatcacccaggccacaggaaaaaaaaaaaaaagacaaacttttgttcttattttcacaagttatcacatggtttggaaacttcagggcatttctgaaacttcattggtatgtgccagaaaagtcctctttaacacaccaggttgaatgaaagacagtttgagatgttaatttccatttactgcagaaaaaatatatttaatgcattaaggaaatgtctagcttaaagaaattgcccacttttgaaacaaatggttggaggcctgaggtccaaagctctaaaatcagttaacaaatgtttattgaacacctattttgaactaggctgttgaagaagttcaaaagtctaagataaattcccactttcaactcacctacagtctagttgggcagaaaaaatccaaactcaggggacaatgcaagagttagatagtaaaaccagacaaatacacaagcaatgaaacacgacaccatatggttgggtttagaaaagtgtttcaggcaatacatattgtagaggcttagggatcacagtaatctgaaaatccctggaaaatattcacaaagaaggtagaccattgggatgggtttgaaaacatagataagaatcagataaccttaagaggaaggaggaagcaaacagtgagtctggttgtaatagagaagggagtgggagaggttaaggagggtgggaaggggccaggttggcaaatccttagtggtaaggcctggctgtggggctgaagatgattctaaggggtccaaggtcaacagcagtgtttaaaattagattgccaagtgcatggattccctttcctttcctccttttctgtcctttaaaagcagaacctgattagacagtctgggacattcccagccctaggctaaaaagcagcgattgaggcacaaagtattcttggccctgaagttgaacctctggggatggagctcagggaagtcatagggagtttgggcccaggtaggatcagacctatccgcaggcttacataggctccagtgattaaagctcagcttcctgaatatgccccgaggataaaagagacttttccgagtgaaaggcattttccaaggcgctctcaacgggaatgtctgagatagcgaactgcggctgcagagcaccagctgaacgcacacacacaagtgtcttctcacggtatgattagtgttcacaggtttcgtctagctcatcagaaatgaagaatagcgatgatgaagtgacatgtcaccgggagggttgaaaaagaaaaagtgcgtaagagggtcccaaaaagaaccagcttccgtgtagacgggtctgcagaatctgccgtctcccgtcttctgggtcccctggcccgcccggagtggggacaaggaaatggaaagcccggctcacccggctctcctccctcgcagccagcagatggctcccgggctctctcgcgagcccgctcgccccctctccagacgcagggcttttgcggtttgggagggaggctgcgaggaggggcgcggtgcccgccgccgccaccgcagcaccgcacagcgtctctcctgggggtgcgacctacgccggggacccagcgctcgggcaccggaggccggcctcgcaccggtgcggaggccggctctcgcgaggtgaggaggaaacgcaggaggaagaggagaaggagaag

SEQ ID NO: 35519 - DNA, 2300 bp, Homo sapien
ataaacagtgctccttggagttctctgcttgctattctgaaacatatttgagttttgcaaccgagaagtaaatgactttgatttccaaaatcagtcagtcatttttcagtgttgtgataggagattcatttgaattcacttcttcagagatgcaggagccaatcaggatcctgttgcagtgaaaatgattcttttattgaaaccccagcttcctttaaaagaagccaaagagtactgaattacagaactgccatacagccttccctttattctttccatcacccaggccacaggaaaaaaaaaaaaaagacaaacttttgttcttattttcacaagttatcacatggtttggaaacttcagggcatttctgaaacttcattggtatgtgccagaaaagtcctctttaacacaccaggttgaatgaaagacagtttgagatgttaatttccatttactgcagaaaaaatatatttaatgcattaaggaaatgtctagcttaaagaaattgcccacttttgaaacaaatggttggaggcctgaggtccaaagctctaaaatcagttaacaaatgtttattgaacacctattttgaactaggctgttgaagaagttcaaaagtctaagataaattcccactttcaactcacctacagtctagttgggcagaaaaaatccaaactcaggggacaatgcaagagttagatagtaaaaccagacaaatacacaagcaatgaaacacgacaccatatggttgggtttagaaaagtgtttcaggcaatacatattgtagaggcttagggatcacagtaatctgaaaatccctggaaaatattcacaaagaaggtagaccattgggatgggtttgaaaacatagataagaatcagataaccttaagaggaaggaggaagcaaacagtgagtctggttgtaatagagaagggagtgggagaggttaaggagggtgggaaggggccaggttggcaaatccttagtggtaaggcctggctgtggggctgaagatgattctaaggggtccaaggtcaacagcagtgtttaaaattagattgccaagtgcatggattccctttcctttcctccttttctgtcctttaaaagcagaacctgattagacagtctgggacattcccagccctaggctaaaaagcagcgattgaggcacaaagtattcttggccctgaagttgaacctctggggatggagctcagggaagtcatagggagtttgggcccaggtaggatcagacctatccgcaggcttacataggctccagtgattaaagctcagcttcctgaatatgccccgaggataaaagagacttttccgagtgaaaggcattttccaaggcgctctcaacgggaatgtctgagatagcgaactgcggctgcagagcaccagctgaacgcacacacacaagtgtcttctcacggtatgattagtgttcacaggtttcgtctagctcatcagaaatgaagaatagcgatgatgaagtgacatgtcaccgggagggttgaaaaagaaaaagtgcgtaagagggtcccaaaaagaaccagcttccgtgtagacgggtctgcagaatctgccgtctcccgtcttctgggtcccctggcccgcccggagtggggacaaggaaatggaaagcccggctcacccggctctcctccctcgcagccagcagatggctcccgggctctctcgcgagcccgctcgccccctctccagacgcagggcttttgcggtttgggagggaggctgcgaggaggggcgcggtgcccgccgccgccaccgcagcaccgcacagcgtctctcctgggggtgcgacctacgccggggacccagcgctcgggcaccggaggccggcctcgcaccggtgcggaggccggctctcgcgaggtgaggaggaaacgcaggaggaagaggagaaggagaaggaggagaaggaggagggccggagctgcccccgcccagccggagcccggcaggagcgcgaggaaaacctactccccccgccccgcgccgctctccccgccctctcccacgccttccgctttcacctagggctgtaggtgcggcgcggaggctgggcgggagctacgccggcccaagccccgccggggaccagcgagccgggaggaggagcaggcgccacagccgccccgcgccccgcgcccgcttgtaatccggtccgctccttattcagccgccgggaactgcgaggaggcgtcatgtagcagcagcagcaaatccgcctcgcatttgcaactcttttttttttttttgg

SEQ ID NO: 35520 - DNA, 2300 bp, Homo sapien
tctgatgatcggaggggagatctgggctgtgcataaagttgggagtcatctgggatggactgaagtcatgagagagaatgaatggtagcagggaatggggattggacatgtgactaggaataaccacagaggccagttgaaaatgtatggaaacgagaacatcaagcatgaagggccatgcccagtgctaaggagaaatctggttaggaagtgcatggatttagcagccgtgaggttggatttagcaatcaagattggcacctcaagcaggagaaatttaagtggagttgtggggacagaagccaattttgaacactagatgagtgaattggaggcaggaatatgaagacactgagtatgggtaccttttttgagaagttgggctcaaagggtagagacagttagaggggacctgcaagaggtgtgtaggatccaggcatatagctctaggtctaaacatctctatgtttggatatttagagatggaagagaaaggatatttagttgcttaaggttcctgcaaagacaggtgggatgtaacccagagcccacacgaagggacgggcatttatctccagcacttcagaaggagaggaagaggagggggtgggtacagctgcagatgcaggcaggtgtggaggtttggagtggaatggtaagtgataccattctgataatttctgttttctctgtgaagtaggagggaaagtcatcttcccagatgaagggaacggaatcaggttgctgggtaagatcagttctccagctgtgcttggcagctaccactgcaagcatggaataggcggctaggtaagttcagccaagattgaagttttactctgtgggagtaataaaaggacaaggaacacgaaggctaaggacattaacacatggaggaatgatttcagtggaggttcagttggatgaagataggttagtgctgatggagaatgacctggcagtgtcagggggcaataaacagggtagtggtagtacctgaataagggaactagctatgagtgcttctccaactgtaatgctaatgtgaatcacctggggattttagtaaaaacgcagattctgattcagcaggtctgggctgaggcctcagattctgcatttctaacaagttcctgtcacgccagcctctctggcccgtggatcacactgtgagggccaggtgtggtggtgcatgactataatccaaacactttgtgaggcccaggtgggaggatcacttgagctgaggagtttgagaccagcctgggcaacatagacgtcatctctacaaaaagtttaaaaattacctgggtgtggtggcttgtgcctgtagtagctacttgaaaagctgaggcaggaggatcacctgagcctgggaggtcaaggctgcagtgagccgagattgcaccactgcactccagcccgggtgacagtaaaagcctgtctcttaaaataaaaaaaaaaaaaaaaaaaaaagatttcgggcagagagtgggatgcctgaattagaaatcgtttgacatggtataatctcaagcagtaactaacatggcccaggatatgacagagtgaacaagaaggccgaagaattcaaaggcttcctgatcatcatatctttagggatgcaatgatttacactgactatcgccaacacttttctaagcaccttgtgtgtattaccttctttaatccttatgacaacctccagtgaggtatatattgtgatcccatattttacagatgaggaaagtaaggcacacagaggtctttctcaaaatcattcgtgcttgtaagtggtgggaccagaattcaaactggggtggtacagtttcaaagcctagtgctctgcatgattggatgctgtattgtcccctgatgagagaagttggggctgtatagaaagtgtgaggtgggaggatcatttgatcccaggagttaagaccggcctgggcaatgtagtgagaccctgtctctacataaaatagaaaaaaaaaaaaaaagattttgagccaggtattagcctcacctatgaatgaagttcagcatatctaggagagtgctaggcacagtacttgtaggctttttacatgttacccctttaatccccacaactgtccaacagagtctatttcatactgattctacaggtaagaaaaataaaatttaggaggttaggtagttgataaatggaggagttggtaatttgatctaaattggtctggattcaaagcccattcttcctttatatcaaagtttatcccatcaccatatagaaatggaaattctcttctaattcttaa

SEQ ID NO: 35521 - DNA, 2300 bp, Homo sapien
tgacacacccacctggaaatcctgcatcctgcagcaagccagctgcccacctctccatatacattttggctgctgagggctgcaggaggaaatcccacagctatttagccctgaaccaccaagaatccatgatcttcactctcagctggactcttaacagtcctggaaagttcttttttatttttcaagctatgttttctatttctcaattttgtagaaaattgagagcaaatacctacacaggcagatatttgttcacagtgcccatctaatcatcacgtactcatctgtttacagtctgccatggctcctcattgccctgagaataaaatcaaaatccttttatttgacctgtgaggcgcaccatggcctgggattttgccttgctccccagattcttctgttactcctttctttatcacacatcatttgccaactattttgaactagattgaatttctggtaagcatgggctttctcatctttgggggtgtgctgttcctttatctgaaacactttcctggcccctagctcacacctcctctcaccatgcttcacctgattgtctctttttgccctcctgtgggtcttagcagagatatattttataccaaagagcatttccaactccctacgtcccacctcttctcctcaccagggaataagctaagtgccccttctttgccctcgctttcgccctgaactttccttgtgttagttctcttccactagtgcctggttattcgtctgtttctcacagtagactgctagctttgcgagggcaggggcagcatctgtgtttaatcatggttgtatgcctggtacctggttttgggtcttggcactctgtagatctttcataaaaattttttgagtgaattaatgaattcataaactattcattaaatgattactctgtgataactaatgacagtatcagttaacatatattgacattaccacacaccagggattcttctttttttttttttttttggagagtctccctctgtcacctaggttggagtgcagtggtgcaatctaactgcagcctctacctcccatgctcaagcaatcctcagcctcctgagtggctgggactataggcacatactaccacacctggctaatttttgtatagatggtgtttcgtcacattgcccaggctggccttgaattcctgggctcaagtaatcgcctgccttggcctcccaaagtgctggaattacaggctcagccctgggggggttattctaataacttgataggtactattatcattttttctcacaataaccctatgggataacatctcagaaactgacaaattcagaaatgtgtcagttcctgaaaaaggaaactttgggatggttggctgtacttttaaccactactctgtcttgtctctgcatgtgtgggcatgaactttgttaggttctgaggaggaggatggggggttgggaggagctgcatatgttctctgccccagaagaatcatggcccaggggaagaggtagcaaaaggaacaactattccagtatgacttgatcagtttcttgatggacatgtgtgcaaggcactatagaaggacagaagagatttttactttaattaattgaaaattagtaatttatatttggtatatacgtaatctaataattcattaagtggagcaacttttcaaactattctaacaaaatctaacattataaaactataacatggagactgcattgctaaatacctttcatctacaaaggaaagttatagggatttattatgttttctagatttctagctctctagtgctcaaaaaaattgaaaattgaaaaattgaagaaaaactgaaattgaagtgaccctcatctttgttgaagaaaaaggaatgtgacaaaatttatttctatgtgcagtcaaaaagtgtggtttgtgaaatgtgttgttgttgttgatcttacaggagaatcatgaaaaaagtctccatggagccatctgagcgcctggctagtctccaggcgctgtgggacagccagaccgtggctgagcagggcccctgtggtgagcatgcattttaaaactgaaatgtgaatagctggatggatatccccctgccaggaagttaagtctattcctagtgtgctactgtaaaggtgcaattagtttcaaggtgtaattagcagcgcacagactttagattggtggacaaaagtcctatatttaagctgtattgcatcctgctatgtacttactatagaacagggaggagaatctttgctgttttcccccctaaaaaggaaaag

SEQ ID NO: 35522 - DNA, 2300 bp, Homo sapien
taggcatacaatatctgaaacttttccattggagatacttttcttggggccacgtgtcactctttttctcacagttctatttaaaatgcaaatcctcttggaaaggataattgttaaccccttttctttttaacctgtcttaatgagttgatcgctcttctagatgagcggatgtatgatatttaattattgccaagaagaatggagtaatattaactattctgataatggcagatggattcctatacttaattggcttatagctaacaacctcatacagagcttcggagcatgttttaacttcttaaaagtagattttgtaactttggataactcaccaggaatttatggtatttaaaatcagatatcttctaaatttaataaccagagtgggagattgggaacaccagctcacccatccaaggactgcaatgagcatagactgttttctgggaggaaataagtaatacacaaacgtatgcccttcatacaggtccttcaactgacctcctgctatggatgagccatcatttccccaggggcatgttcttgagaaggctccttaaacaatgttaattcctgttcccttagactaattatcaagcttcaggcagcaataagaaattactgtgctggttgctgcccttatataaccccaaattatctacaaatcttatcacaacttctaagaaacaacatggaggtcatgcagctagactaagcctctacatgggcttttcccctagaacagtgggtgttctgggagcctctatttccccactgtgtttccacagtcaaagaagtttgaaaatcactggattaaatcatgttaaacaggtttttatcggagtatttctagagacttgagtatgctaatccattttgtaaattacaaaaagagggcagccttgatatttagctgatacactcttgtaaaaaaaaaaaataagtgactaacaagttgatgtgggaaaggggggaagacagaataactgttaaaacttgattaatctaaaaggcaaaaaagagaggaaaaaaggggacaaataaaaaaatggaccagcactttgggaggccgaggagggcggatcacaaggtcaggagatcgagaccatcctggctaacacggtgaaaccccgtttctactaaaaatacaaaaaattagccgggcgtggtggcgggcgcgggtagttccaactactccggaggctgaggcaggagaatggcgtgaactcaggaggtggagattgcagtgagccgagatcgcgccagcctgggtaacacagcaagactccaactcaaaaaaaaaaaaaaaaaaaggaaacaaatagtaatacagattttcacccaatatttcaatgattacattaaatataaatttaaattaaatataaataatttaaatttattttatttaaaaatattattatataaatataaagactcaaattacaagtcaaagatgatttatttgaataaaaatatcaaatgttttcaagagatacacctagagatacatgtattcagaagtgaacgtaaaagcgaaaaaagatatgctacaaacactaactaaaagaaatctgatgtagctgcaataagacaatttaaattttaagaaacattactaaagataaatggaatatttcattaattaagaagatacaattactctaaatctatgctctgattaacatcatctgaaaatatataaagtaaatctgacagtaacaaaaggaaaatacacatattacataaacacacacgcatatataataatggaagttttctaacacacttctattagtagctaataaatgaacagaaaaagtcagtaaagatatagaaaatatcaagatcataatgaaaaaagatataactgatatatttaaaatgctgtacccagtaactacagaatacatttcttcaaagtccacactaaatattttccaaaaggaatcatatactgagccataaagaaagtctcaacaaataacagaatgttccttagtactgtgaattcatacacagaatatttgtatgttctctgttaccactactgcagttaaaataggaattataacaataagataattagaaaatccccaaataattataacttaagcaatatatttctaaataacaaaagagtcaaaaatcacagtgggaattttaaaaatattttgagttaaatctaaaaactatggtattaaaatctttgggatctaactagagccatgcctagagagaaatcaatagacctaaatacatattttaagaaagataaaaaactggaaaataat

SEQ ID NO: 35523 - DNA, 2300 bp, Homo sapien
cagagcggctcatgcgtgatgctaagaactctaaaacggtgagtttcacttcaggctgtgtgagagtctggtataataaaaacgtttcataaaatttagttttagaaaccagtttcaactttctctctctacccaattccaagtttactaacaagtggcaaagtgaactgaattagccttgacctcctttctgtacctgtgctgattaccaataatcaagatatagaataaaaagcagagggccagtgtgattcacagagggtgtgattgggccctcaacaactgagagggagctgtcgtttaaatgagtaacagctcatttaaaatgattctgcttctaagctgataacatgaaactcccctctgttacccctaaaaggaagcttctctcacgttagactttggttcccaatgtgtgacttagtagagtaaggacttaactgtgagtcagaaaaactgggatctggttttggttctgctgctagaatcacacaatcactgaatgtcattagtatgaggaatctgtagatcaatcagatactcttgtgatacaataagagatgtatatttggtctttgttcccagttcctgatatggagcttctaaaaccttgtaatttcctgagtgatagggatgatagaagcatcttttgttatagtatttggtctttgtccctggttcctgaaccagagcttctaaaacccctgtaatttcctgagtgacagagatgataatagcatcttttgttattaataaaaagcccctctcatcacaccagagtttatcctaatgaggtgactcttcctgtgcccctagaaagttgcaggataggggaggttgccagaggaaccagccacgttattagtgaactgaatctgtcagcccaccccctggacgccatggaaatggagaggggctggagattgaatggacaccagtggccactgatttaatcagtcgtgtctatgtaatgggtcctccataaaatctctaaacagtaggcttcagagaacttttgggttgatgaactcatcaacgtgctgggagggctgtatacctgcagaactcccccgaagctcccctgaccccttacttcaccctatacatcttctgtttggctcctcctgagctgtatcttttataataaaccagtaatcataagtaaaatgcttggctgagttctgtaagtcattttagcaaattatggaacctgaaaaaggatttatgggaaccccttgaatttaaggcttattggttagaagtaccagtaacaacctgggacctgtgagtgccatctgaactggggatagtctggtgggactgagtccttcacttttgggatctcaggcaaactctgggtagacagtgtcagaattgaattgaatagatttgtaggacacccatttagtgtatgcagagaactggagacttgcctggtgtggcaaacacctacacttttggtgacagaagtgttgtgagtaaaagcagctcaactttcataccccagatgaagacattaagacatgaaggggagctgggcatggtggtatgtgcctgtaatcccagcttctcgggagactgagacaggagaatcgcttgaacccgggaggcggaggttgcagtgagctgagatcgcgccattgcactccagcctgggcaacaagagcgaaactccatctcaaaaaaaaaaaaaaaaaaaaaaaaaaagacatgaggaggtaatgtattattcctgtggtttcaaagctgcttaatgacagaagtggtcaatgtgaaagtctcctaatacccagtctagtgtttcttagggttgctgtgactcattgaataaaaaggaatgcccatagtctggacctcagtttattaatctgtgcaaagagcctttgactgagaagagattatccctaacagtattccttcacccttctcattcactctgcaatgactttgattgaaatatttacccaattctaaagaggttattttttatttctcttacagttgttaccaaatttataccatgttggtggtgcatcttgggcgggagccagtggcttactatccagtccaattcaggagaccctggaatcaatggctggagaagttacaagagtagtagatgaacaactaaaggtttgtggggtttgttatttgggaaatgaaattgttaatatttaactacgcatgatagcatttcattccatagctatctatgttttatagacttgtatgtgtgcatgctgcaaagatgtagtaaaaattgaatactgtgtcttttccagcttcattataagttttgg

SEQ ID NO: 35524 - DNA, 2300 bp, Homo sapien
tgaatgaagacaatatttattagaacaaaagctgctttcatgacttaaaaactcatgcctacctatatattctttttttgatgaagagctcttgtgtttctctgtcactccctcaacacccagggccctgctcctcaccctaggactcaacacaggctcatctcaggaatggccctccctgcttacctccttggccctttaaaccagataaagtctaccctcctaacgtggcttgtcctgagagttgaattcaaagagatctacatctactcctgcctctttaggcatcatggcaacatgaatgtttttacaatggatgctgactcacaggggctgtgcctgctgcaggcctgtcccttaagttctgagggtggtcttccaactgcattttttaaaattattcctttcctccaccctcaactcactcacttaaaacaaacaaacaacctttttcttcctttcacaaaactaaaccaaattaaacaaacaaaaaaacttacttccaaacaaagtttacacagtttaaaaccaacgttacagtaggtgagccagtctttcataaccaacttttcctcattccaaaccacatcatctataaacctaataaaatacattttactagcttgttttttccttcacccttttccaatttacacatgaccaaataaatctggtaggaaacgtggtatgtggagttgatttcaaatttttaattcaaatctatttcttattatttgttttcttttagggctagtctaagagctttccagaacaattatcctataacatagtgtccaacttctaatgcctcaaaaggcaaacaaactcaaaatacttatgaaatataaatgttataataagatggacaaccaagtttttaaaaacttgacaatttcctccacccagattaaatatatgtgcaggtttatataattatatagaaaactgtttttcagccttatttagtgatattagaatgttgcttacaatcttggattatacattaggctttctttgctgttctccttgtataggacaggactttacatagagaaccctcaaatattttattcacagactttaaaacatgataacagtggtttataaataagtaaacttcttaacacactacattccctcctaggttagaaaagtaatatcggccatatcagatccttggtgttcaaagttaaaacaagtactatttcttaacaatggcttcatctaaaaattactaaaatcacaagctaatgtagaaacatttggacatataagtaaccaaaacctagtcttaccaccaccacctcagattataaggaattattaaaaagtaaacattttgtaagacataaacatattgaatacagaggatgatatagacacaaacaattgtttcatggtaaagtgagaagtagctatgctgattaatataaattttaaaataatgaaataggattcagataaaattttccttagagtgaaaaggtattaacaacctaaatactctagttatagggccagatggatatgctacatgaaatttagaaaatggataagaaattaagacctacagttaggtaaacattatagtgtgcattccatcttctaaagcacatcaaatcaggttaacgaaacagaatctcatctaaacaggaagcccaaatttaagggtttgtcaaaaagttgtgtaacaaaagaaaacaggtaagaccaagaaagagtcaccctatatatattttttatttgaaaaagtctttctccacatttttaatggcttatttataattttatttgaagatattttcctgtcacaaaaacctttaagagttacctaatctatttctcctaattaggaattttcccactatggctacagggccttagaagggggctgaagcttcagctttattcacttcattagcggcctctttaggacttttctgaaagaattgtctgagggtggggacagtgttttgtttggtctgatttcaaaaggtgagatttaaaaaaaaaaaaaaaaacaatggcacagtccagtgaaaagggtaacggtaccaccagaggatgtgtcttaccatacaggtatccagatcttccaaacgctctatctctgttagctcctccactgtgatgatggaacgtttaactggcttctcctcagccagctcgatctctaaggattcttgttgaggaagggtcttgccacgtctgctgaaatggtcagcctagaaggtcaagacgtgtacgaggagaaattaaagtacagagaaagtgctggttagcaggattcctgaagacgt

SEQ ID NO: 35525 - DNA, 2300 bp, Homo sapien
aattaaactccacttcccacctgatcttacaactatttaccaaagttctcccaccaacatcaacattatttagcaattctttaattgcagaaccctcctaattcactgagcaacccttagagttgggagagaccacagaactatatcctgctcactcaacaaaggaggcatggtgtggccctcactggtcagaattctggataatactacaaccatgtcattagtgagtcagatgcccaaggaaatgttaaaattttaatccatgttgtgaatttctttataacaatgaatgtgcggttttgattaatatgctgtttatgtttttcatgattaacagtttctttttggtgtaaagatgacatttactagagtgttttattcatgtactttggatttgatatataaatcgacttaaagtgacaaaacccttatggttttatatttgtttagggcttacacagtattaatgatctgttagcgccatctagtgtcactttaaaacaaccattgttaaaaattcttgctatttaaaattcagaccagtcatgggtcttctgtcaaaatcattaaataatgaagtttttcaaaaattagctttagaacattttttttctaaagtaccatgactgtattctttctaaaggtagcaacaatagcatcaatgatcaatatactgttgataaaatatatgatgtcttcaccctcctataagtaattctctttgcgttgctggcatttgagatatatacatataaatatgtttaaagaaaaagaactgtaagtatgaagatatgacacttttcatttattgacaaaagagagaaataagcagtgaatacttagagttcatatattttcctctggggcctccaagtcatctgtccacacacaaaggcaatgggcattgtattattttatccttattccccacagtcactttgggatttataaataactttaaaaatctgggagggaaaagagaacaactcccaggattgctttagagatgcaggcaaatggggtgccccgggtacagaatttaaggaggtcctcactttcaggtgcctgccatgcacttggaggaacctgaaagggaaggatgtgaaaggggacttcatggatggtccccagccctgtcctgcagacacttgtcctgggcacagagggctggcatgggacttcctttttaggggatcacttttccatagtgatgccgaatagtgtgcttgtgttagctgcagtgcttgtatacacatttcctcctggagatctgttcagcaccttgcattcatgacagtggagcttttgtcatcttcctgagaaattcctcagccttcctgccacttgggtgcttccttctgatagagccagcactcctggggagtgtgtgactggggtagattgatgaattcagggaatgaggcttatctcacctgcatttcaaataatacttcctgtatcatcaaacacagtttaaagttaggaattggctgcagagctttttaggtttgtcagaagcatgggatgagcaggaaccagcagtctgaaggtcagactgccttgggaatcatcatgcctgctggtctactggtccacagtgtttttgcttgttagacaggcagtagatgtagaccatctttgtcaatataattcttagatgttatgaagtaaacaccagactttgctttgtatatcttttttttgtatctaaatgcctcagtctagtgtagactttctaaactttctactcctaccccaagacagtggcattttactttccccatcatcaccatcactaattcctcccacctgcagatttttaaaaaatttattcggtcctgttcatctgtatttacctcctaaataatagatctgtgtcatgtggttctacctcaaagcaaggaagaccctgcctatttcaggacccctttcacctgtattatcattgaggttggaaaggtttctgctgctttgaaaattatatatatatttttaaatagataaggtctcgctctgtcacccaggctggagtgcattggcacgcttttatagttcagtgcagctttgaactcctggggttggtcaggtgatcctcctgcctcagcctcctgagtagctgggacttcagatgcatgccatcatgcctgactaatttttctattttttgcagagatggggggtctcactatgttgcctaggctggtctcaagctcgtgacctcaaacaattctcccatctcagtttcccaaagtgctgagatagattacaggcatgagccactgcacccagccaaaactaga

SEQ ID NO: 35526 - DNA, 2300 bp, Homo sapien
ttaatgtcattaatgtatatcttccatgttttctatgtgtagaaacatgtattttattttacagaattgagtcatcatatatgtacacttttgtaacttgctttttaatcttaaccttatgttttgagttttctggatcatcaagcttcaaaatcaagatttctgtgtatgcagcaaagcccatcatagatatttactatcatttatttaaccatccctccacattagatcttgattattacttctgaaatctgccttgttttatctttttccactatttatcagaaaacaagatcagccctggtgggttcataccaattacttttcctaactggtgcttgacattgtatccactaatttcctaaagtcacagatgataattacagatactgaacccttacaccctcctatgctacatatgcttttctccaatttttgtaaccagcacttgcttaatcggtgataatactgcttttcttcctttaggctaagccacactcctcaaaaatcctgaagtttacttcaccgtcttccaaatatgtatgtatgtatggaagattcatcattttagtagctaacttacactgaatgttactgtatatactgtgacaataggtttatatgattttttaatttgacctttatgataataacacggggtaaatactactattattcccattttacaaagaaagtgaggcttcttttgagtaacttgcccaatatcacacacaactagtaagaggcaaagctgggccctgaacccagaactgttttcttctgaaccatttttttcattattattaactaaagtccgtgtttattaaaattttcttaatttttacctaatggcctttttctgttccggcatcacacccaggataaaacattacatttctttgtcatttttcattaggttcctcttggctatgacaatctcttagactttacttgttttctctaacagagtcatccctcatcagctacaacaccatagcagatataattcattgtgcattactatgtatggttctgatcctcacagcaaccctccaaaacagatgttttaatcctcattttatagataagaaaattgaggcttagggagatgagaactaatggtgcagttcacaaagctggtaaataatggaactcagatcctgacccaggactatctgaccttgagtgtcatgttcttttcactactctggtttagatgacttatacatgcatgctttttataaataaatctgaatgctaaaaccagagtcagggtgccataaagaaaagttacatctggttcaactttcttatctaatatccaagcactttctatagattatccaacgaaaatttctaaatatatagtcaaaaggtatcagtgtagtttgtacacgtttccacaaagccttgcccaattttgaacagtcctgattgttagaaagctctgtgttcctccaactgatttttatcctttggtcttaatgtggctcttaggagccaaacacaatcatctaagccttctacctaagtaccctgcaggcagacacatctcccccagactctcttttcctggcagagtacggcttagtttatattttcctcagcatcctaatgatgctactttaaatcacagtgacttgcagtatccctgtttagttgcaagtccttatagtgcattttggtacagcaatgtgtatgtcctatacaatcaggactcaataattgctgttgacttcttccttaaagggaaccacttaccaccatcaccatcccttctcgcctcccctctccacacactacatttctaaatcctcaagtccaaaggaccctaacactgacacttcttgcaaccctttaaatgaggcagctctccctagaaaaccccttgagacacaagtttggaaagtgagtcaaacgtaagagggatgtcttctccgagtctgagaagcaagttaaagggcaaaagcagtgagccgtggacgcctggagacagtttctttcttcctgaattccccaaagcgcagagacagacaggatctgccaggacagcgcgcagggcggggcggggacaggcgcgccaggagcggggcgggcttccagccgctggttttgctgagggctgagggacggctcagcgacgccacggccagcagcgctcgcgtcctccccagcaacagttactcaaagctaatcagatagcgaaagaagcaggagagcaagtcaagaaatacggtgaaggagtccttcccaaagttgtctaggtccttccgcgccggtgcctggtcttcgtcgtcaac

SEQ ID NO: 35527 - DNA, 2300 bp, Homo sapien
gagatggaaaaattaggcaaatgatttttttcctgattcttattcttacgtgagccatagccaattttctgataggtagaagcataatttaccacactggtgtttagttcaacccaggccaatttcgagcacaggattgttttctcttggagtaagtttgcacagcaatggagttaggcccacgtctttcaaggtgagttgttacttgcttagagctcaagctgacctagctttctattaagatagaacctctcataatgaaggtgtcacagaaaataactcatggctcatcttctggcaaagtttatccccatcagactttttactggatactgtatagtgtttatgtttaagggacgtaattggacatgtaacatgtccaaatgtataaaaatgtaacctgtgttttaattctgtaatacacatttttggtgccaaagtggtgagaataggttttcaaattcatttgaaatattaaaaataaactggatttggagacagaggaaggatgggggactaatgcattttttaaagcaaaaatctgttggatgtattttcagattatctcgctccctctttttccctgtgcagcctccttatatggatatgcttagagatattctgtagcattaaaatgttgtaaagtcacaaaattcactcacatttcaactcagatctgcaaagaaatctctctcttctattttgcccaaaccaatctggtctttctaatttgtggttagtgcagaaacttttaacttttagtcctatcttgtttaaagtttagtctcatctaataatgtaaacaacttctttggacaatgctaagtctctctatgaaaggaaagactcagtgtcaacaccttttgccttcacggaaacatgaggtttctcctataccctatgagagtaccctatgatatgagccctccaagccctccttggtggttgatatgctaaatgagggctagaataaaatagtttcagaaaaccttgactcaaaccaagtacccatatttcaagcttgtaatctttataaaaatcctgttttgcctgtcagagactgtggtagtcgttgctgctatcctccaaataattagttttcctcttaagcacatggcaggattgtattattctgtccctttgaaggtagctgtggccagggatctgctttggacaataaaattttaatcagtaaattatttattattctttctttctgccatggcaatcaggaatgtgccagatggtcactactttgtcactccatgtcgccagagtatagacaacatgaagtagagctgccagctaaccctgtgaaaaataaacctgtgttgtgttaagccactgagatttaggagatttggttactacgactcatcctaacagagaggctgacatgcaattccttctgtgacaaatactaattttcccccaggcaagtgggctcctcagccaatttaggcaaatatgtaatcagaagagcaaaatagaaaagtgctttaataacgttcagaattagttcctgttacaagtacaaccattttcccttctgcatttcagatgaagatttttgacagaaataaagatggtcggttggatctaaatgacttagcaaggtgagttacatggaaatgatatcatacattcagaaataccttactaggggtctgatgacatcatatatttccttttgagactggagatcaagcctcacctggagtctaaaagaataggcacatcttaccaataagctgagtgattctaaatcttttagggtaacagatccctttgtgaagataatgaaaattcttctctccaaaacgcacaacacacaacattttcacaaatgttatggatgggtcatgggaagaccctacccttaaaggcaagacatttatagtcccacattgtgacttcatgacaaaaatgtcccaaatcccatttactggctctgggaacgtcgagcagttatttcaggacacaggactactcagccgactccaggtgcactctgtgttcttgaagtgttggtgtatcctcagggaggcaccaagtgtctgaaggctagaagtggaggaggacaggataaaagcagaagtggctcagtgtccatgaaaatgttgtctgtgagtctggtgttgtgacacgtgattggtgtgtcagcatgttttgtcaagtctggctgatcccaaacagcatggagttgtctacaaaaaagagaaagacattctgagcaaatagtcagagttgaaattattggatctggaatacacagatatacctgttattggggagcatcc

SEQ ID NO: 35528 - DNA, 2300 bp, Homo sapien
agagtttgcagtgagccaagattgcgtcacagtactctagttaggtgactgagcaagattctatctcaaaaaaagaaaggaaaaaaaagatatccacatcctaatatccagaactggtgactattttatgttacatggcaagaatgaattaaagttgcagatctaattaagtttgctaatcaatagactttaaaatagagattattctggattatccacattgggcccaatataataacaaagatcctttaaatatggaagagggaggcagaaggtcagagtcacggagagatttgaaaatgctagttgctggctttaaagtggaagaagaggctaaagaatgtaggcagcctctagaacctgaaaaaggcaagggaaaggattctccccgagaacctccagaaggaatgaggccgtgtcgacagcttgaattttgcccagtgagatcgatttcagacttcagcttctagtgctgtaaatgattatggttatttgaagccactatgtttgtggcagtgtgtcgcagcagcactaggaaactaatacaacaacaaagaggccttaaaacatttccagataggatttttctctctctactttcagctgtgaaatgcagttcaattcctctacataaaagcacctcccaagtaatatgtgctgtgactggcaacatgatttaggctgcctggtgcctgcaaatactaagaacaatattcctggcagacctccaggatattctgtcttctaattggctcaaattaattccctctactctgagcatttggaggagcaaagattttccacatagttgtattacattttttctactttttctatatatcctcatgactatgaatacaacataaatctaatgttgaatttactgaaactgactgtattctattaaagtataattataattataattatacagaaaagaggcagacatatttgctttctaaaacaaaaacaagattattttaaaattgagacataatttatgtaccttaaagtttacccttttaaagtcagatctaccaatctacaatttggtagattttaagatattcataaggttgtccaaccatcaccaatatctaattttagaacatttcattatgccagaaggatacccagtacacatcagcagtcactcctctcttcctcctcccacaaggccctggcaaccaccaatctactttctatttctatcgactttcctattttgggcattttatataaatggaatcacacaatatgtgcctttcctatctggctatttcacttggagtaatgttttcaaggttcattcatgttgtaactttatccctttttatggctgaataatagtcccttgtatgtacataccacattttgtccattcatcagctgatgttcatttgagttgttttcactttttagagattatgaataacgttgctacatgttttgggacaaatatacgtttgtgattctcttggttatatattaaggagcagaatttttggttcgtgtcgtaattttacatttaattttctgaggtactgccaaagtgttttctaaagtggctgcaccattttacattcccaccaacaatgtatcaggattttaatttctccatattctaatcagcacttgttattgtttgcatctttcttttaattataatcatcctagtgggtgtgaagtagtatgtcattgtgatttgcatttcgaacattttttatgttttattggcaatttgtatgtcttctttggagaaatgtctgttcagattctttgcccagttgaaaaattgggcgatttgtccttttgttgttgaactataagagtcctgtatatattctgtgcactagacacttatcagatgtataatcagcaaaaacttttttccattatgagagtcgtgttttcattttcttgatgatgtcctttgaagcacaaatgtttttaattctcatgaagtccaatttgtctaatttttttggttgtttgtgttttagatgtcatatctaggaagccattgccaaaatccaagctcatgaagatttacccgtttgtttccttctaagagttatataaactataaagtttctgttttatgtaaatccttttcatgttaattgtttaatacagtgtaaggtgggggcacaatttcattattttgcatgtagatatctacttgtcccaacaccatttcttgaatatttttccttactgaatggtcttggcaccctttctgaaaataaactggccatatgtatgggtttatttctgtactctcaattctattccattta

SEQ ID NO: 35529 - DNA, 2300 bp, Homo sapien
agttgccatttctgttttcaaatatcttcaatttttgccgtccctaactgcatcccttatttattatgtatgcaggttaattcatacttttgtaacttgattgtccttactcggcatgttttattttatagaactttacctgcttctatacatgccttattatgtgtagacatcaagtgtttagcagttttttttttggtaaccaaatgattttttttttttttgaggtaaggtcaactgttgaatatcgtacaataatttttaatttagttatttggcagcgttactgaatgggttttgcttttcactttctcttggtgtttacagcacaaactgcaaacacagatcaacaaactattttgcctcttttcaacagtcaaaacttttgaagcatatactcttccaaatttctaaacttcaaattatgttcggccttctagtcccattcctgcctgagtctaacactagtatctcaccatcacatatggcgtaaggcttctttttgacatattttacttacattttaagaaataattctattattctttacaaagtacgtgaaaccacaggtatcaaatatatatgcttacccaaattttaagattaacttacttacatgccacatttaattatgagtatttcgtgaaactaccatatttgaaaggaaattctctaaaatgtactttaaccagccagactgatgttacctggatttaaacaggaagattacacctctcctgcttgtaatgcaattttcacttccatgtgtaacccttaacataactaacatacataaatctagtttgagatagtctcgctcatgtcacccagactggagtgcagtggagcaatcaatcttcgttcactgtaactttcgcctcccggactcatgaacaaccctcccaccgcagcctcccgaacagctgggactacaggcctgcatcaccagacccagctagtttctgtggggacagggtctcaattatgttaacggtcaagccccaggcttgaacgaccctcccgctccaacctccactgaagtgcaagtactgactgctcacaagcgttaagccacctcgcccagtgacatatataaccaaaattacctcaaactaatggccgatggaacgctccttgaaaattcagtccccgtacattcccgaaatgcgcttaaacgggcatttgtgacaggcaagtaagatggctggttaacagcagtaacgttttgtaacgtacagcctttttctgagacggtaggtggctctgaaaagagccttttgttttttctgacacagaagtctttttaccaatgacaaccttaagttacttgctttgggctttatggtggtgactctcagtcttcttgggcagcagcactgcctgaatgttaggcaggactccgccctgggcaatggtcacgccgcccaaaagcttattgagttcctcatcattgcggatcgctagctgcaggtggcggggaataatgcgagtttttttgttatcgcgagacgcattgcctgccagctcaaggatttctgctgtgagatactctaacactgccgccaaatacactggtgcgcctgcccctatccgctctgcatagtttcccttacgaagcagacgatggatccggcctacgggaaactgcaaacccgctctagaagagcgagacttagacttggcgcgtgcttttcctccctgcttccctcgtccagacatctcctcgcatcaaattgcagcaacacgagaaccacatttctagggctgctactgggcctatttatagtctgactgaggttggcatttgctatctgattggctgatggccgtctacccaatcagaaagtcgtactagaatcgcctcatttgcattcacgccacttcccattgtccaatcagattttggataccgaacgcggcgtttgagggccgtgcctataaataccgcatctttcatcctccagttctgtttgtttacttggcgagacttggagctgaggtcatttggagctgtttaatactgaagagctgttgagcactggaaagtgctgtgtaaccctggaaaagaaccgtgtaacgctgcagaagtgtgtggtagctatgccggaggtgtcatctaaaggtgctaccatttccaagaagggctttaagaaagctgtcgttaagacccagaaaaaggaaggcaaaaagcgcaagaggacccgtaaggagagttattctatttacatctacaaagtgctaaagcaggtccatccggacactggcatctcttcgaaagctatgagcattatgaattcctt

SEQ ID NO: 35530 - DNA, 2300 bp, Homo sapien
ttttgtattttgagtagagacagggtttcaccatgttagccaggatggtctcgatctcctgacctcgtgatctgccctcctctgcctcccaaagtgcaggattacatgcgtgagccaccgcgccggccggtactaactttttaatgtagagaaagcacatatacatatccaaaattttgttaaaagataaaggttaaatgaagatgcgttaaacaaattgagaattccagctaaccacaggtttccaggaagtaatatttgatccatttttaaggtggctgaaatcagtttaatgcttgggagctcttacagatggagtccaacaaccagtaacatgacaatgaaggaaactattataaatttaagaaaattaagggacattttaaatccgtttaattcctgctaaccagatttgtgagttctccagagttcgcacaatcatttccacaccttgacttacctgtggcacaaaacgtaacttcctctaaactattccctttttgtgaggtcttaaaatttgggatcataatgcaagttatactgtctatgtcgctgcgctttttagttttattatgtgtaatgctaaccttaaatataccagtatcagcatgtagcttttatacaaactagggggtttttttgttttgttttttgagacagtctcgctgtcaccaggctgtagtgcagtgacgatctcggctcactgcaatctccggctcctgggttcaagcgattctcttgcctcagcctcccaattagctgggactacagtgcacgccaccacgcccacctgatttttgtatttttagtagagacggagtttcaccttgttggccaagatggtctccgtctcttaacctcatgaaccgccagcctcgacctctgcaagtgctgggattacaggcgagtcacggtgcctagcaaggattgtcttgctgcaactagttcgtctaccctcggcccacagctgatttggatatattcgcagtggctcacgcctgtagtcccagcactttgggagaccgaggtgggtgatcaccagatcgagtttgagaccatcctggccaacatggtgaaaccccgtctctactaaaaatacaaaaattagccgggtgtagtggtgggagcctgtagtcccagctgctcaggaggctgaggcaggagaatggcgtgaactcaggaggcagagcttgcagtgagccgagattccgccactgcactccagcctgggagagtgagactccgcctcaaaaaaaaaaaaaacccttacggttagaaactacacaaaaacgaagcccacagctgtttcagtatgtttaagtggctctgaaaagagcctttgggttagaaatgacgtttacttagcaggcttacttggagctggtgtacttagtgacagccttggtgccctcagacacagcatgtttagccagctctcccggcagtagcaagcgcactgctgtctgaatctctctggaagaaatggtggagcgcttgctgtagtgagccaaacgtgatgcctcgctcgctatacgctcaaagatatcagtgacgaaggaattcataatgctcatagctttcgaagagatgccagtgtccggatggacctgctttagcactttgtagatgtaaatagaataactctccttacgggtcctcttgcgctttttgccttcctttttctgggtcttaacgacagctttcttaaagcccttcttggaaatggtagcacctttagatgacacctccggcatagctaccacacacttctgcagcgttacacggttcttttccagggttacacagcactttccagtgctcaacagctcttcagtattaaacagctccaaatgacctcagctccaagtctcgccaagtaaacaaacagaactggaggatgaaagatgcggtatttataggcacggccctcaaacgccgcgttcggtatccaaaatctgattggacaatgggaagtggcgtgaatgcaaatgaggcgattctagtacgactttctgattgggtagacggccatcagccaatcagatagcaaatgccaacctcagtcagactataaataggcccagtagcagccctagaaatgtggttctcgtgttgctgcaatttgatgcgaggagatgtctggacgagggaagcagggaggaaaagcacgcgccaagtctaagtctcgctcttctagagcgggtttgcagtttcccgtaggccggatccatcgtctgcttcgtaagggaaactatgcagagcggataggggcaggcgcaccagtgtatttggcggcagtg

SEQ ID NO: 35531 - DNA, 2300 bp, Homo sapien
aactttttgactctggtaatcacagcttaaaacacaaacatattgtactgctgtacaaaaatattttctttaggccgggtgcggtggctcacgcctgtaatcccagcactttgcgaggctgaggtgggcggatcacaaggtcaggagatcgagaccatcctggctaacacagtgaaaccccgtctctactaaaaatacaaaaaattagctgggcgtggtggcaggcgcctgtagtcccagctactcgggaggctgaggcaggagaatggcgtgaacccgggagacagagcttgcagtgagccgagatcacgccactgcagtccagcctgggcaacagtctgagactccgtctcaaaaaaacaaaaaaaaacaaaaaaaaaacaccaaacattttctttatacccttattctataagctttgatctatttttaatttttaaaaattaaaaaagatttattaaaactaagacacaaatatgcaagttagcctaggctgacacaaaatcaagaccatattagaggcttcttggaaaatctattttcaagtgttttacttttctaacaacattggtaaaacacttggcaatcatcttggggaattgggcatcactgacaggaggaactgcaagtgtaaaggccttgaacttcatggacaaggcagaactagttggaatttagtgagggaaggacagcagggcagaggtcagtaaggttggtgtgtccaaggtgatgtaaggtgttggagcaccttcaggaaggtgaatttgctctcttttctcctaggttctctgggaaggctttggaagacttttacaccagtaagtaacatgatcatatgtacatttccaacattctgcctgctatgtggggtggattaaaagagagagaatggaaacagtggggcccggtaaataatcattttatttaccctggtgatagatgattgtgataggaatggagaaaataaaaaataatggaaagagatgaaggtggaactgatagaacatactgttggaattaatgttgatggaaagtatagaatgaaggctgacttttttttggcaagattaacagggaaatggtaatgccattaaccaagatgggggatcctgggccaggagtagggttggagggagattcagttctgcttgcagtcataagactgagatacctaatgggtactcaaggagagatggatgaagttgaagtcgaagctcagagaagaggtcagaattgggtgtgaaaggaaaggggactggctgagatctccttgggagtgagtttagatagggaggaagttcaaggacagagtcttaggcatatcaacattagaaaccagagaaaagataaggattcagcaaaacgtattgacaaggaacaaccaatgagacacgaggaaaatcagatctgaatgaattaaatgaaacaaggcatcaagaaggaacgagtggtggaatctgtcaagcactgacagatggggcctgggatgtgaccactggatttgctggcagagaggctggtgatggctttgctaagggctgtcttgttgctgatggattcatgagaaaactagaggtggggaaccagaatgcaaatatgtatgagtcttctgaaatgttttgccataaaagggaggagaatcacagagttaattttcatggaaaactcaatggcctttgtgcaaaaaattacaatcagaaaaccataaaaatcactcaagtcgaccaaaatgtattaagtctctcctctttggaaagctcagttctattaaacagcaggatggtggaaaagggactcaaaaggggcaaaatataccccatctccatgaagattataataactctgagagaccccagaaggggatagtgctgtcagtgaaacatgtggggtgtcaggatccttataagaagggacattgattctgattaaggatgagggaagacataggtgacctcagctgggcttgaagcatgaggaagatttaatgagcttgatttgattatcaatcaaacaataaaatgtaaagttaaaaattaaaccactgggccaataaaattctccaagctggtaacataagggctaaaggttttgggtaattatttacctcccagaattagacaattgcaaagagcttagaatatttatttgaaaggaatgaggatcctgcactcttcctccctcaggttagttagctttcaaacttttacccttaatattctgcttttgagatgatgggaatgggtctgtttctgttagagagcagcttaatttgctgtttaggggcagagattgtgggagtg

SEQ ID NO: 35532 - DNA, 2300 bp, Homo sapien
ttgccaatggcatggaggagtttcaagcctaggcattaaaaaggatttttttaaacttatcctcttgggtcttgcccactgctattggaagactatgctccagctcatccattgaccaaggcagatgacagacacagagagtggagccacccagctgtcccacaaagaaccatgggaataaatgattattgttttaaaccattgagttttgggaggttttgaaatgaactattattaaagctatagcacccttacaagttagtagcgtgtttgccccacgtgcttgaaaatgccctcaccattcacgtaccagtcagcatccctcctgctagtcatgctttgcagagttcctttcatcattaaacctttccatatctatctcttatcttcctcaaagcacataagagtgagcagcagtacattatgtgaaattaattacccaatttgtagatatgaaatgaaatgaatcctcagcaaagacattttttctaatatatacattattacagagttgggaatttaacattatcagtattgagtggaaatatggcccatcttcaaattccctttttagaatcttaagaaatcttatgagctctctttgtttggctagcatgtcatttacaaattccttcacaaacatcatacagcagccactatacaccacgctttttgctaaattttgagaatataaaatggcgaagacacaattttgccatcaaggaacataatcaagtgcggagggatagatatgaaaattagcaatgttgcacattggggttggaggatgttaatatttattcaacaaatatttagtgagtttctattgcgtatatgctccttactgtttcttgaaaccataagcacagtaagattttcttgttgtttgaataatttttgtaacctgccctttcaaagttttcatgataaaaactttaaaggttgatatgctatggaatcattacatattttatttttggtgaatatattcacctgattttacagaaacccttgatctaacaggcctgtcctctaatgaacacactagtgggactataaggtattaccataaacaatttaggggtgcgattttggagaatgtttcaaatattaaacaaactaaaggtaacagcagctaggcagattccaaccacagctccatgaaggtaaaactgtaacgtagtaaaatactgcctctggaactttccaagtgtctttggaacctttctgcagcatctctctgtgtattatgtccacttctgaacctcacataatctgccctgtcctgcagtctccactagttgattctctactctaattagtattttacctatgattaggtcacagtcacacaattttctagctatgatattagattggtgcaaaagcaattgtggtttttgccataataataactggagaaattttaaagaatatattaaattaaaaagcatgactaaaatgtaatctgactaaaataacattttctttttttttttctcttgagacagggtctcactctgtcacacaggctggagtgcagtagtgtgatcttggctcactgcaccctccacctcctgggttcaagtgattctcccacctcagcctcccgagtagctgggattacaggcatgcaccatcacactcggctaatttttataattttagtagagacggggtttaaccatgttggccaggctggtttcaaactcctggactcatgtgatccacctgcctcagcctcccaaagtgctgggattacaggcatgagctaccacgcctagcctaagatagtattttcaacattttatgagataatttgctctgaattcctttaggtcaaatttagaagcagtaaggaatgttatgatgcctctaatgtcataagattattctagctacacactcgggctgctgaaacttaaatgttaaatgtagttggctctgaacactaccagctttagctatgtaaatatccatatctattaggatttggttaaccatagataaattgcatcacagaagtctctgtcataaaaattggagatttgaaaagcacactcaccaaagatatagaagacgtaaggccatcctatggtctggcagaggagaccaccagcaagtagaacaatgaaggaccccagcattgaccctgaacagaagaggcgaggatgttctgggtgagaggactcgtcttggggctctatgtgctttctacaatgctgagttgcacagtgagtgaaggtatgagtttcaagccaaactatctaggttccttcacttggtaactatgtgatctt

SEQ ID NO: 35533 - DNA, 2300 bp, Homo sapien
gaaacttactgaattaattattgtttgtatagttttccagtcaacccacttggattttctaagtagacaaccatatcatctgctcataatgataattttaccttctttaccaatatgtattttcttcatttccttgtctctcagcccctctctcttaactgagaacctcattgcttatcgcacagatgagatgccaacctatatactaacccatcacatatacaacactgccttctctctgccactgtggataagctctaggtttctacccaaggccaaccctggctgtggtgcttgaatttcatcccttccagatgagtcaagtactttttaattctgtcattgtgccttatctcctacattgtggaacctcattattgaattataccatcaccttatatgctattgcatgtatcttctgaaacaaacaaaaaacaaacaaacaaaaccctccttggttttacatccctttacagctaccacaccatttctctaatttgctttataggaatgcctatcctggctgtctcagtttcctcagcctgtattctctctctcttgatttctcttttcatactataaaataaaacacagagacacagaaaattgcacaaatatttggctcaatgaattattataggataaatgtttgtaatcactagcctggacatgaaaaatagaatattgccaggattcccaaagttcttcaaatggtcactccctgcccctaaaagtaacaacttctttgacatttataataataatctatttttctgtatttctttatagacttatcacccacatgtatacctttatagtgtttcattttgccaatatttaaaaatctgttatgtcatttaagttctttctaatctagagcatccatttctaccccagttttttttttttgagatggagtcttgctctgtcacccaggctaaagtgcagtgatctcggctcaatgcaacctctgcctcctgagttcaagagattctcctgcctcagcctcctaaataactgggattacaggtgcccaccaccgcgcctggctaatttttgtatgtttagtagagccggggtttcaccatcttggccaggctggtcttgaactcctgacctcatgatccacccgcctcgtcctccctatttttctttataagtaatttatttattaaagaccctgagccttttgacctataaaatctcctacagtttagatttgctaatgatacacttggattttgtcgaacatattctctgttttctgtacttcttccaaagcggtagctgtatccaaggtttgatgagattcagtttgattttcttagcaagatattagtggtggtgtgttgtttcatcagaaggtatacaatgtcttcatgcctctctttttgtgatactaatgatcattgatattcaacacctggatctcttaatttattgagggttgcaaaataaggacattctgcatctttcaattcttatttatgtattagccaaaattattctacaaagagacatttctcctccaattcatttaccactgatagagtttacataagcaaagcacagtattataccttgaacacaccttaaaggactctttgtctccatcattcatttgaaaatcattttagtcagggttacctttaaagtttctcttgcctaaaccattgtaaattcttagaccttatataatgtaatgtcttgatattatagcacttgccaaaggtccttgctcccaacctttttcacttcgagtctccattttacaactgttcttcctacttcgttgaaggcccttcccagtcttttttgcaaacttctctttttcatcctcatcttttgatgttaaagaggcccagcctcccaaatttatatctccagccttagcatccccacagagtcccacagccatttcaggatgtctaatattctcaggcttaacatggtctcctcttctccaaacctgcacccgttattccttctcgtctgaggagtcatccttatctcctctgtctcctgcattcccagtttcaaaaattgtccttaatctgatcacttctcaccttcagagacgtgtgtgttgtttttctttagcccagtcctgaatttctgctgtagcaactataaggtagaaaattaggccagtcacattaatggctgccatcaggatgaaggttttaaaccaggcggattccggatcctaaggaattaaaattcaaagtaattgtaaattattgctcttgtttttttgttttgtaatgtttaaaatgtaatattaaaaatgtagactcaag

SEQ ID NO: 35534 - DNA, 2300 bp, Homo sapien
agaacctacagtaattgcaggaagagccatgagagaagccacaccttccagaggacatgcctcaataaaatgtacctctttctgagtatgctgaatgtcaaacagatgtactgtttagagaggagtgtggaggagacagggtgagggaaggagggaaagcaaggaaggagggagaaggaagaagggaaagagaaggaagaaagaaagaaaaaaggaagaaaaggaggaagaaaggaaggaagggaattaagagtaaaaatttaatatggcatttatggggcatttagaaagccacaacattcctgtgagaacagcattgtatactcagagccatccttaatagagaaatcttgagagcacttatggcaggcaagctctacctcctgggcagggagagagactaagggtgtctgcttattatgccatgaaattactggcagattcccagtttctggtccactggatgattttgacccacacaccttccctgaagctttaaggaaaaggtaacagtaaagttaaaaattaagcttttaacttcgacacagtgatgtcaaaagatttggtgaatgatttatggggctaaacttggtaatcctagaaagtcaatattgtgtaaagttgagagaaaagtcttcacagcggaagaagaaatcacttttttgtcccgaatcaggttagtctacggggctcattaaatgaaatgagcaatcagttgattccccagagggccgtaagggggcattccctggcaaagatattattgaaagtacttagcaataggggaaaatgtggggaggggtggaatatgccctatcttctgaggcttttcacaagagaaaaaagaacatatttttagcaatcagtgtgaggttcacagggacacaaggaaagagaagtatgtgttgtacagtgtgtgatgcttgtatagctgtggtgtgctgtgtctgtaatgtgtgtggcacactgtgtacgcctggtgcatctgtgcccatcatttatgtgtgtgtgtggttatgtgtgtggtgtttgtagtttgtacttccgttttgaggatgcagtattgtaacgtatttatatgtttggtttgctatgtgtctggagtgtatgtgtggagaacataaggggagtttgtaccatgtgtttatgttgtatgtatgtatgtggtgcatacgtatgggtggtttgtgtgtgcatttggtgtgtatgtatatatgtattgaaataaacagcagccccagaagaggttccaatgtgtgataatgatggttgacaaattgcttattcaaaaatattttgcaaatccaatctcaggactttggtatctttggggcactaggtatcatataatctgatatggtaaaatcctgaggtctaacctgaccagcacatattggtgctgaattctgatggtaaggggttgcctgataggagactgctccattctgattctccactgagcttcctgccataaagctttgcatcagtggctgctctatccacggaaactgaagatacggacaggggcatgtggacgtgtaacgaatgattagcctctgcttgagttgatcttatcaataagcagatagtatcttccagctctattaagatacagggggaaaaaaggaatttgttttacctttgcttactccttttctgacattcttcctttcttttcatactgccgagtttctgacctatagcaatctccttctgcctgaaaggcttcttttagtgttccttacagggcaggtctactggcaatgaattctttccatttctcactttggaggaatattatcacggatttagaattctggattggcagggttatttgtttgttctctgtagttttcaggtcttccatatatttttaatcaaccaaaacaatcacaaaagtaaaataaatatcaagggaagcacataatggaggtgaatgggcactgctgtgatggagcaagttatccttggaagcggttttaaatcagagaggagtactgggtagtgtttggtcagttgcctctctacattatgctgacatcaacgtgttttgcactcacagtgggtggaggcaaaacccttcagcaagaagagaagcaacttcagccgtgtatgcaaatggataaccggttgcctcccaaaaaaggtagcactttattctgttccattaaacaggtgttctttttcttaaatattacatcacagattccatgtggaagaatatttttgtgatatacatatggggtcttaaaaatgttcagaaaagaaggtagaagaaaccagtcctactatggttttcc

SEQ ID NO: 35535 - DNA, 2300 bp, Homo sapien
acttgttatgttctttccccagaggtcagcatgaccacctctctggtatgtcattgggacttcctcctttcttgctttattttctctacagcatttatcaccttctaatacattatttgatttactgtttgtgtttcatattttgtgcttctctctggaatgtgaggtccccaaacacagggctatttgtgtgctatgtttgctgctacacttctagggcccaatattggaggtgattgatgagtgttttgttcgatgattgattgaagatgtcaaatctggactggaggacgtggcctagaagagtggtcaatccagctccctgctatttctcctgcattgaatagatttatccacccaagcatagggtgaactggacaatcccaggcttgctctgctaaagtagctacatggtaggagagtagacagcttccaggcagtctggagaagatacagagctacacatgctcaatttatttacccagtctcatcgattgaagtcccttttcttcccacgcagaaaaaagtgaaagggtacacatgctccatttatttacccaatctcattgatctaagtcccttttcttcccacacagaaaaaagtgaaagggttggagagagttccaaagagctgctctgcctgaagtccttgtgtaataaatctgagcccagataaatacagcttcttggctcatacattttatattttatttgctcttcaaattggactgttagctgtgttctgccaggataccttctactcacttaatataatgttgcaagactttttaagaagttgagtagagacctaacctttgaaacttttataccattcaatctcatctgattctttccccagattttaacttctgaagagttctttaatttcaaccataaatgccgatttccctatgttttactacattttttggacaatttagccaggatctggaaaacggagaatgagatttctgcgttttagttgccatctttcctggctgtacaaatacagattatttgaatgctgtgctcatttctttttccactatttttcacttgagtgaaaaatataaatgacctataccaatggacaactctcttcaaagtgtaacttacatttcatttacatacataaaatttatacatattatacataatatatagtgcataatatataacaatacatgtcacatataaattatatgctatacatgtatatatagttatacatacaaagtatatgtaatatattataaattatatgtagctatttaaatatgtgcacatattcatatgtatatattttcttttcatatatatgtgttacatatacacacacacacatatgtatatgcatttacttgtgagtaatttcatcaactgtagaacacaatgacctaggaatggtagatacaaaattctaggatgaacagaacccccgagatcaagttaggctctacaaagctgtggtataaaacgtcctttagctcaactcagtgatctccttttgtatcttcctttcataaagccaacagaagtgtcatttaagtaatgatttaaatcgttaagtgatcaggtactttttaaatcatatcttgtgaaaaactaatgttagctcaattttaaaaaacactaatatgatgtcataatatttccagttccaagtttatgttctgctcgctatggaatagccctcgtcttacatttctgcaatttcacaacgatagcacaaaatgtcatcatgaacatcaccatggtagccatggtcaacagcacaagccctcaatcccagctcaatgattcctctgaggtgctgcctgttgactcatttggtggcctaagtaaagccccaaagagtcttcctgcaaaggtaagcaacataagatataaatttgtgcttttctttttgctgtttatttgcttggatatttatttttctagagtatgtatgtttaaaaactttaatggagaaaatagtgatttgaaagcaagcaaaaggtctaaaggagctttctagggtatgtaagaacctttttgtgtaaggtttactacagcattctctgtttctctaaggctcctgtgtatgactggtctcctcaaatccaaggcatcatctttggtgctgttggctatggtggcatactgacaatggctcccagtggatacctggctggaagagtaggaacaaagcgagtggttggcatttctttgtttgcaacttcatttctcactctatgcatccctctggccactgactttggaatagtcttgctcattgtaactcgaatagtccagggcct

SEQ ID NO: 35536 - DNA, 2300 bp, Homo sapien
gtaaccttgaactcctaggctcaaggaatcctcctcatcagcctcctgagtagttaggactacaaatgcgtcctccatctccagccaattttctaaaaaaaatttgtagagaggaggtctcactgttgcccatgcttgtctcaaactcctggcctcaagtaatcctctggccttggccacccaaagcactgggattacaggcgtgaagcaccacgcctggctaaagataactgttaaaggagaaatgtgtactctatcttttctgatgatccccatggctaaaacaaagcagtttaaaaataaatcttattcaaaaggaaaatgtaaaattctttttttaaaagagatggatattacaacctaagtcaaggaaatatctcaattcatattcaagtgtttaatcatagaggtgaagaaaagctgaattgttattctttctacacagagacaatttgggtctatttctaccaagtcaaaccaagtagcatgtaaagaactcaggagcactttaaataaagttaaacattaaattgcaaaaccaagtaacgttttctgacttggataattcagggtcagaaacatttcctgtgatatgtgaatcccaaagttgatcattatttatcccagggtccagagtccttcagaaatgactcagggaaaaatcttttacctagaaaggtgaaattgacactacccccacacgataacgggcttaaattttccatacttaaattcttaaagtgcagatggaagaaatctgttttttttcttttatgttataaagaatataataaaacttacctgaaagcattgtgaggatgacatgtaataaatgcgcagtaaatggtagctctgactccccaggacccgggttcctccttctgaattcttgatctgtgatatatactgccaggctcccacttctcagccagggtgttgagaggtagtttactcactctcctctcacaatacagttcaaataggtataaagagtcaaacttagaatctaaaggagatctcctcagggccataaagtaagaagggatttaaagtcaaagtgatgagtatgagctaaggccaggaaagccattaaagcacagaacaaggtgtaaatttccatggctgactctaatgctcatataaagaaaggagtctggattatgaacccaaggcattcagagagctggaaataaactacagaaagctaggagtctgaaggctttgcctcatctatgagacaaggacaagcagaactatacacattcttggaaagcagtgacagtgcttttgacttcctgggtgttagcgcaagagttaaccacaagaaactgaaagagtttggccttcactgtgcacatgtaggtatgccaaatttatgccacttattttccaaagtggttacagaatggcccataaatgctacatgatagcatgtgtgcaaatttagaaataatacaaagcattattacatatagtttgtgaatactcatataaatagtaagaatagaaaaaaatggagaaatcatattatatttatgccaggcttgtttggtttggtttggtttggtttgctgagaaaaggacaaggacccagggaaagagaaagcaacagagtgaatgaagttcaagtttacccataatattacaattcacatatttcaaagaagaaaaaaattaacaaaatttcaattaagggggaaaatcaaaaatagcaaagtaaaaaacacaaaaatactgaactctttaattataatttatctctttttaaccttttcaaaaaagactaaagacattgaagacaccacaaagcaaagcaaaatagctatatgcaagtgtctgaaccagaggacacctatgaggtcctgaggagacactcacaaggggaaggtggagaagcttacatcagccaaaaagcagaaagaactgcagaggggattgggctggatttccgaatgcttcttcaaagcctatttggcaagaagcccttctgagtcaactttgtagtttgatgacttttattaatgattagcaacttaagccctagggtggcaaagaatcctcatctctctgctccaaaaagtccaagggagtaagcttggaggaaacgctgggttcaacttgaagcccttccacagacattaagtcggtaagtcacttctcttggtattgagatgaagacctccaaaactcttttctgtatagcaatggacaatttttatatactccccaaccccaagtttcctcatatgataaaaataaaaatgaaaaatgtaaaaatccatattaacaagactgacaaa

SEQ ID NO: 35537 - DNA, 2300 bp, Homo sapien
gttctgaaactgtctttggtatatgatgttcaagtctgataaaaggaactcactggcagctagtgtacttggtattggccaatagtgttcttggccagcaccccaggcagtaggaagcatttggccttttgaactgcctggaggtatggtcaatcatctgttacaatgggccagatgggaggccttaccagtgatccactcgaggatgccattgcaaaaggaatttatgattcacatggccttgggtcagatgccagtgtatctgtttcaacatcctacaagattactagttgttcacttagagtctctgagcagcagaacttctatttctctcgtctttcttgatcttaaccctggcatcctgttggaaaatattctgatgcaatggagcttccaagtttgctataaggaggcaggccacctatggaacagaaaatctcacaggccaaataaagatgatagatatgcatggttggttaaataaatttaaaatccactgcaagaagcaagggaaaaagatagcataattttacatacttagaatagggagcaagcaagatggtaggaccatagtgctgacctggaagtacagaatgtgccaacatcctgtctttccctgccacattaactttcccagctaatggtatgattacaaggactagcactgagattccagcaagggatcccacagacaggaagtgccgtaggagaggataatgacacacacttgctctatgagaaagacatgctaaacagccatgggttttatttatttctttttttaaattgacaaataaatcttgtatatatatatatttatgttgtacaacatgatgttttgatatatgtatacactgtagaacagctaaatcaagataattatccattacctcacatacgtttctttttgtagtgagaacgtttaaaatctactctcatagcaattttcaagtatacaatacattgtattaattacagtcaccatgttttacaatagatctcctgaaccgaacttattcctcctgtctaactaaaattttgtgtgctttgaccaacatttccccaacccgtaacgtttggtaacctctgttctcctctctgcttctataagtttgatatacttagattccatatacaagtgagatgatgtagtgtttgcatttctgtgcctgtttttttttgttgttgttgttgttttgttttgttttttgcttaccctaatgttccttgggttcacccatgttttcacaaacagcatgacttccttattgttaaaggctgaatagtagtgtgtttcttgaacagagaacacatggtgacagaatgggtgtccccagtaggtggctgaatcaaggccttgaaaatactgggtgcttgtataaccttcagtgtaccctggatatctagtgttagctgtatatttagtatatcataagtatcttgtgcccaggtgtcttgtttatttcaggcctcatgaatatagttatctctttgtcctcccatttcttaacctatgtatgatatacttattaatttccatgaatacataacacatgactttcatacatccacttcccattcattttcttgctctctatagaggaaataaatattctcaaattatacaaaaaatgcatattacatatggctttcttggagccctttctagagattgtagaacacttcaaaactttaggcatatcaaaatctgtttctagcttccttgaaaagagaaaaagtgtctacaggtgacaaggaaaatcctgcagatacttgtattcaaaggaagtctgaaaaagtctgattggataaaaaataacggaaaaaggcatgtaaaagtatcttcagttctgctttgcttggatgaggcaccttccagagaagttagccgttagggtgtgtgtgtgtgtgtgtgtgtgtgtgtaagggatatagtccttatgacctctgcttttggtttggcattagagggggctacttcgcaggagacatctggttgtgggaagcagggtggcgaggctggcgctgaagtcccagacttggtcttccctggccgggctccagcgccgtctgctccgcaaaggcatctatgccgagcgtgtcggggccagagcgcaggtgtacctggcggccgtgctggagcacctgaccgccgagatcctggagctggctggcaacccggcccgcgacaagaagacccgcatcatcctgcgccacctgtagctggccattcgcaacggcgaggagcttaacaagctgctgggcgaagtcaccatcgcgcagggcggtgtcctgcccaa

SEQ ID NO: 35538 - DNA, 2300 bp, Homo sapien
tgttgtcaatatcatgaaggcaaaatcaatgttctcatcttagtaccaccctcagggcctgacactctgtttttctgaaaaacttgctcaaaaatacccattgatttgcattaggagattctcttcatctgctgaattaacccaaggttcttgtccaagcagttttttaataggatttaaaatatggtgggaacttcttctctagacatgttgtggcaaaaccagaatcagttctgtgtgaggagacaaactaaaggatatgtcttaagtgttaggagccaaattaattcctgttagagttgacgctgcctatctgagtatcttgggaaagtaagaaaaatatgaagaaggttaaattatctttttctacgctcaaaaggaacttctcttgtatgtgatacacttctatgccttgtatgtgatacatttctatgccttttctcatcttgttatgtcttcaatatttttctcccccatataaattgtcatttcacttgaaagtgtctctgtcatctctctccaattttcattatatggtctaaactatattgctatcccttctggaagtgtctacattgccttccttcacattcattcttctcacaatacaagccttccagttctatcttctctgtccttgatttctaagttaacctcatttatttaatcttgtattggtcattttctcatcattaatctcttgcaattgggctaggataaataaatatctgtttaatctgatggaaatatctggatctaaataatttgaaaatggtctattttattttagcatgtaaattttaatagaatttaatcacataaataaacgtctatgttttacaatgtataaaaaataataaaaactttaattctggggattatagctttacagttccgatcggtgctgagatctgtaacatatggctacaattccgagcagatcttctctgcatccaataacctgccccaccatgaagatatttatcagtgatcattttcacatgaatttttatttatttagtactttccaatgaggaaaattcaaaggccacatgaattgacttttcaagtttgtccagctgttgtcaaccccgggcgcatgctagaaacctctaaggagtatctaaaaattagtagtatctgggttccaccccagaccaattcattcagaatctctggagtgggtcccaagtatcagtgtcttataaaggctccccagggaagactaacacacagccagagttaagaactgctgagtctatggtcaggaatatggagagaagtaaaaaatgtttaaaaagttcatgctcagtaccacatttaagtttgtaactttatgtcctcagaggcgggtaagggtcctctctttggcccagtcttgaagttctgcttgtccaaacgtgaggtaaaagaccaggccaaacatgttgactgcagcagacaggaaaaagacattcctccaaccagactcaaaatcctagatgtaaaaaacagagaaaatgatcaatctcacaagttccttctacaccagttctagtagccctcccagttgtgtattgcaatgttgatcacaaggaatataaggaacaatgtgcagtagttacttaagaaagtttatgaaactattggaaacaaaatggccaaaatgcacatggggttctgagttgagatggttatttctttaaacaaaaataaaatacactaatgtttttctgaaaatttggatttcaacatataatattactcatttaaaattatgcctaaaatggcattgtggcattgtgtttgtgtcttctctgtttttttttgttgttgttgttgctgtttgttttgtttttttttgtttctgtattggctgttgacaactatcactacaacccatctcaattcaacatgagttctctttggtcttctgtgtgaccctcctcagaaagccctactaagtcatttccagcattatagtcacagtggattcctagcagtttagtcaaatattaacctgggaacttgatcacatagaaatgtagtaaaaacaaaacttctctttgtaagttggttctcgtcagtccttccatccctgcctgggtctgtcttttcatcttcctcatgagcctgcatttccaaacaccgagcaagcctccttgcaatgtctcacagccgatctgtttccagacattaaattatctttaaactggcctaggacactttgtttcccttttgtgattttttaaaaattggattagtctgaacatattcttcatgatcttcttttgcccctctgtcttcgtctcttgctattc

SEQ ID NO: 35539 - DNA, 2300 bp, Homo sapien
cagctataaaattatgctttttaaacaaattatgcagtttgaaaaatctactctgaatcttacttgtggcattgaatactttcggccactctttccttattatattaaatatttactcttgtttgggggatccagtctcacctactttttctaccagaactggtatcagctcatgctctgccttatgcaaattaagaaaatatcataccttttgggtaaattaagccaagaaagttctcctttcttctctttctctctttctttctttctctctttctctttctttctttctctctctctctttctttctttctttctttctttctttctttctttctttctttttctttctgacagggtcttgctctattgcctaggctggagtgcagtggtgcaatctcagctcactgcagccttgaactccagggctcaagcaatcctcctgagtagctgggactataggcatgtgccacaacatcaagctaatttttgcatttttttgtggagacgggatctccctatgttgctaaggctggtcttggattcctgggcttatgcgattctcctgcctcagcctcccaaagtcctgggattacaggcatgagccactgcccctggccattataactattttcattggcttatcaggcacatgataactataataaatcaataaccagaatttttaaataaagaaaggaaggaattgtttcaactcttcctgctacccctctatccctcaaaagggtaggctgaatgttgtcctccaaagatatccatgtcctaatccccagaacctgtaaatatattaccttatatgacaaaagggactttacatgtttaataagttaagaattttgagatgggcagattttcctgaattttgcagatgggccctagtgtaatcacaagggtccttataagagacaggcagaagagtcagaataagagaaaaatacttcaagatgttacactgctggctttaaggtggaggaaaggccaagagccaaaaaatgcagtggtcactacaagctgaaaagaaaaagaaatggattttcccctaaagcctctggagggggcacaaccttgccaataccttgattttggctcagtgaaacccattttggacttctgacctttagaattgtaaataaataaataattttgtgttgtttcaagccatcacagttgtggtaatttactacaacagcaataaaatagaattaaatacagagatctgaggagttgagtaggataagcctactccagcaggttatttcgggagtatggtgagactcactaggatggcggaactcaattaaggaagtctgaagctgataagccagagagggaaggctctcatttcattttataagggttgcgtcacactaggaagatccaatagcaaccacagtctcaaaattaatgattacaaataggacacaattccaagagtcgggagccaagcagaaaatggattagggaagacatggatgatatgaaacaggaaggaggggtacaaggcagcttcctgggaagttgccagggcagtcacagttcacattcattaggctgtgggcaccaaatgcatatggaaaatctagctgacttaactgaactcctgaagaggaatgaacacctcatttattgaggagctactaccaattagaatatgtatttcatttgttcaataaccccatgagtacagtaacacaatccttgctttactaaagcggaagccaattcaaagaggttcagtgacttgtccaagctcagggaaaacactaggaagtgaatatgggtctgactccatcactgatttcaggagccctgccctttcctccacaccatgcccccttgctttcagaaaaaaaggcttgttgactgaatggttgtatgcacagttcaaagcagaaacacacgatgacatcttttgagatactctaacagtgagaacttgaaaatgaagttaaaaattaagcggcaaaaccaagccgaggctttctgagaaagtggggccaaacctgttgccgtctgactgccacgtggctcactatttatccctgtaaaaatctgcaaaagtatttgaaagggaagaagggacagaaaactccctccttttccaagttagccttatagtctagggcttaaaatactggtttaatggtgaaggtaagtgcttttcttctttttgggtagaaggattattactaacttaccaaaggtccattaaggggagggaacagttttaggagaagtcagagaaaagacattaacagcaacataaggatctccatctg

SEQ ID NO: 35540 - DNA, 2300 bp, Homo sapien
cccacatattgtgggagggacctggtgggaggtaattgaatcatgggggcaggtctttccctgagtaatttatactgctgttctcatgatagtcaataagtttcatgagacctgatggttttatagaaaggaatttccctgcacaagctctttgcctgctgccatccatgtaagacctgacttgctcctccttgccttctgctgtggttgtgaggtctccccagacacgtgggactgtaagagcatgaaacattttttcctggtataaattactcagtctcaggtatgtctggatcagcagtgtgaaaatggactaatacagatacttacagttatttcttgattatgtactaaacaaggagtggattattcatatgttttctgggaaagatgtgggcaattcccagaaccaagcgttcctcccctttttagactatatagggtagcttcctgacatcgccatggtatttataaaccactatggagctggtgggaatgccttctaacttgctaacacattataattcgtgtataatgagcaatgagaatgactagaggccactcttgttgccatcttgattttggtgggttttggtcagcttctttactgcaacctgttttatcagcaagatctttatgacctgtgtcttgtgccaactgcctatttcatcctgtgacttacaatgcctaacttcctgggaatgcagcccagtaggtctcagccttattttacctagcccccattcaaaatggagtcattctggtttgaacacctctgacaataggacagatctggaatgagccatgcctgggtacagagtcacatccacaacaatgaaagttgtagatatctgcaaggactcatcgtgggaccaaggattcaggggctcattctttctcctctctctgtgtgctggttgcctcaggagtagaatgtcccatgctatgcatggggtctgcaaccatcatgccagggcatgatgaatcgtaggtggcaaaacaacagaaggctctgtgagcacccaggagggtgcagtgctgaagagtcttctgcttggtataggaagaaaggaacgtgtttcccaatcttgcctttattttgagtagttggaccagagggattgcagctgggccaaactccatgttccattggctatcagggtcagcaggcaggccaggggcccagacaggccagtggctcccagaattcaagtttaatttctcctcccacctgtgtcctgagctccccttactggttcccttggaccactgcatctacttaagccagcatttattatgttgttatcataaatgcctcttacacctgagacttataaatgtgacaagctcttattgtgagatagtaatccatcttttttccccatgaaataataattctaacgggtggtgatagtacttttcctttcattttgaagtggagaagctggagctaagtcattaaggacttgaccctggaccccacagccttttctccacaaagcacaaagcagagtgatggtcccagggatcccacacagctctaagctgggggcactcactgctgggccactagtgactcccattttctatcctggctgaccctcgctattgaagaagatctgagtcctgcagaaggacagcaaggagaaaaacaagacacagaacgggacagagaagaatagaaagctgactcagatgaattttgtgatgccaatgagtcctactgctgttaccacccctttttccaccacacccttcagagcagttatagaaccacaagcaacccataaatagcaaaagaagtaacatcagctaggaaggcttaaggactcccaagggagttggtggcaaaagtagaaagatctcaaatcagagtctgtgaactgaacctctgcaggcttcctgtttttagatactctgtgttggggtcacatgatagtttacagggttattaattggttccttctttttattgctgtaaaagaaggatattttcttcctacgtttccccctcctttaccggagaggcggagtgcaaatgatatgaacaacgtcactagttttctcctaaatcttatgagccccgcctcccacagtagtttcacttctcagtttaatccggtctgagttaacttcctgacccaggaagtggcagcaacagaggggactagcagcgaatatgtaagtgtctgagcagtgaaggttacggaaaaggtccaggctaaggttttctcagtggatatgtgagtgtgtactgatggcaagtggggtggggaatatatttcgtgacagcagggccc

SEQ ID NO: 35541 - DNA, 2300 bp, Homo sapien
gggttcctcggttacccactgggtcctattacccaagtctgggtcagcataccgagactacgggtatatagaacaagtgcaactggcgataatccttctgttggggagaaaaatcttttttttctattcatcttaggttctccatctgtggccctatcaagtagactaacaaaagacagattgacaagacagaaacaaagcatgtgcattgtacaaacacaggggagtactgagatgaatactcaaaagaggatttagaacttgggcttatatagcattttaagaaaagaatacattttttaagtgacaaggaagacgaaaaggactttgagtttctagtgcagtaaattgtgggaaggcaactttttctttccctttttttttttttttttttaaaaaaaaagacttctctggtgctatgtccaggctgataagagtctaaagtctctggtgactaacttttgttcttccccgagtaagaagacaccttcacaatttcatatcctgcttttaggcaaatagggagagggcagaggtgtttgtttgtttttaatctattttttttctcaattgtcttcaactcaaaatacttcttatgccaaagatggcatattctgctacccttcacttactacttacaacccagcctctatcatcataattagaacttctgaccctggggaacatgggcaatagtttgaactcttttatatctcccttaggcagagatggaggcccagccatgcctctgacatctagacacaactgttgcttcatttctcctattctcagaggtgatgttgtaggacttcaacaaatatcagtaaacattaattttttttttccttgaggcacagcatgatcttggcttactgcagctgctgcaggctcaagcaattctcctgccttggcctcacgagtagctgggttacaggcccctaccaccatgcccggctaatttttgtatttttagtagagacagggtttcaccatgttggccaggctggtgttgaactcctgacctcaagtgatccacctgcctcagcctcacatagttctgggattacaggcgtgagccaccatgcctggccatcaatttttatgtcaactctaaattataacatttagcaattttgtgactttttatggtcatcattaatgttgtttatgttttagttgtagtcctgtcattactcactcgggtatggtaatttggtctttttcaaaatgaagttaaggtctatttgctcttctctgaatcataataagaactgccaacagccatttcagcaataactatttactgagattttaaaatatttcaaggtaattggtcctagcagactggaaaataccaaattcttttccagaactgaatcccccatcaaagttcaattttactcataattcccttttcatttgaagcatctcattgtaagccagtcttaacccttctctcacactttgcttggctgtttctcaggtagaactcagtaagtctggtagcctccaggactgccgcttagattattaaacaacatgtcagtggttggaagagtcaatgttattttgatttttctgttttgttttgttttaaatgcagttggcggataattgcagctttctttcattccctacatgagttcaaatggcagcaaacaaactaggagaacgcagaccttctgacttgtgggtacccctactcatcacctgaagacccttggaaatcaaagccctgacccattaaagacggatggagacagcaacatacgatcatcactattatcttgctttgccccagtccaggttaaccatctgtggtatttttagttgctaagtccatatattcaacataaatcaattatatatccactaaaatctcagcactagtctaactactaaggaaatgacagcgaagaaaacagaccaaacgtctgcccttatgggatttatattattttctctgtgctggttaaaccaaggagcttctgctcttttccttagtcacctgggggaggcagaaacaaaggagaatattgataaacctggaaatagggccggagagtatcagagaaggaagccttcgggaaagtaaagatgtggcagccagtattcccgttataaaaggatacaactccggcctcatagtccagaaaaattcccacaagcaggggctgctcatgcagatgaagggaagttgggggagaagtaagtgctacatagcctttctttttgcacagcctgagggtccagaatccagactgaggctcttgcttcatgccagtgcccctctgcacatt

SEQ ID NO: 35542 - DNA, 2300 bp, Homo sapien
ttaattgacttaggagtgttattgaaatctacaaagcatctcaaacatagtaggattacactattactcagaaacattttctatgagacgtctttctcttgattatgctctttgaatcctaaacttgcagcgttctgcagcttttgttttctaaagcctaggtgtactctgccagtcacaaaatggcgtttctccagcactgccgccaggtaccaccagctgggagttgttcctcttgcggagcaggaggtggacttggcccaagagaaactggatagtggttcgcaaggaacataatttagcattgccaagagctaatgcaatcattttgaaaatctcaaaacactgaaaagtggattgtgacctttttaaattcacaagagacaggccacattctatcttttgattggtttaggctattttcttgaacagccatttagaaagcagatctatcatccttcatttgcatggagcgttcccattttatttgaaaccagtttaacccaatagaaaaaagggaggcagaacccattatttaaagtggaaactcctgaatcagataattaggagtatttccttttcaaaagttgcgttttttcagatacctcgcttattacactaagaaaggtttatatctttcacaaagggtttacttacaaaaatcttccaattttgtatacctgtgtttcataactgactagccgtcaaaccaagatgtagagtttccaaccgttattttccaaatttttagaaattacgtgaaatatttgaatgcatgccttctcaataaaatgggacgtaggaagcactggtgcagaagatgggtacaatacttatctgggaccactccattatttggttggcacgttgtttgaacaaaaaggggaaaagctcaggttacttagcatggttcggacttatttgaaaactaccacagcaggagcggaaataagaccgcattacctcactctctgctgtgctgtgctagggggttatccagaataggattgtagaagtggatgtcgatttaatagttttttattctcccattagctgagtctctgattggcaatgtgagatcgttttagcttattgatactttgaaatgcacttaacagccacaaacaagttaaagggttgttaccataaaatcttatccccagggtgtgcttgcatttatcacccgtgtttgctttcacactaagtggacttaactccccagcagaatgcctgtcagggaaccggtttcgtggacccagcatttaacgcctttcgcaggcttgtgaggcccataaatatttgttgaataaaagaatgagttgaccatgtcatggtgcgctgattgcgtgtgctgacatggaacacaggttgtaaaccttaataccaatttggggcatgttgtatggatgaaaagggcattggaaattcctgaagtgcatcccacattggactgtggaaataagttgcaagtgcagaaacgtttccacacttgcagtttgagtattaattgcagcgtttgtgaattctggtgttgtctacgattcattcttgtttgacgtgaaaggtattcgcgagacacatcgctctaaaacattgccagaaaatgtaatagagttgatgacaactggccctaacacggcctaaaactcgcacttttctctccctccgcaactattcaaaacactgtattttacatttcttgcaaattaaaaactaacatctctggcaacggacctctaaaaatttctaataaaactcctcggatgcttgtggcactgcatttgtaaaccgccccctctcaacctactccctaaaaaagagctgctttttgagagagaagcggtaccctctgatgttactgggcggcagtctgcctacaatttccttcacaatgaggcaaccagagcggctttttctgtgtgtttgcttgcgttgaggggagcaggaccataggccctagaggcccccagctgccttctgagactgggcgaaaccctcggcagcgcgcagggggcgctagggcgcgaggggcgggcactgacgggcaccaatcacggcgcagtcccaccctataaataggctgcgttggggcctttttttcgcatcctgcttcgtcaggtttataccactttatttggtgtgctgtgttagtcaccatgtctgaaacagtgcctcccgcccccgccgcttctgctgctcctgagaaacctttagctggcaagaaggcaaagaaacctgctaaggctgcagcagcctccaagaaaaaacccgctggcccttccgtgtcagagctgatcgtg

SEQ ID NO: 35543 - DNA, 2300 bp, Homo sapien
caaactgcaagtgtggaaacgtttctgcacttgcaacttatttccacagtccaatgtgggatgcacttcaggaatttccaatgcccttttcatccatacaacatgccccaaattggtattaaggtttacaacctgtgttccatgtcagcacacgcaatcagcgcaccatgacatggtcaactcattcttttattcaacaaatatttatgggcctcacaagcctgcgaaaggcgttaaatgctgggtccacgaaaccggttccctgacaggcattctgctggggagttaagtccacttagtgtgaaagcaaacacgggtgataaatgcaagcacaccctggggataagattttatggtaacaaccctttaacttgtttgtggctgttaagtgcatttcaaagtatcaataagctaaaacgatctcacattgccaatcagagactcagctaatgggagaataaaaaactattaaatcgacatccacttctacaatcctattctggataaccccctagcacagcacagcagagagtgaggtaatgcggtcttatttccgctcctgctgtggtagttttcaaataagtccgaaccatgctaagtaacctgagcttttcccctttttgttcaaacaacgtgccaaccaaataatggagtggtcccagataagtattgtacccatcttctgcaccagtgcttcctacgtcccattttattgagaaggcatgcattcaaatatttcacgtaatttctaaaaatttggaaaataacggttggaaactctacatcttggtttgacggctagtcagttatgaaacacaggtatacaaaattggaagatttttgtaagtaaaccctttgtgaaagatataaacctttcttagtgtaataagcgaggtatctgaaaaaacgcaacttttgaaaaggaaatactcctaattatctgattcaggagtttccactttaaataatgggttctgcctcccttttttctattgggttaaactggtttcaaataaaatgggaacgctccatgcaaatgaaggatgatagatctgctttctaaatggctgttcaagaaaatagcctaaaccaatcaaaagatagaatgtggcctgtctcttgtgaatttaaaaaggtcacaatccacttttcagtgttttgagattttcaaaatgattgcattagctcttggcaatgctaaattatgttccttgcgaaccactatccagtttctcttgggccaagtccacctcctgctccgcaagaggaacaactcccagctggtggtacctggcggcagtgctggagaaacgccattttgtgactggcagagtacacctaggctttagaaaacaaaagctgcagaacgctgcaagtttaggattcaaagagcataatcaagagaaagacgtctcatagaaaatgtttctgagtaatagtgtaatcctactatgtttgagatgctttgtagatttcaataacactcctaagtcaattaaagcattacaaaggaatccaattcttgtgaaaggtttcagaaattcccgtaaagggtacatttccggagaggaggtgagcagtattccctctttttttttttttttttttttttcctaaagagctgaaggttatacggaattggggaattataatacctttggaatcaatgccttgttttatggaaaataaacacagccttcaggttatgaaaaccagatgtagaagaggacaagtttaaaaaattaaagtccaagccggcgcagtggggctcccctgtaatcccagctactctggatgctgaggcgggaagatcctttgagcccaagtttaagaccagcttggggaacaaagcaaaagtaaaataaaataatagtagtaataaaataccacttaaataatcatctgtagagttggaatagaatatagtagccggtgaaactgcacgattgttgctggcttaaagatagaccaatcagagtgtgtaacgtcatatttagcgtcttctatcatccaatcactgcactttacacactataaatagagcagctcatgggcgtatttgcgctagtgttgggtgttccgctgtgctgtttttccgtcatggctcgcactaagcaaactgctcggaagtctactggtggcaaggcgccacgcaaacagttggccactaaggcagcccgcaaaagcgctccggccaccggcggcgtgaaaaagccccaccgctaccggccgggcaccgtggctctgcgcgagatccgccgttatcagaagtccactgaactgcttattcgtaaactacc

SEQ ID NO: 35544 - DNA, 2300 bp, Homo sapien
tggcaatgctaaattatgttccttgcgaaccactatccagtttctcttgggccaagtccacctcctgctccgcaagaggaacaactcccagctggtggtacctggcggcagtgctggagaaacgccattttgtgactggcagagtacacctaggctttagaaaacaaaagctgcagaacgctgcaagtttaggattcaaagagcataatcaagagaaagacgtctcatagaaaatgtttctgagtaatagtgtaatcctactatgtttgagatgctttgtagatttcaataacactcctaagtcaattaaagcattacaaaggaatccaattcttgtgaaaggtttcagaaattcccgtaaagggtacatttccggagaggaggtgagcagtattccctctttttttttttttttttttttttcctaaagagctgaaggttatacggaattggggaattataatacctttggaatcaatgccttgttttatggaaaataaacacagccttcaggttatgaaaaccagatgtagaagaggacaagtttaaaaaattaaagtccaagccggcgcagtggggctcccctgtaatcccagctactctggatgctgaggcgggaagatcctttgagcccaagtttaagaccagcttggggaacaaagcaaaagtaaaataaaataatagtagtaataaaataccacttaaataatcatctgtagagttggaatagaatatagtagccggtgaaactgcacgattgttgctggcttaaagatagaccaatcagagtgtgtaacgtcatatttagcgtcttctatcatccaatcactgcactttacacactataaatagagcagctcatgggcgtatttgcgctagtgttgggtgttccgctgtgctgtttttccgtcatggctcgcactaagcaaactgctcggaagtctactggtggcaaggcgccacgcaaacagttggccactaaggcagcccgcaaaagcgctccggccaccggcggcgtgaaaaagccccaccgctaccggccgggcaccgtggctctgcgcgagatccgccgttatcagaagtccactgaactgcttattcgtaaactacctttccagcgcctggtgcgcgagattgcgcaggactttaaaacagacctgcgtttccagagctccgctgtgatggctctgcaggaggcgtgcgaggcctacttggtagggctatttgaggacactaacctgtgcgccatccacgccaagcgcgtcactatcatgcccaaggacatccagctcgcccgccgcatccgcggagagagggcgtgattactgtggtctctctgacggtccaagcaaaggctcttttcagagccaccaccttttcaagtaaagtagctgtaagaaaccaatttaagacaaaagggaatgcattgggagcacttttcgttttaatgctactgaaggcttcaaaaccaatcgatttcggccggtcgcggtgactcacgcctgtaattcaagcactttgagaggctgaggcgggcggattaccagaaatcaggagttcgggatcagcctggccaacatggccgaatcccgtctctacgaaaaatacaaaaacacgccgggcgcgacggcgagcgcttgtaatcccagctacactctgaaggctgaggcaggagaaacacttgaacctgagaggcagaggtttcagtgaatcgagatggctctaatgtactccagtctgggcgacagagagattcggttaaaaaaaaagttcgacttaaaataattctggagtcagaatgggtttacatttaattcttaacccagttcctcaaagcctgtagctctgttaagaaaataaaggccattggtcaagcctgcttggtcccaccctcatctccccaccctcccccaatcgctgctcccgccatttcctggggcttggaggaggggttaaaggagcggactgtaggcgtcacatttcccgcctgcgcgcttttcagtctcagtgtccgctggaggtgggggcaggggtaacgtagatatataaagatcggtttcctattctctcacttgctcttggttcacttcttgggaagtcatgtctggacgtggtaagggcgggaagggtttgggtaaggggggtgccaagcgccaccgcaaggtgttgcgtgacaacatccagggcatcaccaagccggccatccggcgtctggcccggcgtggcggtgtgaagcggatctctggtctgatctacgaggagactcgcggggtgctcaaggtgtttttggagaacgtgat

SEQ ID NO: 35545 - DNA, 2300 bp, Homo sapien
tgctttcattctgctaatctgttttatggcaaatgaattatcaggtccagctggagaccctaacagagtagaggtaaaattttgcctccctacaagatagagattgtgtgcattaaatgttgtttgttcccagttgttcagtttgtcaggcctctgagccgaagctaagccatcatatcccctgtgaactgcacgtatgcctctagatggcctgaagtaactgaagaaacacaaaagaagtgaaaatgccctgttcctgccttaactgatgacattaccttgtgaaattccttctcctggctcatcctgactcaaaagctcccccactgagcaccttgtgacccccacccctgccagccagagaacaaccccctttgactgtaattttccactatctacccaaatcttataaaacggacccaccccatctcccttcgctgactcttttcggactcagcccgcctgcacccaggtagaataaacagccttgttgctcacacaaaccctgtttgatggtctcttcacacggacgcgcctgaaacagtttaacagggtttttcctgcccagtcacaacaaagtgatgttatgctgcaggctgaagtttacagctaatgctgttgaagtctaaaatcagttttggtttgttagatttgggtgagatggctaagattctcagagaaagaagtcaagtttggggtgcatttttcagacttaaaaatttagcagtagcccttgcagtttttccaatagaagtgatttaagaatgttttcaggaaatttaaaacaacagtgagaagcgtgtatggagagttgaactacactccagacttggctataggaaagcacgaatgctgctattgtattgcaccttggaaaagagaacaaaggaatattttcggacaattttaacatgtcacatatgaaaagctaaacggaatctgtcaacaccttgtacgttattacaggctgtgattttaaaaaaacaatccttactaatacatacatagttgctgctagcaatatagtgttgggagtaaaaacacgaaaatgagagttcaggacaatatcccaactctgagcagatttttttaagtagtaacatctaaaattaaaccatattatgtaatatttatttcttttccacagtctcttctcatgcctcgttcacattagctaattaaaagtcccctgagtatcatcataacccgatttacagatgaaggcacggttgcaatgagctatcaccctcttctgaatgagacagtacagtgtgaaggatagcaaaactccactcccatcctcttagggctctggctggaccagcaaattaaattaatgtaaaatggattaacaggagaaaggtatatgcatttatttaacacaggttttacgtgacacaggtgctctcataaggtaatgaaagcccaaaaaaagcagttagctacttatataatgaattggacaattagtaaaatgtaaaaatgcgctaaagcaaagggatttaggctagaatatataactgtgtagagaagcgcccagcaagggctagtgcaaggtttgtacagaattctcttggcctcagcctcctatccttgagaagaatgttgctttttttaaactacagtgagaacatctttcatatgagaatttcacctactgcttctaagaaacaggtcagctttcaagaaaacataaggccagagtgatcttttcacgcctgctcttttaagtacctttgaatagtcaatatgtcttcaagcacttgaaagacttaaaaagtttaccactccggcatattagtgaaagcccttaatataagcccttattaaaattctcagtcgagggtataaattcagattcaaatagtagtgtcgtaaacgggagggaaaaactaaagggattaaaaagtgaaactattgtgttctccctcgcagtccttaggtcactgcccctcgaggggcggagcaaaaagtgaggcagcaacgcctccttatcctcgctcccgctttcagttctcaataaggtccgatgttcgtgtataaatgctcgtggcttgctttcttttcgcgtacctggtttttgttgtcagctggttagacatgtctggtcgcggcaaaggcggtaaaggtttgggtaagggaggtgccaagcgtcaccgaaaagtgctgcgggataacatccaaggcatcaccaaaccggccattcggcgccttgctaggcgtggtggggttaagcgaatttccggtttgatttatgaggagactcgtggcgttctcaaggtgtttctggagaacgtgat

SEQ ID NO: 35546 - DNA, 2300 bp, Homo sapien
gcactaccaagcccggcttttttttttctttttctcccccgtttcttttttggttattttactggagacagggtttctccatgttgtccacgctggtctcgaacgcctgacccgccgtcctcggcctcccaaagtgctggtattacgggcatgagccactgcgcccgatttgaaggacctcttaaatatctatttagaaattggtcggagtccactcctttccaaaaacatgagtcacaatccgggaaaagcacgagcggctgaaagtcaaaataaccagaacaaaacctccactcatgcttaaaaaaggtattttgacaaaatcctaattcggccaattattattagtattcaagtcgaaggctcgtcaagccagactggggattgggtcaaacataaaccttacaccagacggaaggattacatgcaaatgaaggatgcagattctgatttcccattgggtatttgacattagccaatgggagaattcctcacagcctacctccagtcagtataaatacttctctgccttgcgttctaatgtagtttcattacattttcttgtggcgattttcccttatcagaagtagttatgtctggtcgcggcaaacaaggcggtaaagctcgcgccaaggctaagactcggtcttctcgtgcaggtttgcagtttcctgtgggccgagtgcaccgcctgctccgcaaaggcaactactccgagcgcgtcggggctggcgcgccggtgtatctcgcggcggtgcttgagtacctgaccgccgagatcctggagctggcgggcaatgcggcccgcgacaacaagaagacccgcatcatcccgcgccacctgcaattggccatccgcaatgacgaggagcttaataaactcttggggcgtgtgaccatcgcgcagggtggcgttttgcctaatattcaggcggtgctgctgcctaagaaaactgagagccatcataaggccaagggaaagtgaagagttaacgcttcatgcactgctgtttttctgtcagcagacaaaatcagcctaacagcaaaggctcttttcagagccacctacgacttccattaaatgagctgttgtgctttggattatgccgcccataaagatgtttttgaggtgtttttaatggctttgagtgtggcacttttagtaatttgtcctgcagaaattagatccatagaaacctcaggaattctaggtatgtgggagaagtgccatgcagcacaaaacatgtttacaggggtgattcgcgttaagtttcacacacagcagttactacattttagaggaaggaaattatacccatgagtgcattcctaactatcttgaatggaagtgttaaaacccgcatgccccacacaagtttgaatatgtcataccatttgctgtagcaattaatggcatacacaattgagagcacacacattaccactgaacatttgagtatgtatttcccaaaatgagcttttttccagtttggggatgttttgctttgttttggggtggagtctccctctcgcccaagctgcagtgcagcggcgtgataacagctcactgtaacctcgaactcgggctcaagcgatcctcttgacagccttctgagtagctgggattacaggcgagagccgccacgcccggctaagagcatttttctaattgcccacacttcttatgcgacacccagaaaaatacaattttaaataaagcgcatatgcaaatttccctaatcgtctccaatattctctgatttcttttttatattttaactagaaacaattggaggtttccgcgttgctttgtgtggttgtaaattttaagacttcaggaaacttttccagtacaagacttgtccacagtggatatagcagctaaggggttaacaaaatgacgtcagagtagctacggtaatgggcaggagcctctcttaatctgcaaccaggcacagagatggaccaatccaagaagggcgcggggatttttgaattttcttgggtccaatagttggtggtctgactctataaaagaagagtagctctttcctttcctccacagacgtctctgcaggcaagcttttctgtggttttgccatggctcgtactaaacagacagctcggaaatccaccggcggtaaagcgccacgcaagcagctggctaccaaggctgctcgcaagagcgcgccggctaccggcggcgtgaaaaagcctcaccgttaccgcccgggcactgtggctctgcgcgagatccgccgctaccaaaagtcgaccgagttgctgattcggaagctgcc

SEQ ID NO: 35547 - DNA, 2300 bp, Homo sapien
gagctagtgtacttggtaactgccttagtgccctcggacacagcatgcttagccagctccccaggcagcagcaggcgcacagccgtctgaatctccctggaggtgatggtcgagcgcttattgtagtgagccaggcgagaagcctcgcccgcgatgcgctcgaagatgtcgttgacgaaggaattcatgatccccatggccttggatgagatgccggtgtcggggtggacctgcttcagaaccttgtacacatagatagaatagctctccttgcggctgcgcttacgcttcttaccatccttcttctgcgccttagtgatagccttcttagaaccctttttaggggctggagcagacttagagggttcaggcattgctattcctaaacagaatagaaaagctactaacactctccactacagagtagtacagagaacagttcagagcccatgtatttatagtcctgagattcaaatgacggtttaagattcctcacttctgattggacaaaagaaacacggtttcactgaggggtggggtttatgcaaatatggaatttatgttatctttttctattggataaagcaccaaacataattgaccaataggatagcttcctattgcagccttgcagtttgtataaaaggatttgttcaggcgccattccagcttgcttgtctttcacagttttccgctgctttcataggtcgctatttgcggacgtggaaaatggagctaaagcaaaaacttgttcgtcgctaccgggcttgcagttcccaatagggcagagtccgtcatctttttcgaaagggcaattattttgagccggtcggagccggtgcgccagtgtacttacaatacctggccgccgagatcttagaactggtgggcagcgccatacgtgacaagacccgcagcatcatcccccgccacctgcagctggccatccgaaacgacgaggaggtcaacaagcagctgggcaacgtcactattgctcagggaggcgtcctgtccaatattcaggccgtcctgttgccaaaataacagagccacgataaggccaaggtcaagtaaacactcaaatcagaaaacgtagcttacacttgaaacggcatttttcagagccgtccatagttacacaagaaaggatgataacttgcttctgttagggtattttttgcttttcgtttggattggtttgttttgagacagtctagttctgtcacccaggctggagtgcagcggcgcgatatcggcttactgcaacctccaccccgccgcttcacgcggttctcatgcctcagcctcctgtgtacttgggattacaggcgtctgctaccgcgcccagctagtttttgtatttttatgcgagacggggtttcaccattttagccagggttgtcttgaactcctggcctctagtgatcgtcccatctcgccctcccaaaatgctgggattacaggcgtgagccaccgcccccctagcctaatggtgttaaaaagttaagtttcgagaaaataacaccttcctttagaaagtacattttagagtatacaaagtgaaacttaaggccaaccaaaataagacattttgagaacaggcagggtgggaatgtgacttggacttagaaaacaaagggcaaggaaacttgctgttcgccagtaacaaaatagcatggaatctcattctctgaatataagcgttatttcccgacatgagtctgaacgtttctggtggtttagtgagtgttcaccagcattgataacttgcgagactgtcaggaatgcagaatttcaagtcccactcaaacttactgaatcggaatttacattttaaaaatccttagataccttgttatacactctgttctttgggactggatgaactagaattttagacaatttgtcgctgcagataactgaaacgaaaaggacaggatgggcggtggggcaactcatccaataagattgtctagtaatgaaccaatcagtctggtcactcttcagccaatgattttatcgcgcgggacttttgaaatattacaggaccaatcagaatgtttctcactatatttaaaggccacttgctctcagttcactacacttttgtgtgtgctctcattgcaaatggctcgtacgaagcaaacagctcgcaagtctaccggcggcaaagctccgcgcaagcagcttgctactaaagcagcccgtaagagcgctccggccaccggtggcgtgaagaaacctcatcgctaccgcccgggcaccgtggccttgcgcgaaatccgtcgctaccagaagtc

SEQ ID NO: 35548 - DNA, 2300 bp, Homo sapien
gtgagccaccaagcctggcctaagtgacatgttcttatattgttcctttctttctttttttttcgactgagtctcaccctgttgcacaggctggagtgcagtggcgtcatttcggctcattgcaacctctgcttcccgggttcaagcgattcccttgcctcagcctcctgagtgccaccacccccagctaatttttgtacttttagtagagatggtgtttcaccatgtcggctaggctgatctcaaactcctggcctcaggtgatccgcccccgagtctcccaaagtgctaggattacaggcgtgggccacggggcccagccttatattatttcttttactacaatatattagtatgatgcaggtgcttcaattgtttatacactttccataattttgtataattcttataccctgtcactctgaggaatagccggtctaagtgtttttccaccactgctaattcatccatcactaatctcattagactgttaattcccagaggacataagcacacaagcagacaatgtttacaaatgttggacaaatgttatttaataaaacaatggggtcacccttagtctaaaagatgtttcacttttcatttgtcattgaactcttatttgtaggttcccttttgactttcccacaatctaaggctgttctctttaacacatattttcatgaaaacatatatttgagcagaaattgttggggagttgtaatattacctttgtccctaaatatgaatctataattatatcaaatatatgggcagacaatttactttgcctttaatctcaagaaaaaaatagcaattacttggggtcggagagtaaaataagaagtagtgaaccttaaagtagcaaactttagaacagaatagtttcagaggggatgagaagaggtgatttttcagctcatcaacaacagatcttataataaattacatgttctggtacttttcttgtctttctgtgttaaattttgctatttaaaaaaataaatttcaaatacattgttcatcttaaaagtcaagagtgtgttttattaaagtcagttgctttatttgcaactcaaaagatatatttgagttcccaactggagattgtcctatatggtaacttgcgtaaggtatggttactgaaagtaacctacaattttcatgggctgaaattcatttctatattgcagcgtacaaaaataaataaataaaaaatgcttgttttctttgaaaacatattatctcagtgcctctaactgccaaatctattggcttttttgcaggcttaagggctctcccttgttcctttatgatctctatcttgagggccagacctcctgccttacacaactcagagggggacctcagagctctttaaaaagagcccaatttctcgcctgtagagaagtgaaaaggatgccccacccccatctatgaaaagagggatttgatagtttcaatgtcttcaaatcaaagatttaagtctgtagccccccaccaccccggaccctagcaaggctcatgaaccccctcccatcccgccctaattgctttggactggccgtggaatccttgtcccagtccacagttcctgtgcgactgcacgaagaattcacagaggacctgtgttacttcccttgtgaagaaacagaattatcatgaaaatttaggtggaaaccatttcgcttttttcttcaaaaataagggaagcatgtgcccaaccacccctgggaaaaagaaccttcaggggcaaaggagcgaacaggtaatttataagaaaaacagaaagtggtctctgactgccccagacttccttcggagttgggggaattggggacgcctggacgcgttgtttttgtgtttgtggaaaaaataaatgaagagcatgaagcccgaggcttctgagatcctttcctgaccaaacccaagtgatttggtgcggggaattttaatatttttccccttttgtgaggtggaacaaacacaacttgggagcagcgcagcggctcagagcctgccagccaggcgggcgaccagagcaccaatcagagcgcgcctgcgctctatatatacagcggccctgcccaggcgctgcttcatcggcgctttgccacttgtacccgagtttttgattctcaacatgtccgagactgctcctgccgctcccgctgccgcgcctcctgcggagaaggcccctgtaaagaagaaggcggccaaaaaggctgggggtacgcctcgtaaggcgtctggtcccccggtgtcagagctcatcaccaaggctgtggccgcctctaaag

SEQ ID NO: 35549 - DNA, 2300 bp, Homo sapien
actaaatgttccaaatagaaagaaagtagattaaagattgtctagggctgggaggggaggaggaggagaatggaggaatctgggaggcgatgaattaagggtactgaattaggggaacatggtttctttttggggagatagaaatgtaaaattttggtaatggttgcacatctctgtaaatatactaaaatccattaatttttgcattttattttatttattttatttttgagacggagtttcgctcttgttgcccaggctggagtgcaatggcatgatctcggctcaccacaacctccgcctcccaggttcaagcgattctcctgtctcagcttcccgagtagctggaattacaggtgcatgccaccacacccagctaattttttttttttgagatgaagtcttgctcttgtctcccatgctggagtgtgatggcacgatcttagctcactgcaacctacgcctcccgggttcaagcgattctcctgcctcagcctctaatgtagctgggattacagttgcctgctatcacgcccggctaatttttgtatttttagtaaagacggggtttcaccatgttggccaggctggtctcgaacccctgatctcaggtgatctgccttcctcggccgcccaaagtgctgggattacaagcgtgagccactgagccgggccaatttttgcattttacatagatgaattatatggtatgctaattatatcttaccaaaaattgaaaaaaaggaatagtactatcagccccaatgtgcccatcatcaatattctacatgtttccaatgttattgtatctgtttgcctacagtcgaggccctgatatcctgtttgattttcttgaattgccaaaatttgcatacatgcttacaaaaataatgcctgttgaatttgctagatatgtaaaggtttggagcaaatcaggtgtattaaatttattaatattgtttgaaatgtctaaggcaataattcccaaacttcgttgagggagaaggaaagcttttaaaatcccattgcccaggtggcatcccatactgttactgggaattatgcattgggatggatcctttaaccgaggagattattatagccggagctctgaaccagcaatctcagttcttgtgatagtgagcaaagaactacaaactaacaccaaaatgcaagcttaaagcaaagtttattgaagcacaataatacactctgagggacagcgggcttatttctgcgaagtgaactcagcacttctttacagagctcaaggtgcttttatggggtttgtggggaggagttgaggtttgggctgtatctgagtgacaggatgatgttatttgattgaagtgtatagctatacaatctaaaattaaactgtgcatggtcttacctataatttgttaagaaaagcctcccagggatgggggggcaaaactgtatgtaaattctattataatgatggcatgatgaacttggggtgaacttgaagacaggcttttgtgttgttgggcatgtgccaccttagggaatttccacctgtaccctcctttctctttctccaggatattttggccacagactttatcataaactccatcccttagggtggcattagggtagtcttgggcctgaatttaggtgggccagtggctgtcttagtgacagcctttccgctctcttctgtcatcccctcccaactgctaatgtctaactacctaacaattacccattaaatcagtgtgtctggggttaggagcaggcctcaatatgtttaatcattctccagataatcccaatactgtaaagtttgtgaaacacttgtcagataattcaattatgaaggctgtggaaggtgtttcagtaggatctaattggttaatgttatgacttaattaatttgaatcaaaaaacaaaatgaaaaagctttatatttctaagtcaaataagacataagttggtctaaggttgagataaaatttttaaatgtatgattgaattttgaaaatcataaatatttaaatatctaaagttcagatcagaacattgcgaagctactttccccaatcaacaacaccccttcaggatttaaaaaccaagggggacactggatcacctagtgtttcacaagcaggtaccttctgctgtaggagagagagaactaaagttctgaaagacctgttgcttttcaccaggaagttttactgggcatctcctgagcctaggcaatagctgtagggtgacttctggagccatccccgtttccccgccccccaaaagaagcggagatttaacgggga

SEQ ID NO: 35550 - DNA, 2300 bp, Homo sapien
acttgctatgttgcccaaaatggtcttgaactcctgagctcaagcgattctcccaactcagcctcctgaagtgctgggattacagccgtgagccactgcattaacctctgattaatatcatagattaacctctgattaatatcatagatttatttgtttgaatgcttcatgtatcctctcaaccacaacttgtttgcagagttttaatctgaagggcttaggtctcttgttcaatgaatgagtttgatctgatgggtgagaggaaggtgaaatggaaagcgaacgagaagccatacagattaggcgagtgagcctaatctctccctaaccataagattgagtatgcctgaattcttcgcagagtggaagaatccattttaaatatatatatctacatgtacagatcctttaaatatttgttctgacattcattgtttttgagtcactgtcattgagaaaagtttagaaaggagatattaggagcaggaaatagaaagtaaataaaatatcaaaataaaaatggggttttataaatgatataataggcaaaataaaggaaaggcatcctagacctctggttaaaatgaagatggcacttggcgagatgtgttccagggtagttcacatgatgtatgttttcagagaattgtcatattgcatatgctgctatattttttattttcatgaattaaaaggcatgttgagatttcagagttttacttatgatctcagactctgcattttttctctgtaatgtttgacatttcttcctagctaagtctctagttataaggtctgtgttgtggcatgtggacagtgagtggaagaacctaagaactcaatttggggcagaagaatgtaatcaattatttcagaagtgatacaaacaatatgacatgtagagcattctggcctttcctgggtcttttttctccattcctggatttcttctcttcatgtgagcaagtctgaggttactatataatgtctctcacaggccacagccccattctaaatattcccaatagaaattcatttattaaccagagagtggtgggtggggttgtttttgttttttaaacaaaagtggatcttatgggcattctggaaagctcccgcaggaagctaagaataaaattttgaattgagaagtccctttcttcaaaccacattcagacccaattctgctattctatttatttttcaaggggattagccttattttaacaccaataatcttatcacaaaaacctcccagaggaagaccctgtagattttgtaatgaccttaatcaagtattagccctacacttcaattaatccccaactgtacaaaacgaatgttcttttctctaaagctgtagcaagttgaaaggggattaaaaacggagggaagggaagagtgtttggaatttcaggcacagcaaacaggcacagcagaccaggaagagcgtcccgggaaaacatattatccagacttaagtttatattccctgtctctctcagacttttgcagaaaaatgagtcattcaacaaatatttgaatcgagatagggaaagtgacgaggaagaagtttgcacttatgaggttttaatttgcaattatttggctacctttttgccttcccaaaacatagggtctttaggagtgaaacttcatagccaaacttataccttgtccagcacagagaaggccatcaaaatgcctggtttaaataaaaatattaaaatgattgggagggtaaatcccttgacctataaatctgacctcctttaaacattatttgtatgttccccaataaactattccgtaatttattagttagcaagtggaaataaaaagaaatgtggaatggggctatgcttagcgtcattaagctgacaggaatacagcgcattcaacttgcaaacacccttccactcccacaaagagcaagctgtcactggccaatcaaaacaatgaaccataatgaaacagtttttcttgctccacccacttggtgaccaaatttgaaaaaaaaaaaaaaccgcgccaactcatgttgttttcaatcaggtccgccaagtttgtatttaaggaactgtttcagttcataccttccactgcgataggaatcatgtctggtcgcggcaaaggcggaaaaggcttggggaagggtggtgctaagcgccatcgtaaggtgctccgggataacatccagggcattacaaaaccggctattcgccgtttggctcggcgcggtggcgtcaagcgcatttccggtcttatctatgaggagactcgaggtgtgcttaaggttt

SEQ ID NO: 35551 - DNA, 2300 bp, Homo sapien
actagcctcagcctcccaaatttatgggattataggcatgagccaccctacctggcctgttccctgaatttttttttctttcaggtgtttgtgcatatgtgtgtgtgtatgggtataacagagagacagagagaaagaaacttttctatctcactttgcaatcagaagtttgaagtcttatcttttggcttttgtttcagaaatatttcaaatgtagactctctcctttaccacactgtccccttaggcaaggtctttgccattcttctgagactattgcaacagactcccaacttctgactgtgggcccttctcaaaaatgattgtttatgcaataaatctaaacccaagacaactacaacaatacaacaaattctctgcttaaaaacttccaatgtctgccgggcgcggcggctcacgcatgtattcccagcactttggaggcagaggcgggcagatcacttgaggtggggagttcgagactagcctggccaacatgatgaaaccccatctctactaaaaatacaaaaaattagccaggcatggtggtgggcgcctataatcccagctaattgggaggctgaggcaggagaattgcctgaacctgggaggtggaggttgcactgagccaagatcacaccattgcactccagcctgggcaacaagagcaaaactctgtctcaaaccaaaccaaaacaaaacttctaatatctaccaaatgtttcacacaagtatttggggatcttcacaaatggcccttatggagttttcctttgctgagaccctatgctctggccacactaaactcattcagcatcccagaaaggcctcagcctttgtgagcaagctcttatctccaggcctctcacaaagacctgttccagtagaagctcaggggagcacactggacattattccaacaaccctttccccacagctatgcagccaaatctgccagctcagttaattaattaagcaattcagagatgagggtctgcccaggctggagtgcagtagctgcgacctcaagctcctgggctctaagtgatcctcttcagtctacccagaagctgggactgcaggcatgtgccaccacacccagctaatttttttttttttcagtagggaccaggccaacctagtcttgaactcctggcctccagccttccgaagtgctgtaattacaggcatgaatcactgcgcccagccaacccgcccagtcttgttagacatggggtctgtagtttctagtaggttcttgagtctagggttcctacctcatgttttatagttaatttaggggagggactgtgtctgtttatctggggatgtaggggtgggcagggggatagaggggacttcaattaatgaaaccagaagcaaaactcagttgaggacaccggtcatgagagtggcctgattatggccaatcttacataatgtgtgagatcttgatattaccccatccttgagagtcctctataaagctacagggacttgggagcacctttaattacagacaacccatgttcctgtggattatgatttattagattgcacatgcctaaataaagacatcctctgcagtcttttgacaattctataagcatcttctgactccgcaattagacagctaagagatctgtgttacttccctcacatatataaataattttaaataaaaatcatggcgtgaataatttctttcctctaccgatttgaagctatccatttggaagaccactctgaagagatgaaataagtcttctgccaaagattacttattaatttacaaggaaaaggggaagttttgttcctctccgtgaatttgattgaaaatcgagggctttctcgaatagttttggcatccagggtcatttttcattaaaaagagaaaagtcatgtcaaatatgaatttccgcagattattcagcactagaccctgggagattctgtaaagaggggttttgttatactcaacttttccgggtaaaacaaacacaaatactcctcctccaaggggcgggggcggtgcctaggtgatgcaccaatcacagcgcgccctaccctatataaggccccgaggccgcccgggtgtttcatgcttttcgctggttattacatcttgcgtttctctgttgttatgtctgaaaccgtgcctgcagcttctgccagtgctggtgtagccgctatggagaaacttccaaccaagaagcgagggaggaagccggctggcttgataagtgcaagtcgcaaagtgccgaacctctctgtgtccaagttgatcaccgaggcccttt

SEQ ID NO: 35552 - DNA, 2300 bp, Homo sapien
cttcgtctcaaaaaaaaaaaaaaaaaagaaaaaaaaatttacttgtgagggactctggaaatttcatttctcatcagaatttctcagataagttatctaggcaaggcagcctgtgattgcacagcagtgttcaagtataaggccttgtctggcaccaaagacaggccttagtttatttcccaggtgtgaaagaaattgcagatttaagatcacacagtccttatgttaaataactgtaacctaaattacatggtatttaagtttgtaaaaatctgctttaacactaattttatttattgtatattcccggtttttaatggagaaagcaaacttctaggtgctaaaaacgtgttctagacttgaataaaaagataggtagactacgtctaacccttcatcttaaaatctttacctggaaaagaccatgagtaaaatacttaagggaatgtggaatttcccaggccacaaagcggcctgcagttgtctaggaagggagagtcctctaggagatacagtgtatgtgctaagtttaatgacgtctcctcttcattctcccccacccagcgcctagtccttactggccttcagttcagtgttcgaaggcttgtcaatttacccagcagttaagagttggcttctcctaaagcaactttcaaacttgtctgcatgttacaagccccctacggagattttaagtttcaatcaggcaacacaccatttatggctgactgagcactgggattcaagcaaaatttgatttgatttgaatcttgaataaaccagttgaatagaataagatgtatgaagcaacatctggcgcagtgcttacatctttagttctgtactgccttagtgttgttatcaaaactgacgcatattaggttaaaagactattaccggggcagttggaaacccaggagacacacccttcagtatactacgaaggtgtgcgccacgaaaacagagggggagtccttccttaggcagttactgcccaggttcccactccggtccgctatgtaaatcagagtctcaaaacagctttccctcgattggttaatatttaaaatgacaggacagcctattggctagaagctggtggcgaaattatgacattacggcaaccgttgatcctggcgacgtagacagggacagacagctgggtctgaaacctaagcgagcctgcggtttcttccgggaacgccgagttagcaaaatggccgcttgtctccattttaaatttaagcacaacgaattgaccccaaagccatttttaatggctggcttctttcgggttcaggaccctttgtccctctctaagctgcaacacttgtccccacccctctccagttcctatattctaatacccctccgccgccaaataaaatttggcgtctggccacagctcttttagtgggtatctgggtggctcttaaaagagcctttggggttaggtgttaagacgcttacttggaatgtttacttggagctggtgtacttggtgacggccttggtgccctccgacacggcgtgcttggccagctctccgggaagcagcaggcgcacggccgtctggatctccctggaggtgatggtcgagcgcttgttgtaatgcgccaggcgggaagcctcgcccgcgatgcgctcaaatatgtcgttaacgaaagaattcatgatgcccatggccttggaagagatgccagtgtcgggatggacctgtttcagcaccttgtacacgtacacagagtaactctccttgcggctgcgcttgcgcttcttgccatctttcttctgcgctttggtcactgccttcttggagcccttcttcggggcgggagcagacttggctggctcaggcatcttaaaacaccagaaatgtgtcgaaagtaaagagcggatttctgctacttatagggcttttatgctaatgagggatggagagtacctcttagttaattggaagacaaactgcacagttgtcatccgtgggcagagctatgcaaatgaggtatgaaagtacagcttttctattggctatctgactagcatttgctaccgaccaatcaaaaagtcggatttactccccaggaactacctataaaagcggccatgttttacatatttcttgattttgtttgttttctcgtgagcttaggccgctggttttggtgatttttgtctgattgcaatgtctggacgtggtaagcaaggaggcaaagctcgcgccaaagcgaaatcccgctcttctcgcgctggtctccagttcccggtgggccgagtgcaccgcctgctccgtaaag

SEQ ID NO: 35553 - DNA, 2300 bp, Homo sapien
tggctcacgcctgtaatcccagcactttggtaggcagaggctggcggatcacctgaggtcaggagttcgagaccagcccggctaacctggtgaaactccgtttctactggtggcgggcgcttgtaatcccatctactagggaggctgaggccggagagtcgtctgaacccgggaggcggagtttgtatgcagtgagccgagatcgcgccactgcattccagcttgggcaacaggagcaaaactccgtttcaaaaaagcaagcaaacaaacaaaaaaatgcagaaaccgagatccggaagaaaacctcggcgagattcacagaatccaggaaaataggtctctagaaatttgtccatggtcccagatctccatttcttgtgggtggggcagctgttaccagatccctagaagcaaaggtttttttgggggaccgtgtctcactgttgcccaggctggagggcagtggcacgatctcggcttactacaacctccgcctcccaggctcaagcgactctcctgcgtcagcttcaagagtagctgggattacaaggtatgtgccaccacgcccaacttatttttttatttattatttttatttagtagagaggtgtttcaccatgttggccaggttagtgtcgaagtcgtgacctcaggtgatcagccccctcggcctcccaaagtggtaggattagaggggtgagcagaaagcaaaggtttttgagtggccacaggccccactctatttccttttctgcctgtaatggcaacctagacgcttgagcttcttaaaatacaagagtaagttgcatgtcaggcaccgttctacattagggacattagtctgttttacagacacctttcaactccctggttaacttttaggtaatatactctgcactttagcaggaatgggacctataactctcacagaattaggaaagtgaggctgcctacagcctaaattgagaaaaaaatagacgggggactagtcggaggaccaaacaaggttaccaacacgttagagttttgccttcaatttacatttttaaagtaatcacaacgaagtgtttagatcacgaggcatccctgcatgtaaactgttaggcactaactatggtcgatcttacaaagcattaactagaatatttctttagagtatgatagtacgtaactgacctactattacatacaaacagaccaacctttagtaacagcgctccccaaaaaccgaaaagcagtaatacgctttgctcaaggttggcataaaattaacttaccttagtgccttttttccttctacctacaagcagtgaggttagctcttcctttgaaacggtaggggggctctgaaaagagcctttgggtttgatagcgtttccgggagctcagatacctgtcaaatcacttgcccttggccttgtggtgactctcggtcttcttaggcagaagcacggcctggatgttaggaaggacgccgccctgagcaatggtcacccggcctagcagtttgttgagctcctcgtcgttgcggatggccagctgcaagtggcgcgggatgatgcgagtcttcttgttgtcgcgagccgcgttgccggccagctccaggatctcggcggtcaggtactctaacaccgccgccaggtacaccggcgcgcctgccccaacccgctctgcgtagttgcctttacggagcaggcggtgcactcggcccaccgggaactggagaccagcgcgagaagagcgggatttcgctttggcgcgagctttgcctccttgcttaccacgtccagacattgcaatcagacaaaaatcaccaaaaccagcggcctaagctcacgagaaaacaaacaaaatcaagaaatatgtaaaacatggccgcttttataggtagttcctggggagtaaatccgactttttgattggtcggtagcaaatgctagtcagatagccaatagaaaagctgtactttcatacctcatttgcatagctctgcccacggatgacaactgtgcagtttgtcttccaattaactaagaggtactctccatccctcattagcataaaagccctataagtagcagaaatccgctctttactttcgacacatttctggtgttttaagatgcctgagccagccaagtctgctcccgccccgaagaagggctccaagaaggcagtgaccaaagcgcagaagaaagatggcaagaagcgcaagcgcagccgcaaggagagttactctgtgtacgtgtacaaggtgctgaaacaggtccatcccgacactggcatctcttccaaggcca

SEQ ID NO: 35554 - DNA, 2300 bp, Homo sapien
cattctggaatcaaatgcccatataatcagtttccctagtctgttttggagatttatccatctccctttttatttcaataaataccaaagggcatatttatttttgcactgatgtgcaataattagattgaaaatacacatcaagatattaaaaacattgataatttacatcacttttataacaaattcaacattaaacagtactgttttgatacatttcactcgtgttatatcaaaattctatattctccttatttcagtagcagaatttgtgtctggagattttgggcaatgaaattaaaatttaaaatgatatccaacgccatattacaatcaaccacgtccacagaacagtatcatatcaccttatagcactgggcaaaattttattttgtttccatgataagtggcttgtagttccacccatactgttccagccatatcgtttttcagaaaaaattctttttttttttttttttgagacggagtcttgctctttcgcctaggcctgactgcagtggcactatctaggctcactgcaagctccgcctcccgggttcacgccattctcctgcctcagtctcccgagtagctgggactgcaggcgcccgccaccgcacccggctaattttttgtacttttagtagatacagggtttcaccgtgttagccaggatggtcttgatctcctgacctcgtgatccgcccgtctcggcctcccaaagtgctgggattacaggcgtgagccaccgcgcccggaccagaaataattcttttggttgggctttcattgccagcttacatacactcttcttgattgggcaactacctaaagaaattcactcagacattgttcaaaggatgttttcagagggcaatgatttataatagcttagatagactctcaaagctctacttctgagatcgaaatttgaacttgtcgtttaatcactacatgtcacttatttttctttctattgagctctgggaagcattggaatacaatcttcagggggattgaaaccatacgtggtgagtggactagtcattcctcaactattcagtaataataggggctgggtttcactaataatgggagtagatgtttcaatctacgtttcttatttattttgccttatcatcaatgcttgaatttcagctctaagctactttattgcaatttggttctgaagcatatgccaaaagcactcagcaaggctgcagacaaatgctttaaagtaaagtgcacctccacttccagtgactttatgaacatcacatttgaaaattaatcctttttcatctctgtaccctgagtacattttggacttcccttcgttcccaaataccctgaattcaaggtatctcaatccatggagcaattgtccagaggaagagagaagcaacagccccgcccccaacccttgggagcagaaagggaaagaattatccaaagaattgtttaaaaactcagatgtagcggacagatgtaaaaccatggctgtatagattgatgtcccaggggtccaaaacttaatctcaaatgggcaataatttgtttggcattaaactaaaccagtttgatgaactcaaatgccctcggctcaataggcaggactctccgaggagcctgtgttacttccctcacttaagtgcagatttgtaataaaaatcttaatgccagtggcatgctttttggatatataagaagctaaccacttggagtatcatatttgagaggtcagaaaagtccacagttaaagatcggtttataatttacgaagaaaatagaaagttttgtttctctgagttgaaatttgccaagcacggcgggaaatattgcaagtttttggcacaaggctttgtgcttcccttataatttgagatctgcgtgaagcctgagggttcggggatcattatctgagaaaaaccgggcagttcggtgtagacaatttttatatttttggctttttttgaggtgtaacaaacacaactcgggatccgagaggacactctgcggctgccagcgaggcgggctggacagcgcaccaatcacggcgcagctccgccctatataaacgggcgggcgcagcgccgcggctcgagtcccggccagtgcctctgcttccggctcgaattgctctcgctcacgcttgccttcaacatgtccgagactgcgcctgccgcgcccgctgctccggcccctgccgagaagactcccgtgaagaagaaggcccgcaagtctgcaggtgcggccaagcgcaaagcgtctgggcccccggtgtccgagctcattactaa

SEQ ID NO: 35555 - DNA, 2300 bp, Homo sapien
gttttgtttctctgagttgaaatttgccaagcacggcgggaaatattgcaagtttttggcacaaggctttgtgcttcccttataatttgagatctgcgtgaagcctgagggttcggggatcattatctgagaaaaaccgggcagttcggtgtagacaatttttatatttttggctttttttgaggtgtaacaaacacaactcgggatccgagaggacactctgcggctgccagcgaggcgggctggacagcgcaccaatcacggcgcagctccgccctatataaacgggcgggcgcagcgccgcggctcgagtcccggccagtgcctctgcttccggctcgaattgctctcgctcacgcttgccttcaacatgtccgagactgcgcctgccgcgcccgctgctccggcccctgccgagaagactcccgtgaagaagaaggcccgcaagtctgcaggtgcggccaagcgcaaagcgtctgggcccccggtgtccgagctcattactaaagctgttgccgcctccaaggagcgcagcggcgtatctttggccgctctcaagaaagcgctggcagccgctggctatgacgtggagaagaacaacagccgcatcaagctgggtctcaagagcctggtgagcaagggcaccctggtgcagaccaagggcaccggcgcgtcgggttccttcaaactcaacaagaaggcggcctctggggaagccaagcctaaggctaaaaaggcaggcgcggccaaggccaagaagccagcaggagcggcgaagaagcccaagaaggcgacgggggcggccacccccaagaagagcgccaagaagaccccaaagaaggcgaagaagccggctgcagctgctggagccaaaaaagcgaaaagcccgaaaaaggcgaaagcagccaagccaaaaaaggcgcccaagagcccagcgaaggccaaagcagttaaacccaaggcggctaaaccaaagaccgccaagcccaaggcagccaagccaaagaaggcggcagccaagaaaaagtagaaagttcctttggccaactgcttagaagcccaacacaacccaaaggctcttttcagagccacccaccgctctcagtaaaagagctgttgcactattagggggcgtggctcgggaaaacgctgctaagcaggggcgggtctcccgggaacaaagtcggggagaggagtgggattttgtgtgtctccggagctatttttgactaaggcgtcgcgtcgcccaagccggagtgcagtggcgtcatctcgattttgcgttctcgagtgtcggagttgaacccatttgggcctcccttgtgctttgcacttttagcaggccctggcctccagatagcatgggaaaaaaaatgttgggattttcccgggtttctaagctgggtttttccgagttccaaacacggcacagtgtatcagtttctgtgctggttacaagcctactggttatccctatcgagtatggcaggcagtgagggacttcagaggagtacgtcttaggacaagtggcatagtactgacattatttccgaagggctacatttcaagtgcttggggagactactgccacataactgaaaattagaaaccgacactgcagaaaaatacttggtccttaaatgtggcatttggatggattaaggacttgccgaaacgtaaaactgacagacttgggggggggggatgtcccaattagcacggcttctgtatgcaacgagtcccatactttgttaaaggaagaaaggaatgtgagttctcctaatctgttaagtatctttcggtgtaagttctgacaccacaatgttaaaaaagtcggatctcaaaaaccaactgctccaagcgaagtgcacagctgtcttgcctaaagaggcctatttatagtagcctcgggtagtctggtctgggctttctcattgggtacaagtaaaggaacgaaatagccaatgaaaaggtagacttttaagtgtcgtttacattggcatttgtgacgacactctaaaattaatccaatcataaacgaaatctgattaacctcatttgaataccgcatctataaatgaacagggcctcggcgggagtgattattttctcaggtgtttgcaacagtgttctaactattaacgctacgatgcctgaacctaccaagtctgctcctgccccaaagaagggctccaagaaggcggtgactaaggctcagaagaaggacgggaagaagcgcaagcgcagccgcaaggagagctattcagtgtatgtgtacaaggtgctgaagcaggtccatc

SEQ ID NO: 35556 - DNA, 2300 bp, Homo sapien
attaaaactttcctccgtccatctttaactgctggtgttttcaaccctttcccctctgtgccatgtttctagcttttatttaaaacgtactttggttttccttggcaaaattgtgtctagctactaggatgacgtgtcttaatttttttttaaatgttggcgctgaaactggctttgatcaacgttttaaaaagacgcgcgctagttgtgattggccaagtgatttctttttaccctcttaagtttagaaaggttaatttcatatcttgatttgtctatttaaacttggagatattttcaataatttgttccaaatgcaccatgactattaactcataagtaacaatatgaaacctgatgttaagctacatgaacacatttaatttcaccacaatatgtcatcctcatatgaaagcactcttatcttttacaagttcaactggtatttgtgtaatctgctgtaaaaaaaaaaaaaaaaaaaagccaaatttataaatggcacaaaaagaccagtgtgcccttttagtcatgctgaacactgtgctaagaagctccacctaagggccgtctggctccaggggatgtaggtttgtattcctattgataattaattagggttagctcagtagagttgaaagtggcttgcaaaaacaaacccaaaaaatacttacaaattacaggttatttcgtatcattaagatgcatacaaaagacaataaaacatttgttctggttctgttgctttaagtcactaactatatttttatgtaaatgtaaacactgacaaacattaacttctctcctgtatgtctcaggccttttaacagctttgcaatcctaacgagccgctgcattgatcgatttaaattacatgtgacataaagtctctttgcattttaattagtttgcttttttgggtttttgtttgttttgagacagtctcgctctgtcgccgaaactggagtgcagtggcgcgatctcgactcactgcaacctccgcctccggggttcaacattttctcctgcctcaacctcttaaatagctgaaattacaggcgcgcgccaccacgcccgacaaatttttttatttttagtaaagacggggcttcacaccatgttggtcaggctgtcctggaactcctgaccctgtgatccgcccaccttggccttccaaagtcctgggattacaggcgtaaggaaccgcgccccgccaatttgcttatgtatttttatggcatctttaaaatggacggttagtttcacgattcagtgttaagaacacccacttataaatggaaaaattattaaagaaaactgcaaaatagctatttacacagaaaatgtgagcccttttaaggaatacatgggtggctctgaaaagagcctttgttaagactgcttccttaaaaagccaatataagagttctcgttttacttgcccttggccttgtggtgactctcagtcttcttggggagcagtacagcctggatgttgggcagaacaccgccctgagcaattgtgactttacccagcaacttgtttagctcctcgtcgttgcggatggccagctgcaggtgtcgggggatgatgcgggtcttcttgttgtcgcgggcggcgttgcccgccagctccaggatctcggcggtcaggtactccaacaccgccgccagatacactggcgcgccggccccgactcgctcggagtagttgcccttgcggagcaagcggtgtacgcggcccacagggaactggagtccggcccgcgaagagcgggtcttagccttagctcgggcctttccgccttgcttgccgcgtccggacattttgaattcttaaaaacgatgttaagcaatgaagacaaaaatgtaaaagtgaattttgttagcaagtgagaaactattatacttggaggtcgaattgtaaataacgctatttgattggctagaacaaccaaccaattgcaaagaaacgctagaatcacctaatttgcataccacagggcacacagagacaattcatccaatcaatgtgtaagcttttaaatgccagtttacgataggagctctacaaatattaccagctgcagagtgaggacacttgcatttctctttaggttgtggacgaagtgtttatttatcatgcctgaacctgctaagtccgctcctgctccaaaaaagggctccaaaaaggcggtgaccaaggcgcagaagaaggatggtaagaagcgcaagcgtagccgcaaggagagctattccgtgtacgtgtacaaggtgctaaagcaggtccaccccgacaccgg

SEQ ID NO: 35557 - DNA, 2300 bp, Homo sapien
gccatttagtatttttagttttcattttcctaggtttttcttgttgctttcattttttcagttgggttttgtttatttgaatgtttatatatgctttgcatgtgctgtgttctgtgtccatttatgtgccggacagggagtgggaagttgaaaaataattatgggacgggtgtggtggctcacgcctgtaatcccagcattttgggagtctgaggatggtggatcacctgaggtcaggagttcgaaaccagcctgaccaacatggtgaaactccgtctctactaaaaatacaaaaaatagccgggcatggtggtgcgcgcctgtagttccagctactcgggaggctgagacgggagaatcgcttgaacccgggagccagaggttgctgtgagccgagattgcgccattgcactctactctgagcaacaatagcgaaactcctcctcaaaaaaaaaaaaaaagtaataatatagaatactattccttttttcttaactgggttgaaattctaagaatcttttatatataatattttaaatatttttaagatacaaaaacattttgtaaaaattttaagtattctacactggatgccattcataacagtttatgatcttaagtaaggcttgtaattaccaagaatacagtaaaacttcagtatctttatatatgagtatatagaatagaaaaattgtatttgtaagtagaatgacataaattattttttcacttaaaaattacaacttttgcttattagaataaaatgaacacatatgaagtcaaccctgaaggaaaaaaagtcaaaaacaactttgaggaagtgacaagaaaatattttaggattaggggtgtgtctcattactcccaaatggtattttgccagtggccaaattttctttaactaaaccaagaacaatgttgattattagtgctgcatccaggctcgggtgttcacattttttcagttttcatgcacattacttgtcttgctttccttatattttaaagaatttgattacattattttaaccagctaaattcgccaatgctgcgatgactaaaccggaattaaggaagacattcctttccctcacactatgtcagtagcaaaagagatatttcaaaagttcttttcttatgaaaccaatttgacaagggacacatcacagcacaacataagaaaaatgtgcttatcagcacaatgggctagccttctaaccagcacttggggtaaaacaaacatgctacggttaagtatagcattttccttcaaccagtcaaaagaactgtggtctagacctacacagcagcaaccccctcaaatgaggataaaaccaaacctgttggtggtaaacacggaaaatatgcaggtaattacaactctatagctgaaaaagtgggtggctcttaaaagagcctttgggattgggtatgaagacgttagaattacttagagctggtgtacttggtgacggccttggtgccctctgacacggcgtgcttagccagctccccgggcagcagcaggcgtacggccgtctggatctccctggaggtgatggtggagcgcttgttgtaatgcgccaggcgggaagcctcgccagcgatgcgctcgaagatatcgttgacgaaggagttcatgatgcccatggccttggatgagatgccggtgtcggggtggacctgctttagcaccttgtacacgtacacggaatagctctccttgcggctacgcttgcgcttcttaccatccttcttctgcgccttggtcaccgcctttttggagcccttttttggagcaggagcggacttagcaggttcaggcatgataaataaacacttcgtccacaacctaaagagaaatgcaagtgtcctcactctgcagctggtaatatttgtagagctcctatcgtaaactggcatttaaaagcttacacattgattggatgaattgtctctgtgtgccctgtggtatgcaaattaggtgattctagcgtttctttgcaattggttggttgttctagccaatcaaatagcgttatttacaattcgacctccaagtataatagtttctcacttgctaacaaaattcacttttacatttttgtcttcattgcttaacatcgtttttaagaattcaaaatgtccggacgcggcaagcaaggcggaaaggcccgagctaaggctaagacccgctcttcgcgggccggactccagttccctgtgggccgcgtacaccgcttgctccgcaagggcaactactccgagcgagtcggggccggcgcgccagtgtatctggc

SEQ ID NO: 35558 - DNA, 2300 bp, Homo sapien
agaggggaagccgacagagatacctacagacggagtgctgtgtcccctggtgctgacaagaaagccaaggctggggctgggtcaacaaccgaattccagtttagaggcagatttggtcgtgggcctggtcagccacctcagtaaaactggagaggattgttttgcattgaataaacttacagccgaaaaaacttaaaaaaaaaaaattcagtaatgtattaactaatgttctattaaattacaattttatatatataatacaaatatgtaaatactattaaaattattatagaagcatgtaaattcttcctaaatatcacagtctcacagagttttgatattgctggcattttaacagcagcaatttacagttcctttttgtttagtttctacatatttgatttcttttcacagtagaagtcctaacatttgcatgcctagcagggcatacaaattaactaacatgtacccagtagccttcgaactgaagactcaaagatacaggggaaatcatacatttttatgcttagattcaacaaagtagggacagctgtgtagaaatatgattggacacaaagggtacgagctaatgctaatagactgagctaatgataatagcccagcaaggcctgtctatattcttggactttcttgggcagcattctctcctcctgggaataggacaagccctctcttgaatcggggtcttatgacctacaatcaaacgaggtaggccaggcaatttctttactgccagtttttacacaaaaaggcagaaggaaagttggattcatattttttaggttttatggctagctttgagtctagctttggtttatatgttccatcttgggaaggaagcagtctagttcctatagctagcttcggggaagaatgggagggagaaagaggaaggtaggagaaggagaaaaagttactacggaggccttcattttgtagcattgttttctgagtcccaacaccttttattttaaaagcctgtaggaagtcgcctatttaataacttggcccattacacgttgccaattctcttgtgataaaggctgctaccagcatcaaagagaacagaaaactaacaatagagaagtaaacattaacacaccagtgagtttctaggtttagatgtgcgagttggctagatatttaaatgataattataaattttaataaacagggaagaaagaaaaataagccaaaaatgtaatacgggcgtccacagcgaggaccagaattcatgggatcaaaaatttttttttcttttctttgagacggagttccgctcttgttgcacaggctggagtgcaatggtgtgatccgggctcaccgcaacctctgcctcctgggttcaaatgattctcctacctcagcctcctaagtagttgggattacaggtatgcgccaccaggcccggctaattttgtattcttagtagagatgcggtttttccgtgttggagactggtattgaactcccgacctcaggtgatccgcccgcctcagcctcccaaagtgctgggattacaggcgtgagccacaacgcccggcgggatcactaattatccgtgtttttctcttcgggaggaaaatccttttggtcagatttcccttggcttggtggtggagagggtgagatcttgcagttttcaaacacttcctaagggggttccgtccccaagagagcaagcagcagaaatgccagaggaaccgtgcctatggggacaaagctgaactcctcatggaaggagattactgcagttccggtcttgtgagccaaagctcctgttcaatcgtcctagagcatcccaagcagcaaatgattttaaacatgttaatgtatttaatctcatttagttgttaaaatatgcctaaatttcctctttgggaacgcaagacttgcagagatgactccatggagagcggactctgccggcgggaactggagtcgttggtgacgtcatcccagtctgatctgtgaagggtagggccagcaggcagcaccaaagttcccgtatgcgcgttttcagtcttcatttaggtccgaattcccggcatataagaatactaccgtcgcttgtttttcagatttttgcggctattttcgttggtgtgttggtcatgtctggtcgcggcaaaggcggaaagggactgggtaaaggaggcgctaagcgtcaccgtaaggtcctgcgagataacatccagggcattaccaagcctgccatccggcgccttgctcgtcgcgggggtgtcaagcgcatttctggtctcatctacgaggagact

SEQ ID NO: 35559 - DNA, 2300 bp, Homo sapien
aaatttgattaatgagtataaactaatggtttctatgtttgagacggagtttcgttcttgttgtccaggctggaatgaaatggcgggatcttggctcactgcaacccccgcctcccggtttcaagcgtttctcctgcctcagtctccgaagtagctggggtaacataggcatgcgccaccacgcccggctaattttgttatttttagtagatacggggtttcaccatgtgggtcaggctgtttttgaactcctgacctcaagtgatccaccagcctcgcctcccaaaatgctgggattacaggcgagagccactgcgcccagccagccaaaactgtaatttttttttttttttttttttttttttttttatgagatggaatctagctctttcgcccaggatggagtgcagtggcgcgatctctgatcactgcaacctccgcctcccgggttcaagtgactctccagcctcagcttccagagtagctgaaactacaggtgagtgccaccacgcccggctaattttgtttgtatttttttagtagagacagggtttcacagtgttagccaggatggtctcgacctcctgacctcgtgatccgcccgtctcggcctcccaaagtgatgggattagaggcgtgagccaccgcgcacggcggaaaacgagattttttagatcaactttacattgccaatgcccatggtattccctccacaacaaactccacaagagtgctcagaaaagtcaaacttgttatcaggtgatctttagggacccaaagactactcttcctaccctttccagtgttgcccaggctggaattgcactagcgtattcacatgttcctgcagtctctagcccgagagtttaagctatcctaccacctcagcctaccgagtaaatgatagtacagacgcaagccgtcacacctggttagcttcatttttttgcagagacgagttctatgttgcccaggcaaatctgttaactcctgagctgaagaaagcctcatgcatcgacctcccaaagtgctaggattacaggatcttgccaacacagaacaggagtatctcctgatcaattttttttgagacgaagcctcgcctttgtcgcccaggctagaatgcaaaagcgccatgtcttttcactgcaacctttgcttgctgggtttaagtgattctcctgcggcagcctcccgagtctctgggatgacacgcgactgccccacgcccggctaatatttgtatttttagtagaaacgagatttaaccacgttagccaaactggtctcgatccgcacgcctcggcctcccaaagtgctgggattacaaaatcggaaaaattattccctagaaaacggtgaaattcaatattaaagctctttatgtgagacttgagtggctctgaaaagagcctttgagttttaaagcacctaagcacacatttacttggagcttgtatacttggtgacagccttggtaccttcggacactgcgtgcttggccagctctccgggaagcagcagacgcacggcggtctggatctccctggaggtaatggtcgagcgcttgttgtagtgggccagacgggaagcctcgcctgcgatgcgttcgaagatgtcgttaacgaaggaattcatgatgcccatggccttggatgagatgccagtatcggggtgaacctgttttagcaccttgtacacatacacggagtagctctccttacgactgcgcttgcgcttcttgccatccttcttctgcgccttggtcacagccttcttggaacccttcttcggagcaggagctgacttagctggttcaggcatgctgtcagaaaacaataacagcagtgagaatgaacgcacttaaataaaagctcgtgtctagagtctctccttttataggcctttcatgcaaataaagaattcaaaatatccagctctgattgggcaatgtgttagtgacgcatacatgtaaaatagccttcaccttatttcctttctaattggttggctcgtcaaagaacaattttaaccaatcaaattgcgcctttcacaattctaccgatgactataactagcttcttattcctccatcgagcccattctttttctttattcagtggattgttagttcttctgctgttaggaagccactatgtctggacgtggaaagcaaggcggcaaagctcgggcaaaagctaaaacgcgttcttccagggccggtcttcagtttccagttggccgtgtgcaccgcctcctccgcaaaggcaactactccgaacgagtcggggccggcgctc

SEQ ID NO: 35560 - DNA, 2300 bp, Homo sapien
tcaatccttccccgcgtaattctcccaagtatctaagatctcagactgagccaccaggccaggctttttcttttcttttcttttttttttttgagacgacggagtctcgctctattgtccaggctggagtgcaatggcatgatcttggctcactgcaacccccgcctcccgggttcaagcgattctcctgcctcagcctcccgagtagctgggatttcaggagcccaccgccatgcctggctaatttttttgtatgtttagtagaaacagggttttgccacgttggccaggctggcctcgaactcctgacctcaagtgatccgcccatctcggcctcccaaagtgctgggattataggcatgagccaccgggcagggcaggctttttactttttgtggaggtgagggggctgtctcgctttattgcccaggctggtcttgatctcctgggctcaagcgattcttctgccttagtctttcaaattgctgggattacaggtctgacctagggcgtcaggccgttactgcttagtttcgtttagtgtttattttagaatactgtgttaattgctccttttgaaaagagaaatccaacaaacacaattctcactagaggaatgtagtctttttttttttttttttttttgagacgtagtcttgctctgttacccaggctggagtgcaatagcgtgatctcggctcactgcagcctctgcctcccggagtcaagcgattctcctgcctcagcctcccaagttgctgggactacagatgcacaccaccacgcccggctactttttgtatttgtttagtagagacgggctttcattatgttgggcaggctgatttcgaactcctgaccctatgatccgccctccttggcctcccaaagtgttgggattacaggcatgagccactgagcccagccggaatgcagtcatctttaaaacttaaaaagcccgccctgaaatgctaatgggcagctatccttctttgttctctcgtttctgtattaatatttcacccttttctgacaagtgcacatgaataaacagcctgtgtattaatgataaatttgtatacacagcatggacctatacacaaaataacgcagtgaaaccttggtgtcacaacctcggtttctattcttgtatacctttataaacgcatttttactgcaaagaaacaccagtaagataaattagtgcatgaaatgtgagcaaggatttcaataaagaactgaccagtaacgtcagaagcgttcgttaaaaattaggacagtgaacattgagatttcaggcatcgtatgtgtattccagcactttacagaaaaggtgggtggctctgaaaagagcctttggtttctgggactcgggatcactgacggatttgactagtaatcatttcacttgcccttggccttatggtggctctccgtcttcttaggcagcaatacggcctggatgttgggcaggacaccgccctgcgcgatggtcacgcgacctagaagcttatttagctcctcgtcgttgcggatggctagctgcaggtggcgcgggatgatgcgggtcttcttattgtcgcgagccgcgttgccagctagctctaagatctcggccgtcagatattccagcaccgctgccaggtacactggagcgccggccccgactcgttcggagtagttgcctttgcggaggaggcggtgcacacggccaactggaaactgaagaccggccctggaagaacgcgttttagcttttgcccgagctttgccgccttgctttccacgtccagacatagtggcttcctaacagcagaagaactaacaatccactgaataaagaaaaagaatgggctcgatggaggaataagaagctagttatagtcatcggtagaattgtgaaaggcgcaatttgattggttaaaattgttctttgacgagccaaccaattagaaaggaaataaggtgaaggctattttacatgtatgcgtcactaacacattgcccaatcagagctggatattttgaattctttatttgcatgaaaggcctataaaaggagagactctagacacgagcttttatttaagtgcgttcattctcactgctgttattgttttctgacagcatgcctgaaccagctaagtcagctcctgctccgaagaagggttccaagaaggctgtgaccaaggcgcagaagaaggatggcaagaagcgcaagcgcagtcgtaaggagagctactccgtgtatgtgtacaaggtgctaaaacaggttcaccccgatactggcatctcatcca

SEQ ID NO: 35561 - DNA, 2300 bp, Homo sapien
agcacattttaaaaattaataagcaggtaaaagaattttaataattattgtatttaaaacaaaatacaaaataattatttcaaaatatagtcaatataaaaacattattaatgcaatatttcacattcttttttaaatcttaagtcttctaaatatgagggacatcctattcaatttgatattacatttttgttggaaataaatggaatttcattttgatttcataaatttcagtgctgaaaaataaaattcatatatctgattgtttaaaacatatctaacattttccaataactgaagtatcagcctttgaattaaaataatgaaaagtaaaataaaaattcaggccgggcacagtggctcacggctataatcccagcactttgggaggccgaggtggatggattacttaaggtcaggaaatcgagaccagcctagccaacatgatgaaaccccgtttctactaaaaatacctccaccccaccccccccaaaaaaataagccgggcatggtgacaagcacctgtaactacagctactctggagactgaggcaggagaatcgcttaaactcgggaggtggagctaacagtgagctgagatcaccccactgcactccatcctgagtgacagagcaagactccttctcaaaaaaaaaagaaagtcagtcctcagcagcaacaaccacatttcaaatgctcagtagccacaactggtttctgactgttttatcacataacacagatcctatgggaaattgtgttcaggtatggaaatagtgatggaaattactgattaatacaagtgagctgctaagttcttatgtaatcatgtaaattttgcactgacttctaaaataaagctttacacatatttagagatgaggattatgaaaggaactgaaggtaggttccaatggcaaaacaccggattgacagatttaagaacactggggaggaaatagaactatggggcataaagatggaatttccttaatggttctcactgactgtgacctaaagtttatcttttgattttggaaacattttttagatgtagatattaacattctaataatagaaatgaaaaaactaaaatgaaaatgagaaaacagaagataatatcaataaacaggtcttgggcctcagaagatgagatgtagggagtgtggagaggaaaagcacagggggtgcatagctctcattaacaaacggcccagcccacaaatacgtaatcatattatacaaaaggatttcagttcttcccttgcttcctatgaaacaattttgccaacatacctaaccgttttaccgtgatttaaagtgtacagaattttctttttctgaaaaggagagaagcaagggactcatatatatttcagatgtgagattgaaacgcacgacaatgtgtaatttcagtcaagacttgcccacgagtcctaagataattcaaatttgcaaaatagacactaacttgaaaggtgcaattgtatcaatcctgtggttagcagaattttgatgaatgccctaaaatagggcaggtttaacagaattcagggaatgagcaggaatgcacaaagcatcctttgtctcctctccactccagcttgcagacatccgcgggcatttgcgggcagtgataaatttggtttagccgtttcccctccctggaggacgggggctccagcatattcatgatgtcaatcgccttggactacatgccagcgtcattgcgaacctgctacactttacaaaatagctttccaatgagaaagaaaacctactgggaaagaaaaacaaaaagaaactagaccttgcaacgggcacgcacgcgcactatccctctctgaaatatttatagtacgcttacacaaacgcgaacttgtaaatcaaaactctgcctgaaccaaagtagccaatagattaaaagtatgtaaattaggaattcccaaactgctctttttattggctaggaaaagaacaccttacagggaatccgataggttaattcacaatagtgttaggctgtaatgtcattctttaagaatcttttccagtaaacatttgttactttttcaaagtaattgggagctgttgagtgtggaagcgaaaaccaagttaagaagtcctgttatttgggtgagtccagttcctataaaagttctgttggatgtgtcttaaattgttcggtgcacctcagctctctcccgcagggatccggagaaactgcgccattgttgtcttacagagaaacaaccttctaacactctcttcgccgccatctttttcaagattttaaattg

SEQ ID NO: 35562 - DNA, 2300 bp, Homo sapien
tattctgtattaacactgtccaataggtagccactaaccatatgtggctactgagtaccgtaatgtggctagagtaagtgtgcaaattaatttttaatttaaattaatttaaataaaaatgagcacatgttgctagtggctaatataggacagcagagctttaaaacaattattctcaaacttggaagagcatacctaccacccacttagagatctcattaaaaatgtaatatcaattccattgatttggggttgggcccgaaattctgtatgtctaacaagcttcagagtgatgccagtatagctgggatatggctgctccgcccttaaatacctgacagtaagtagaagtatgctggtctgatatctgccccctaaccctgagtgtacttttccctttactaaacttttgagttctttaagagaataaatgtgattatctttgtaaacctggtatttgtacactattcttggcatgtagtggacattaaattgttgaatgaatgaatgatgcttgtttggtgcctacctcaaaaaggagagcacttgagatccttgtgtctattcctacaggtaactgaacctaagccaaaatttaagtagactcttaactccacaaaatgaataatcttctcactgcttttaggcaccagcagagacgggatttttaagttacccttgcagtatataggaggcaatgaatgtgaagcagtagactgtaagagttaatgttgaatttttctactacacataccctatgatctgtgtgtagaacacttcttccggaatcttttattaggacagtatttcacagaatttattagtattatttttgttaatttacaaacctttattcaccatgatttaccatgtatgctttagtggcatgaaagcagtggtaggtagcaaggtagtgagactccagaatcgagccaacaatacaatgccatttattagaggataatgtcttcaagcctgggattccttatctttacacctcagatattgcattatacattgaaaaactaagaatgaaacttcaattaatattggtttcccttactagaggtctttctttattaggaatgccaaaaacgatgtgaatgtatatgtctctgccaaacgctaagtctcatgattggccaaatttaagaagtattgctacattttaagaattaataaaaatggccgggcgtggtggctcacgccagtaatcccagcactttgtgaggccaaggtgggtggatcacctgaagtcaggagttcgagaccaccctggccaacatggcgaaaccccgtctttactaagaaaatacaaaaattacccaggtgtggcgacgcgtgcctgaaatcacagctactcgtgaggctgaggcatgagaatcgcttgaacccagaaggcggaggttgcagtgagccgagatagcgccactgcactccagcctgggcaacagagtgagaccccgtatcaaaaaaaaaaaattagtaaaaatacattttcaaagaatcttcacatttaaaaattaaagctaggcgcctgtaatcccagaactttgggaggccgaggcgggtggatcacctgaggtcaggagttcgagaccagcctagtcaacatggcgaaaccccatctctactaaaaatacaaaaattagccgggcgtggtgacgcgcgcctgtagttgcagctactgcaggggctgaggcagaagaatcgctcgaacccgagaggcggaggttgcagtgagccgagatcacgccactgcactccagtctggggcagagcaaaactgtttcaaaagaaataataattttattctcttgtctatccattcggtagacaagtgtagcgttactgcctcctttttgcaaataataaggattttaggagacagacattatcagttcgagagcccacaggcactggactagaagacacagaaacctacactcaagacccaaacaaggaaacaggaaggagtcaaatcaacttgcatttcccctaccctcaccgccccctttccttcccaaggcaatagtgtaggggacgcccagtaagttacggaaaaggcggagacagaggtttcgttcccgcccctccaattcagtctccaaaaaggtccgcataattgatatataaggggcttcagtgtgtagcaaagttgcaaaagttaagagttgttgtttgtcttcgatcatgtctggtagaggcaaaggtggtaaaggtttaggaaagggaggcgccaagcgccatcgcaaagtgctgcgtgacaacatacagggcatcacgaagcccgccatccg

SEQ ID NO: 35563 - DNA, 2300 bp, Homo sapien
atgaactctcagggcaagccaaaaagaataataatgatttaactccccatactgtcacaaataaagctttcgtacacttttgtcaacaagttgtttcctttgtccctgtagttttggttttgcctcagcacacaaccattttctgttttgttgttttgagacagggtttcgctgtcacccatggaggagtggagtggcgcgatctcggcttacttcaacggctgcctcccaggtccaagcgattctccttcctcagcccccgatatagctgggactgcaggagggcgccaccacacccgtatttttgttttttggttttgtacttttagtgaagacgggttttcactatgttaggcagactagtctcgaattcctgacctttgtataagtaacccgccctcctcgggctcccacagtactgggattacaaggcgtgagccgccactatcggccattttgaagacaatggccaagacacaaaagcctagtttagaagagccaccggccctgcccccatcccctaaccctccaccctccttgttttaggagacattactccctagtgctacggcgctttcaactgaaattgttggtggctctgaaaagagcctttggtttaagttggcgcacaccctcagtacaacttatgccctctctccgcgaatgcggcgagcgagctggatgtccttgggcatgatagtcactcgcttggcgtggatagcacacaggttggtgtcctcaaagagccccaccaggtaagcctcgcaggcctcctgcagcgccatcacagccgagctctggaagcgcaggtcggtcttgaagtcctgcgcgatctcacgtaccagacgctggaatggtagcttgcgaatcagtagctcagtcgatttctgatagcggcggatttcacggagggcgacagtaccaggcctgtagcggtggggcttcttcacgccaccggtggctggcgcgcttttgcgagccgccttagtggccagctgcttgcgcggggctttgccgccagtggacttacgagctgtttgcttcgtgcgtgccataggaatgggtttcaagcaatggtcacaactgaacaaacagttgttcttactcctatttataaaggcaaagtccttctgattggtccgaatcttccagtttcgcgccctgaattatgtagtgtgataggacttgtgatcagctactaggtctcattttagaaaatcttaacctatctaaatgcttttttcccctagttccttacattttattatgttttatgtgcctacctgtattacgtaccttcattgattttattttaatcagtttgtttgggattatgtttgacagacggaaatgaacgttctgcagttccggagcgattcaaaaataccgcgtttgagagtgattggtccagctcaatgtctcctttatattttttaaaaaactcttactttgaagaaatattttatttttaatataagtaccctatttcatatattctgaacctttcaacaaacactggtttcacttccagacactccgttcctaggggatattaaaatcccatcgctcttgagatgtgttcatcctttgattactgaaaaagcttaaatttttatgtaagaatgctaatgaccttgatcagattataaaagaaagccaatggtataattctggaaacacgtaaatctttagctaatttccattttagaattagttattcatagataattttaaatccggaagctgcaatttggtaggaaactagaaacataatatccgtctttgtttctgtttaaattctcacctaaggagacagaacttataggtagatgttactggcaaggcattagtttttctaatgttttgaatgaaaaactacgttttttcccccgggaggtgtagaaaaggatttagggtaggtttcgcataaatatccaatcaaaaagtagacttgaatttaacttttttattggctgatttggtccaatcagggattgagaatgattaagcacctatttgcataaaagacctacaaaaacggccagctgtgctgttgagccttcactttggggtgtattcttactcctttatcttgttgcaatgcctgatccagctaagtccgctcccgccccgaagaagggctccaagaaggcggtgaccaaggcgcagaagaaggatggcaagaagcgtaaacgcagccgcaaggagagctactccgtatacgtttacaaggtgctgaagcaagtccaccccgacaccggcatctcctccaaagccatggggatcatgaattcctttgt

SEQ ID NO: 35564 - DNA, 2300 bp, Homo sapien
taagtttttcaaagacagctagaagccctcatactacttgccaaataactaaaggtttattgcatggcattttgttttcatttccataaagtttgtctcctaatccttatctattaagaaatttaaatttttctcaggtacttggtaaactacaatatcccagttaacattaacttccacgagactcctacaaagaccacattatgctatctagagtgggttattataggcactaaatgtactttcaactcattttgaatactcaaacttaccagctctagactggtggacgtgttgctccaaattgattgcattttaagttgcaaacttagtttttggttcctaaacaagaatgcccacttttcctgctgtgtcaaattatctgctcagtaatacaaggcaaggccgaggtgggaaaacttgcttgagtttaagaccagcgcttgagtttaagaccagcctgaacaatgtagttgtaccccacctttataaagacaaataaactctaaaagcttagtgtttgtcaaacgcacagaataaacaggtgatgtaggaaaattttacctgtattggcgacacttctcccatagaatacagcagcacccagcattaaaactcttaattgaaatcattaagtggctctgaaaagagcctttgggtttgaacatgcgtccatttatttggagctggtgtacttggtgacggccttagtgccctcggacacggcgtgcttggccagttccccaggcagcagcaggcgcacggctgtctggatctccctggaggtgatggtcgaacgcttgttgtaatgagccaggcgggaagcctcgccggcgatgcgctcgaagatatcgttgacaaaggaattcatgatccccatggctttggaggagatgccggtgtcggggtggacttgcttcagcaccttgtaaacgtatacggagtagctctccttgcggctgcgtttacgcttcttgccatccttcttctgcgccttggtcaccgccttcttggagcccttcttcggggcgggagcggacttagctggatcaggcattgcaacaagataaaggagtaagaatacaccccaaagtgaaggctcaacagcacagctggccgtttttgtaggtcttttatgcaaataggtgcttaatcattctcaatccctgattggaccaaatcagccaataaaaaagttaaattcaagtctactttttgattggatatttatgcgaaacctaccctaaatccttttctacacctcccgggggaaaaaacgtagtttttcattcaaaacattagaaaaactaatgccttgccagtaacatctacctataagttctgtctccttaggtgagaatttaaacagaaacaaagacggatattatgtttctagtttcctaccaaattgcagcttccggatttaaaattatctatgaataactaattctaaaatggaaattagctaaagatttacgtgtttccagaattataccattggctttcttttataatctgatcaaggtcattagcattcttacataaaaatttaagctttttcagtaatcaaaggatgaacacatctcaagagcgatgggattttaatatcccctaggaacggagtgtctggaagtgaaaccagtgtttgttgaaaggttcagaatatatgaaatagggtacttatattaaaaataaaatatttcttcaaagtaagagttttttaaaaaatataaaggagacattgagctggaccaatcactctcaaacgcggtatttttgaatcgctccggaactgcagaacgttcatttccgtctgtcaaacataatcccaaacaaactgattaaaataaaatcaatgaaggtacgtaatacaggtaggcacataaaacataataaaatgtaaggaactaggggaaaaaagcatttagataggttaagattttctaaaatgagacctagtagctgatcacaagtcctatcacactacataattcagggcgcgaaactggaagattcggaccaatcagaaggactttgcctttataaataggagtaagaacaactgtttgttcagttgtgaccattgcttgaaacccattcctatggcacgcacgaagcaaacagctcgtaagtccactggcggcaaagccccgcgcaagcagctggccactaaggcggctcgcaaaagcgcgccagccaccggtggcgtgaagaagccccaccgctacaggcctggtactgtcgccctccgtgaaatccgccgctatcagaaatcgactgagctactgattcgcaagcta

SEQ ID NO: 35565 - DNA, 2300 bp, Homo sapien
tgactgtaatgttacattgagaaaactgatctgtaaagaaatcaaactattttaggggattgttctgtgcacttgctttagagaacatttcatagaatatttcattctgtaacataaataaacatgcattttgcaaaagctcactccttgtaagagttcacaggcaggatgcctttactgatgagaccaaaaccaacaacctaggcttcctaaatcagtgttcatgagaatcatctgaggtatatgcagattgactccagccctagatggggattgaaacaagctcccatgtaatgccctgggagcttctaacaagttcccacgtaatgcccatgctgccagtaatgtagaggccaatctggctttcgtttctgccgccaatttctaatattgaattaaaaaatggatcatttcacagaaaaaccaagaactgtttaaaaaaagggggaattgtggaaatagctgcttcagacacgaaaaagcagcaaccaaggatatccctacctactctcaactgccaatgctcatacctgtaaagttttaaaagggattaaccagaaatacacaacgaaaaaaaatcccatctataatgggtgtaagtagacaacgcgactaacgcttgagacaatgtatataaacgcccccaggtggccccttccactaccaaatcgaagctccaaacccctaaaagccagtttagaaaaggacgctgacaatctggcactttcgggaaaaagcacgggaacaaatatagcaagcttaccattaactttagccaatcaaatgaggacttaagtactaaaaccaatgtttagtttcaaagatttgattagttaatcacagctattttcgggtgaaagtaggcggctcttaaaagagcctttttaagttggatagaattactgcccggaaacctctacgctctctccccacgaatgcggcgagcgagctgaatgtccttgggcatgatagtcactcgcttagcatggatggcacacaggttggtatcctcaaagagccccaccaagtaggcctcgcaggcctcctgcagggccatcaccgcggaactctgaaagcgcagatctgtcttgaagtcctgagcgatttctcgcaccaggcgttggaaaggcaacttgcggatcagcagctcagtcgacttctgatagcggcgaatctcgcgcagagccacggtgccgggacggtagcgatgaggtttcttcacgccgccggtggccggcgcgcttttccgagccgccttagtggccagctgcttgcgcggcgctttgccaccggtggacttgcgtgcagtctgcttggtgcgggccatctcagactacctgaaagaaaaactcagccacttggcagagtggaaactgcccttatatatactcagaaacattctaattggccttgttgattttcaaaagacccgcgcaacaaaaccattggctgaagagtccaacgatgtgattggtgaattactggaaaatctgattggatgaatcacttcatttttgaatcctctcttctcggttagtctgcgatccaagaacgttaacttcttaaagttctaattctgcgcttctcaagctgtagtccgtaaacgactactttaagacttggaagacgctaattctcattcagtagatgtgttgtggggccagattcggaggaccacgttttgagaagtttatcttgtgccgttttcttgagtcacctggactgctgctagctggaaacctttgaccattataaggcaggattcctgggtgatgtacctgggaaatcacgagccaagaagtcaccgacatacaacagtgagcaacaaatgttaactgaattctattttgtcccaaatggtgttttgcttcggttgagaatttttaaggcacaggctaattttaggttttccaacgactcttatcatttacttttcgttgggtcctattgatgatattccaggataccacccccactagcctcttctgcaggataacttgaacactgcagtggccctgtccatctaaactttacaaggttttgtaaacgttactgaacttgcttcttcccgactacattaaagcacttacttgagatattaaacattttctcattagtcctgtttgcctagtcagtcacttgtatagacagggcaacagcacggcctgaatattgggcaggacaccgccctgcgcgatagtaactttgcccaacagcttgttgagcttctcgtcgtggatggcgagctgcaggcgtcggggggtgacgcgggtcttcttgtctcgggccgcgttgcccgc

SEQ ID NO: 35566 - DNA, 2300 bp, Homo sapien
agaacacgatttttccttagctgctgagtgaaatgtgtcatattaagctgcatacgagcttactccttggtgacgcttacaatctataggggaaaaaacaacgaacctggatttttttttgagatgtctcgctcttataccccaggtttgagtgcaatggctctatctgggctcactgcaacctccgcctcctgggttcaaacgattctcctacctctgcctcccaagtagctgggattaagttgcctgccaccactcccggctaatttttgtatattttagtagagacagggtttcaccatgttggcgaggctggtctcgaactcctgacctcaggtgacgcgaccgcctcggcctcccaaagtgctgggattacaggcgtgagccactgcgcccggccgaacttggatgtttcagtaaacccttactatcccatgtgttgcttagccattttaccttgccaatgccaagtctggaaaattacagatctttaaatgacaacatgggtggctcttagaagagcctttgggtcgttagcgcttttacccaggtaactagtttacttggagctggtgtacttggtgaccgccttggtgccctccgacaccgcgtgtttggccagctccccgggtagcagcaggcgcacagccgtttggatctccctggaagtgatggtcgagcgcttgttataatgcgccaggcgggaagcctcgcctgcaatgcgctcgaaaatgtcgttgacgaaggagttcataatccccatagccttggacgagatgccggtgtcggggtggacctgcttcagcaccttgtacacgtacacggaatagctctccttgcggctgcgcttgcgcttcttgccatccttcttctgtgccttggtcaccgccttcttggagcccttcttcggggcgggagctgacttagctggttcaggcatgttcgcagccgaagtgataccgtcaaatgaccacaggaaaatgctggtgagcccaaacgccctcattatttacctcgtgtatatgcaaatgaggctggctgagtttcggtttctcattggttcttttagtgtctgaatatatgataggccatttctgaactcctaaatctcatcggctctcccagaagctcaaccttgcataatttgacctttcaactataagtatgtaagtcagaagtggttttttttttttttttttttttaaatttttttaaacacctgcttttcgattggctgaaatctgtgttcaggagatagcacagtctactttgccgaatatagattataagagtttagctcttgcgttttactagaatcaatcactttccttcttctaaacaagtatttaaatacttcactgcgtctggatgtggaatgcagggcagcaaagctcgcgccaaggctaaaacgcactcttccagggctggtctccagttttctgtgggccgagtgcaccgcctcctccgcaagggcaactacgccaagcgggtccgggccggtgcgccggtgtacctggaggcggtgctggagtacctgaccgccaagatcctggagttggcgggcaacgcggcccgagacaagaagacccgcgtcaccccccgacgcctgcagctcgccatccacgacgagaagctcaacaagctgttgggcaaagttactatcgcgcagggcggtgtcctgcccaatattcaggccgtgctgttgccctgtctatacaagtgactgactaggcaaacaggactaatgagaaaatgtttaatatctcaagtaagtgctttaatgtagtcgggaagaagcaagttcagtaacgtttacaaaaccttgtaaagtttagatggacagggccactgcagtgttcaagttatcctgcagaagaggctagtgggggtggtatcctggaatatcatcaataggacccaacgaaaagtaaatgataagagtcgttggaaaacctaaaattagcctgtgccttaaaaattctcaaccgaagcaaaacaccatttgggacaaaatagaattcagttaacatttgttgctcactgttgtatgtcggtgacttcttggctcgtgatttcccaggtacatcacccaggaatcctgccttataatggtcaaaggtttccagctagcagcagtccaggtgactcaagaaaacggcacaagataaacttctcaaaacgtggtcctccgaatctggccccacaacacatctactgaatgagaattagcgtcttccaagtcttaaagtagtcgtttacggactacagcttgagaagcgcagaattagaactttaagaag

SEQ ID NO: 35567 - DNA, 2300 bp, Homo sapien
ggttaggagttcaagactagcttggccaacatggtaaaaccctgcctttattaaaaatacaaaaattagctgagtgtgatggcaggcacctgtaatcccagctacttgggaggctgaggcaggagaatctcttgagcccaggaggtggaggttgcaatgagccaagatcgtgccactgcactccagcctgggcaacaagagtgagacttcatctcaaaaacaaataaacaaacaaaaaacaaaaaacaaaaacaacaaaagcatatctagactgtagactacttaaggttttttttttttcttagttcctaatacagtatgtgacacataaatatctgaataggaatcctttctgagagagagaagcataaagcagtccacacatatgtttaaaaaataagcacagcgaatagttctatttgagatattaaaggatggtagagagtagagacacatttaccagtagggtccgcaaaaatgtttttctcaggtcagagttcaatcagtgctatgaagactccacacccacctcaaaatgcaactcattttccgagattaagatccttgtaggtgaaaagaatctgtgtggggatttaggaattcctagtcgattgccttaactacttggcaaatagtgctttctgaattatgtatcaaaagatataaaactccattcctgggctcccaccccaccccacccttggcactcagtttatgtaagcattctccttgcttggcaggttaacttacaactgtcataactggctgcaacagtggtatagcctctaaacaagagaaatttgctttgtttacagatgacatattgattaatgacacttgggtgtccatgaaaatcaaaattgtacatgcagagattgtagtttcacattatttcccggaaatgcttgtaattctggaattaaagaaatactcgggttcattttgttttctttcgtcattgtttaacctaaaaaactgtaacttaaaaaaaagggatcctcaggaaaatagacggggggggagaaaaaaaaaggacctagcagaggatggtttcgatccatcgacctctgggttatgggcccagcacgcttccgctgcgccactctgctgttctgccaggcacacggtctcacagtactcttaactacttacaggagatgcgttcagactacctcgtaatttaagaaaaaacctacgagcagttgcctacttctttggctaccacaggttgccaactcactttggaaaaaggaatcaccagaatcaaacagaaaacaaaactagggatagaaaaataaatatcaatacactggtgggctaggcgcggtagctcacgcctgtagtcactgcactttggaagacccaggcaggcaacatagcgagaccctgtctcaataaaattaaaaaaaggaaaaaaaaaaacccccaccccgaaacctacacactgggtgcagttgtgaggggcagttagatatttaaatggcaattacaaattttaataagcagggaaagaagagaacaaactgggaatagaatcaggcctccgcgcggagggcaataattctaccacgaatcactaacctatcatgccttcgccatcgggaagaaaacccttttggttatgtttcccttggcttggtgatggagagggtgaaatcttgcagttttcaaacacttccgaaggggggtttcggtccgcatgtgctttacagccggcagcagaaagccagtcactgtgaccttggggacaaagctgcactcctcaggcttccggtcttgtggaccgaggctcctctccaatcgtcctaaagcaactgaaggaacaattgataacaatttaaacatgttaatttatttaatctgatttggttgttaaaacagccttaaaactctcattcctatttcccagcaattgcaagagacgcctccgcggagccggcgctcagatgccaaaggctggagtcgttggtgacgtcatccagggctgggctatgcggggtggggccaagaagcaggaccaaagttccggtatgcgcgctttcagtcttcaattaggtccgaattcccggcatataagggcgttgctttgccttggcgtttaggtttcttaagttggttttagaagttgcttagtcatgtctggccgtggtaaaggtggaaaaggtttgggtaagggaggagctaagcgtcatcgcaaggttttgcgcgataacatccagggcatcactaagccagctatccggcgccttgctcgtcgcggcggtgtcaagcgaatttctggccttatctatgaggagact

SEQ ID NO: 35568 - DNA, 2300 bp, Homo sapien
gattttaaaaaatcagcctggcctggtggcgcgctcctgtaatcccagctactccggaattttaggcgggaggatggcttgagctcaggagttcaaggttacagtgatcgcgccactgcattccagcctgggcgacggaaagaaactctaaataagtgactaaaaacatctgagtatttatttatctaatatatttttagagtcagtttttatgtttcctattctttcacattagaacagtttcccagctttttctttttattgttatttcctcatgacatcttttaatcttcccctccctccctcccttcttcccttcctcccttcctcccttccttcccccagcctgggaaacacagggagatcctgtctctacaaaaaacagaaaaataattagccaggcatggtggtgtgtgcctgtggtcccagctactcgggaggctgaggtgaggatcacttgatcaccggaagtcgaggctgcagtgagccgtgatttcaccactgcactccagccctgggcgacagagcgagactctgtctcaaaacaaagcaaacaaaacaaaataagcaaaaaagtctaattgtctcatagaatgtcctacattctggatttgtctcattatttccttatggcatcttttaatttatttttgttccttttaaattagaagataaatttgcttttgtgattaatttgagtgcttagatttaggttaaacatttttgcccagacgctgttctttacactgtactaacttcacatcagaaggcacttgtagggatatcctgttgatggtgaagaccgagtggtgccccccaaggttctttatttctctctttgcaattgacaagtagttttggggtggcacttaacaccatgagcatatgttatttcccaaccaccttttcctaacggttttaattaaggtcgttaagctcgttcgttgctttggtctattatttttctaagggttgcaaatggtgattcttctaattctaccagtcttctgtatttgttagaagatacttttgtcaaacgtgtggacctcttttctgccttccttcgtaccccagtctttccaagaggttcccgtgggagcttcacattacccctgtcgtaatagccttaaaactcacgtagcttggcgctaaattgtaattgggtctgacgtgctttatggtctagagtgcattctacagcctgtaaggtctgtaaatggttctcacattcgagtgtgcaaacgaaccacttggatagcttggttaaaacccagaatcctagagcctacacacagcgattctaggtaggtcaagtgtagtgcggactagcaagggaggtcggcctcgaaaagttgtcatttttaagaagctcccaggttatgttactggttcagggactggaccaaattttgagtagcgcaggcccagaagatggactgtatggcattatggtggagagagagaggataaacagactaagtacagagcaaaggcaagggatgtgaaggaagggatctacaatgaagataacttagtgaagtaaatggaaagaagtacatttctgattaccagctttgaggaaggaaaataacaccagactagtcagtatctcaaataaccacggagggattcgaaccctcaatcttctgatccgaagtcagacgccttatccattaggccacgtggtcccgggttacaaatcagaactattttttgatggaaaataatctcctccctatgagctgtaaatgtaccaagtatagtgaaatcattgttgtaaaccaaggaatttccaacccctgaaaaaaacttacagcctggttggggaaagacgaagtttaatctaatggtaaaaaaaaatctaatggccgggcgcggtggctcacgcctgtaatcccagcactttgggaggccgaggcaggcgaatcacgaggtcgggagttcgagaccagtctggccaaaacagagaaacccccgtctctactaaaaatacaaaaattagctgggcgtggtggcgggcgcctgcgtgccgctgcactccagactccagccggggctacagtgcgagactctgtcaaaaaaaaaaaatactgcaattgtgttcgtagccgcagccgtcctgccgtcgctctccaacgccagcccagcgccgcctctcgctcgccgagctccagccaaaggagaagcggggtaagtaaggaggtctctataccacggctcgtagaaagccgactgcccgcaaatcgaccggcaaatcgaccggtggcaaagcacccgggaagcaactggctacaaaagcc

SEQ ID NO: 35569 - DNA, 2300 bp, Homo sapien
tcccaatactttgagaggctgaggcgggtggatcacctgaggtcagtagttgaagatcagcctggccaacatggtgaaaccctgtctcttctaaaaatacaaaagttagccaggcatggtggtgtgtgcctataatcccagctactcaggaggctgagacaggagaatcacttgaacccgggaggcgcaggttgcagtgagccgagaccatgccattgcactccagccagggcaacaagagcaaaactccatctgaaaaaagaaaaaaacaaaaaaaaaaacaaaaaaaaacagaagaatgaaaaagacctaatgtttgacagcacaacaggaagactatagtcaataatatcttaattgtacattttaaaataactaagagtataattggattgtttttaacacaaaggataaatgcttgaaaggatggataccccattttccatgatgtgattattacagattgcgtcctgtaccaaaatgtctcacgtacctattaaatatatccacttactatgtgctcataaaatttaaaatttaaaaattaaaaaaaaaaagacatgcttgcttcagcagcacatatactgaaattggaatgatatagagatgattagcatggtccctgcttttaaaattaataatattcctttaaaagataaaaagggggaaaaaggaattcatatttttctggtgttcttagatattggaacccatgtgacaatatttccaggtctccttaagggaaaaattaaactggtgacattaagaggcttggggacaaaagcagtgacctatggtgcttatctgctgtggggtgcctctggccatttgaggtgccggtgactttggttcctgtggctgaatgtcttatagtcattgacattttggctgcttggggctcagcacatcatcactgcctgaggggtgcgcccgctcacagctaagaattccagccgttacggcggggcatatccatgcctgtctgccacctaagccacccaagtcccagtgggttattcaaaaaaacagtactgcatactaactgaagaacaggacattattgtgttaattattgttacaaatggaaatgctacaaactaccctgtcataatgtaacagctcagtttggctagtcaaaaaggctttcggatgtggagactaacagtggactgtccctgggctaaatgcgaaggccacatgggcagtaagccagaaaagtattctagatacaaccaagcaaaaaaatttaattttggagacatccactaataaaaaggaggcccaacagctggaaggcctctttgggtacttgggcattggaggcaacatgtaccccacctgagtgttcttttggtcccctaagtcagggtgaccaacaaagccaccagctttgaatgaggccctttgtagcagtgggccttggaagcaattaaataagccatggtccagggactgccattaaaacctttacagcctgctagcctgatggcactagagtagtccccacttatccttgggggacatgttccaagaccctcagtggatgcctgaaactatggatgtgtcaaacactatatatacaatgtttatcacagacatacctatggtaaagttgaatttataaattaagcatagtaagagattaacaacactagcttaaaatagaacaattataacaatacactgtaataaaagttatgtgaatggggtctctctctcaaaatatcgtcttgtgctgtactcccccttcttcttatgatgatgaggtgataaaatgcctaagtggtgagatgaagcgagatgagtgaagtaggcactgtgatggaacgttaggctactgttgacctcatgatacatcagaaggaggatcatctgcctgggtgatcctggatcactgagccatgataacgtctgtggttggatgtcaggggcagatgatgtcaatgactaatgggcagttagcatacacagcttggataagcaggacaaagggatgattcatatcctggacagggtggtatttcattatcctacccagagtcagttgcaacttaaaacatatgaaatgtttatttctgaagtttttcatttaatattttcagaccaaggttgaccaggagcaactcaaactgcagaaaacagaactgtggataaggtagaactattgtacaggagttacaacccccattcctgctgattggagtttgtggcaacagaaaactaccactgggatacaccaatctatcagattttggacacttaagctgcatgaggcagccaccaaatatattcctttccaa

SEQ ID NO: 35570 - DNA, 2300 bp, Homo sapien
acttcccatcttccctggcacctttcacactattgtttccaatgtacacattttctcatgccatttttaaaaaagattttctcttcaccttcaaactaaaactccaactccacaacaggcaccagctgataccgaacctttcataatggaaaataatgacattcataaagagttaatatgtgcaggtgctgtgctaggttctccccaaacaacttaagaagcaggtcacatccctacccatagctgaagaaacaaagacattgagtgagaaatgaacttaggggtctcatagtttggaaactacaaagttcagagatatgaagagttgggctcagaaactcctaatctgaagcttagcacattggctgcttctttgtgtcaaagtgacttggaccctccaggcaaaggtgggatgttcattcttactaatacgatctcaagcagcacagcttctgatagagtctgaatttaaaaataaacaaatgaacaaataaacaaatattgatggatgaataggggtgaacagcaggatggatttataataaagtaagaaactaaaatattaattatacaatctacatggtagatatattggaatttactgaaattctttcacctttgctatatgttttagaagttttataataaactgttggggagggggaagggggagggaaaaattgtgtttttctgttgataacagagaccagaagtaccactggcttaaataaaacaaggatttgttttcctttcatgaaaaacaaacttatttggaaatttaccctgagtactaatatataataaaatattttaaaagaaaaaattttttaaataaatttagatggtgacagtccagggctgatctggcacctcagatatgtcattcatgccccagcctgcttctgacttcattctctgctgtcccagtgtgtggcttccaacctcaaggctgcctcatggtcccagggtgggctactgcacctccgggtccaaagtccatgttctaggcaagaggaagaaggaagaagggagagtgtaccctcacactcccagctattttggcctccctttgaaggatttctgggagaagtacaagcccacaactttcacctacaaaccgctggctccaacttagtcccttggcctgccctatcttcaagggggaagagcaggatgcagtaccccagaaaattaggccttgtcactaagaagaagggggcatgcacgctgcagaagcaaccagccatctcaagcagataccacacagcctaaattcaaactgttgcaatataatcaaatcccatcagctccagtcacatattagctctaggagatttctggcttgcagcccaaaaaagtgtgttttgaggtcgtaagccacagggagaacaagattgtcccataaactccttacagagatggtgtacaggaaacgagccttacagagaccacagcctatggagtgtctagcttcagagaatatgtactccactggcagcgtgagaaacaaatacccaagaaaatacaatatagcacaaaccaggagctgagggtgaatgaagatgctcagaaagatctgcagtaagaatttcctgggaaaggtaaaacaatgtcaagcagcactgcctctggaaatcagaaaaattatattatttgataccatatcctaagcctaaatgccagaagttcttaaagaggtgcagtttgtctcattttctttccattcatacctttattaggctctgtaaaaaagatcctcctcttctacgtacctatctacatgcaagcaaactgccacagaagcatcttaattagtgcacatcttcctctctttgcacattaaatttttttactttcctactccattctgctaatatttctattaccatgtaaaagacacgagacaggtgaatataaagaaatacttatatacatccacgcacaagaatgattcaaatagataaacacagaaacacaaacactaagggaggtagggctggagtttttcctcaacgtgtacaattcaatgtactttcagttttcatttcaacgttcctcagtggtttctgcccagcaactgatgagaaacatcacctctgagccaatcaaaaaactaattcttccaaagagcgactcttactgtttctcatggtgagaagacaatatttgctttctctttttcctttcttccggatgagaggctaagccataatagaaagaatggagaattattgattgaccgtctttattctgtgggctctgattctccaatgggaataccaaggggtaagtgcaggaaa

SEQ ID NO: 35571 - DNA, 2300 bp, Homo sapien
aggcctttctttatcttattctcatcaaagagctttctctgcagaagggacctactggttcatccttcctggtccttgatcttctgatctagagtggcttaatagtgctgccacctctctctcgaactctggtgccgaatgattccaggaactgggccatcctgtggtgggaatgaccttaccctgagcatgtcactcatgcattgaacaacagctgagagcagagcttagagttgggccttgtaaggagagaagaatcacatcctgcagaagtctgtcctgaggaacaggtactccagtcacagcaaagacacagttgatacctggataacaataatagaagacaggacatgggaacagcaaaagatatgggtgttagaagaggccgagagcacttcaggcaggagcattcagagttgttcttggaggaagtaggcacgaaggctgggcaggatttcaaggggcaaagatggagcaagcaattcaagtgaaaggcatggcatgggaaagggagcgctggccacagggagtgcaacgttgtgatgcaaggccactgtggagccattgctagtgtattaactgcaaagttttgaattgaatcagaagggaattggaggcctctagactaagcatttatttgtgtatattttattatttatttatttattttgaggcagggtctcactttgtcacccaggctggagtgcagtggcatgatctcagctcaccctaacctccacctcccaggttcaagccattctcctgcctcagcctcctgagtagctgggattacaggcatgtgccaccacacccagctaattttttttttttttttttttttggtagagacggggtttcatcatgttggccatgctggtcttgaactcctgacttcaagtgatctgcctgcctcctcctcccaaagtgttgggattacaggtgtgagccactgcaccagttccagactaagtatttagacatttgaggggattattgacaactgggccttgggaagattattctggaagatatctatacaatgacaagattggattctgtgggggagggattatgttcatggggaggaggttatgtgtgctggtgtgtgtgtgtggtccttggacttaaccccaccacctactggcagaaggtcaaggtcaactgaaagtctttgctcacttccatcttctgcctccaccagaataccacctccccgtgggaaagggtttttaatcctcactcagtattctcagcacgtcttatccaatagctttggagtgaacaacaagaccttcataacagccactgcaactgctgtcacctttcctttgctacccctcccactccagccatgcctgcttcccccaaggcctcccgcgcaccaggcccaaccttcaaagccagcaacatgaacaagagtcctctggctttggaaagacggcggcttatgttttcctcctcatgtttcctccccagcaaaatcactctacatagagagccctctcctcgtctacaccagcaaagccactgacaccttggggatctcaaggctttgtaaaagaacggaaggaaagaaagaaagagagagagagagaaggaaagaaagaaagaaagaaagaaagaaagaaagaaagaaagaaagaaagaaagaaagaaagaaagagaaagaaagaaaggaaggagaagagaaggaagagaaagagagaaaggaagagagaggaaggaaggaaggaagaaaaaagaaagaaagcgagaaagaaagaaagaataaagtgagagagagacatatgaaagaaagaaagaaagaaaaagagaatgagaaaggaaagaaggaagcaaggaaggaaggaagaaaggaaggaagaaaggaaaataaaggaaaaaagtcttgcttccaaagacagaaaaaggaaatagaaatacctaataatcccaaaaggttatttgctgcttgagatttttggggggtttttgtgtgtgtattctacctagtaacagctgagaaataaggctcgagacaccattggttggttcagcctcactcggccaatcctgggctctaaactgctcagtggaaatcttgggactttttggacacccagagaacaggtcccagataccgagtccgcaactccaaacatcgcgattaataggaggtgaacacagcttttctcttctctttgggatgctttgttgtctggtggtgactgtgcccatgggtgagttgtatcggaaaatcgtcatgtgaggatcagaggggaaaagaaaacagaggttagttctagaaggtaggaaaggga

SEQ ID NO: 35572 - DNA, 2300 bp, Homo sapien
attttgaggcagggtctcactttgtcacccaggctggagtgcagtggcatgatctcagctcaccctaacctccacctcccaggttcaagccattctcctgcctcagcctcctgagtagctgggattacaggcatgtgccaccacacccagctaattttttttttttttttttttttggtagagacggggtttcatcatgttggccatgctggtcttgaactcctgacttcaagtgatctgcctgcctcctcctcccaaagtgttgggattacaggtgtgagccactgcaccagttccagactaagtatttagacatttgaggggattattgacaactgggccttgggaagattattctggaagatatctatacaatgacaagattggattctgtgggggagggattatgttcatggggaggaggttatgtgtgctggtgtgtgtgtgtggtccttggacttaaccccaccacctactggcagaaggtcaaggtcaactgaaagtctttgctcacttccatcttctgcctccaccagaataccacctccccgtgggaaagggtttttaatcctcactcagtattctcagcacgtcttatccaatagctttggagtgaacaacaagaccttcataacagccactgcaactgctgtcacctttcctttgctacccctcccactccagccatgcctgcttcccccaaggcctcccgcgcaccaggcccaaccttcaaagccagcaacatgaacaagagtcctctggctttggaaagacggcggcttatgttttcctcctcatgtttcctccccagcaaaatcactctacatagagagccctctcctcgtctacaccagcaaagccactgacaccttggggatctcaaggctttgtaaaagaacggaaggaaagaaagaaagagagagagagagaaggaaagaaagaaagaaagaaagaaagaaagaaagaaagaaagaaagaaagaaagaaagaaagaaagagaaagaaagaaaggaaggagaagagaaggaagagaaagagagaaaggaagagagaggaaggaaggaaggaagaaaaaagaaagaaagcgagaaagaaagaaagaataaagtgagagagagacatatgaaagaaagaaagaaagaaaaagagaatgagaaaggaaagaaggaagcaaggaaggaaggaagaaaggaaggaagaaaggaaaataaaggaaaaaagtcttgcttccaaagacagaaaaaggaaatagaaatacctaataatcccaaaaggttatttgctgcttgagatttttggggggtttttgtgtgtgtattctacctagtaacagctgagaaataaggctcgagacaccattggttggttcagcctcactcggccaatcctgggctctaaactgctcagtggaaatcttgggactttttggacacccagagaacaggtcccagataccgagtccgcaactccaaacatcgcgattaataggaggtgaacacagcttttctcttctctttgggatgctttgttgtctggtggtgactgtgcccatgggtgagttgtatcggaaaatcgtcatgtgaggatcagaggggaaaagaaaacagaggttagttctagaaggtaggaaagggagaggaggcgctacagctccggggtgggggcggtagctgggggcggtaggtgcggggagcgggatctgctctggagaggagagggggacctgggagacaggaagcctactggtggggaggcgcagcctcgcctggctttacctcgagtgtcccgacctgggtctcggggagggggaagtggagggacgagggtgtgaaagaatccagggacaactgaagaaaccggactgtggcccgagaagtgggaagaggaaggaggaaaacggcccccttgatctctgcattgatggcttacttatggaatgtttacggaatccctctttcggagatacctgagccttgagatgcaagcgactcccagaagttggggcaccgatgagacctacttgagtgacaggagaggttgggcccgaccagcactgaggtgccaagactcctaggctgattctcctcctctgtaaccctaggcctctggtctctgcctgccctgggtgctcatggaaccagctgctgctctgcacttctccctgccagcctccctcctcctcctcctgctcctcctccttctcagcctgtgtgcactggtctcaggtagggatgtgtgtcacttgctgctgtcacctctcagaaaggaacatcaaccctgtagtctgcaaagggaaagaa

SEQ ID NO: 35573 - DNA, 2300 bp, Homo sapien
ccctttccaggccttgggtctaagcccctcattgaaatcaaggcccaagaggatgggagcatctggctggagtgcatatctggagggtggtacccagagcccctcacagtgtggagggacccctacggtgaggttgtgcccgccctgaaggaggtttccatcgctgatgctgacggcctcttcatggtcaccacagctgtgatcatcagagacaagtatgtgaggaatgtgtcctgctctgtcaacaacaccctgctcggccaggagaaggaaactgtcatttttattccaggttagttctctgccctctgagacctatcaagtgtatgcaggatcctcagcacccagatggagcccagagcgggaatgggggcagcagtgtgggtggaatggtcctgggccctgaggagctggaggctgcagctgagttgagacgtctcccctcctcacaaagggagattcaaagagtcccaaaacacaagagtaggagcctcttctctgagggtaaacctggtcttttttttcttgattaggtctttatgctgcaacagttgtaaaatattaaggacaaccatcaaacctggagagtagtgtgggtgggtgactgtctatgcttggcattcctgtatgttgcagccatcccttcctgtctatgggacttcccaaaggacagagctggggaaattccctatcaagagacattcataaatgtattcaacaaatgttcaacaagcatttcttatgtttaagactgtacaggaaaccaagggtcaataattgaacaaaatatatcaaaatttctctcctcaaggagttcatattctagagagagacagcggccgggcacggtggctcacacctgcaatcccagcactttgggaggccaaggtggttggatcatgagttcgggagttcaggaccagcctggccaagatggtgaaacaccatctctaccaaaactacaaaaattagccgagtgcggtagcaggcgcctgtaatccccgctgcttgggaggctgaggcaggagaattgcttgaacccaggcggcagagcttgcgtcaagatcgtgccactgcactccagcctgggcaacagagtgagactctgtcttaaaaaagaaaaagaaaaaaagggagcgcgagagagagacagcaatatatgaaataattgaaacaagtgattaaataaataataatctatatattctatcacatggtgacgagcatgtaggaaaaattaagcaaagagaaaatagagagttccaggggtgtgaggcatcagaattattaacaaggtggtcagggaagacttcactgtaaagatggaaattgagcaatcaagacaaggaaccatcagatgcttaaggactgagcagccaaggtacaggaagagcatatgcaaaaggcctgaggaaggagcttgtctggcagtttccaggactcccaggaggtgatgctggtgtggctgaaatggagtgagttcaggaagtagggggagatgaattcacagagtgatgcaactacgttatatatggcagcacaggccacaaacaggctttggcttttagagtgagtgagtgggaagcattggaaggttttgagcaaataattaacatgatctcacttgggctgctctgctgagagtagattacagaatagagcagaacaagaaggagggcactctagtattccaggcgtgagtgatggtggtttgaggcagggtgatggctgtgctgactcagcatggctggttagttttatgcactctggtcctttccatggtgactccagatgtttctgctttgcccccttctgggcccggccctggcagtcactgaggtgtcagccagtgttgagccagcatcgctttctccatctaaggtttctgagggagaagccaacagaacaggtggctgaggagctcttcagatgtgctcttaggggcactctcatccagatgttctatttcaaactaaatggacttttctggctgccttttcagaatcctttatgcccagcgcatctccctggatggtggccctagctgtcatcctgaccgcatctccctggatggtgtccatgactgtcatcctggctgttttcatcatcttcatggctgtcagcatctgttgcatcaagaaacttcaaagggaaaaaaagattctgtcaggggaaaagaaagttgaacaagaggaaaaagaaattgcacgtaaggaatttgtaaagaaagtgtggaaaaatagaaagaaattcaaaaagaaaagttaaatgagtaggaggacaattgactgtcatagaaa

SEQ ID NO: 35574 - DNA, 2300 bp, Homo sapien
gtttgagactagcctgggcaacatggcaaaaccccatctactaaaaatacaaaaattagctgggtgtggtggcaggtgcctgtgatcccggctactcgggaggctgaggtaggagaattgcttgaaactgtgaggtggaggttgcagtgagccgacagcatgccactgcactctagtctgggagacacagcgagactccatctcaaaaaaaaaaaaaagagaaagaaaagaagcaaatgaacaaataaataaggatgatggatggatagggaatgaatagtgatatggattataataaagtaagaaagtttagtaaaatattaactctatcaatacaatttacatggtaggtaattggtattcactgaaaattctttcacctttgctttatgttttagaagttttatgacaaactgctggggaggaaaaagggagagggaaaaattttgtacttctgctgataacagagaccagaaataccactggcttaaacaaaacaagggttttcttgttttttttgttttgttttgttttgttttcatgtaaaatcaattcaggtggttgcagtccagggctgatctggcacctcagaggtgtcattcatgccccagactgcttctgacttcattctctgctgtctctgcatgtggcttccaatgtcaaggttgcctcatggtcccaggagggccgctgcacctccaggtcaaaagcctacatcgcaggcaagaggaagaggaagtacagagagtgtaccctcacactcccagctcttttggcccctcctttgaaggatctcttggagaagcataagcccacagctgtcacctacaaaacactggttccaactttgtcccttggtctctgctatctaccagatggaaaagaacgttgtagtacctaagaaaattaggccttatcaccaagaagaaagggggaatgcatgatgcagaagggaccagccatctcaatcagatactacacagtctaaattcaaacatttacaatataattaaattgcatcagccccagtcacatcttagccttaggaacttcgatcattgacttgcaatcccagaaagtctgttttgaggtcctaggccacaggaagaaccaatttgttttatagacatcttacagagacagcattcacagtttatctagagtctggcctcagagaatatgtactccactggcagcaggagaaacaaatacacaggaaaatacagtgtagcacagaacaggagctgagggtgaatggagatgctcagaaacacctgcactaaaaatttgctgaaaaaggtaaaacgtgtcaagcagcactgcctctggaagccagaaaaattacattttttgataacagatcctaagcctggatgctggaggtgcttaaaaatgtgcattgtgggccgggtgcagtggcttaagcctgtaatcctagcactttgggatctgaggagggaggatcacttgagctcaggagtttgagaccagcctggccaatatggcaaaaccctgtctctactaaaaatacaaaaagtagccgggcatggggcgagcacctgtaatcccagttattcaggagctgaggcaggaaaatcacttgaacctgggaggcgaaggttgcagtgagccaagatcctgcaactgcactccaacctgggtgacagagtgaaactccgtttcaaaaaaaaagtgcattgtgtctggttttctttccattcatacgtttatttgactctgtagtaaaatctcctcctcctccatgtacccatattcatgcaagcaaatgttagcaaactgccacagtagcattttaattagtgctcatctttctctcttcaccacattaaaatcttttcccattgtgttctgctgatatttctattatgataaaagacttaagacaagtgactatatagaaatacgtatatacacacaagaatgaaagagataaacagtaagggaggtagggcaggaatttttcttcaacgtgtacaattcaatgtactttcagttttcatttcagccttcctcagtggtttctgcccagcaactgatgagaaacatcacctctgagccaatcaaaaaacttattcttccaaagagagattgttattattcctcacgatgacccgacagtctctgctttctttttcctttcttccagaaggagatttaaccatagtagaaagaatggagaactattaactgcctttcttctgtgggctgtgattttcagaggggaatgctaagaggtgagtgggggaagtcgattagagcctggttcacaatgcctggga

SEQ ID NO: 35575 - DNA, 2300 bp, Homo sapien
tcagcctcccaaagagctgggattacaggcgtgagccaccacacccagcctttaaaattatttttaaacacttccctagtttggactatttctcttttctgcatttggctattgtagattttactgtattgagcagcctaaaacataaatttttgtcttagttcctgattttcttttttctgcaacactaattcctacaagtggaacatttgggtcaaagcacacaccttttttttttcttttaatagccattccttagcaaagcatataactttttttaaggccctttatatatatatggtcaaaatacttccagaaatatttaccttttcactaccaaagtatatgactactactatagatattttattttatttattgattgatttgtagagatggggtttcattatgttgaccaggctggtcttgaattcctgggctccagggatcctcccatctcaacttcccaaattgcaaggattacaggcatgaaccactacttaaacttgtattcctttatgctttttttcatttgcaatattgactataatcaggaaaaaaaatatatcctttatgaagaagaaaaacttatgtctcattctaaggacagcagagaaattgttaactcagggaaaatgataataaaaatgataccccctctatagcaacataaagagcagtttcgaggagcaaaagatgtggtgaaatgcattgtttactctgggtgggtgcaagatccaggcaggggtgaagcatggccggctgcacagatctctgttctcttgtttcctttacatccctccccacctccctctgcagatcttgttctcagaggccattcccagacccacagcaagagggattatggctgcaggcctcatgctcctttgttttggaagaaactgttgaggagttagtatttactgagcagctaatatgttcccgtcactattgtaactcataataattattgttaagtaatacacgaaaagttttaaatttaaagcattccaatattttaaaagtaaagggaacaaaaggccaagtgtcccttcactcactaacctctgatcttcagattagcatgcgtcttttttgagtttttcaggcatttacataaatagttatgcagaaatggatagctttgcttctgttcttcaattgaatctttagtatagttgtgcaaggtgttttttgatcacttagtgtgtctccgttatctaggttcatgacaacaaatcaactctttttacctgctgcattgaattccctccgagggatgagccgtcattcctctaagcagtctcctgatgggtggctggttcagttggttaccatttttatactttaaaaatagtgctgcagtgtcattctcacagaggcttctgtctgcacccatgcaagtactttgctcgacttgacatcaggaagtggaactgctgggccaactgtgcaattctaaatttcacacttcatgatattgtataagtaaataaagttgcaatggttttgtcccatgtctgagaccaaagagcttgtgaatcttagagcctttacttattgcttaccctctttgtgtccctaacccttatatcatgggcctggccccttgtgggtgcttggtaaatatttgttgaatgactttatgaagggaagaaagaaaaggtaagtaaggcctggtcttatttgcagctctgtgatcactagccttggattaaatgtggtgggttcagcccctgactgacttcaggtcccccaccaagcagtcttccttaatcctaccaggagtccactaggccatgagttgaccatggtgatggccaagagttggggctttgaggagtccacagtgtgggacacccacagcggtcgaccccggtggaaccagggagcccagtgaagagtgtcctgcatgaatcagagggggattgtggtgggttggacttggcaggggaagtttggggaagtcataggattctgaatattgttaaacagtacagtgaggattttctgatcgaataacagatgtgcatttcacatagacatgtttttacaggtgattttcaatgttgggactcaaaggtgaagacactgaaggacagaatttttggcagaggaaagatcttcttcggtcaccatacttgagttagctctagggaagtggaggtttccatttggaattctatagcttcttccaggtcatagtgtctgccccccaccttccagtatctcctgatatgcagcatgaatgaaaatggcaagtttcctggccttccttctgctcaactttcgtgtctgcc

SEQ ID NO: 35576 - DNA, 2300 bp, Homo sapien
gtataaaggaaagaggtgtaattaactcacagtaccatggctggaaaggcctcaggaaacttacaatcatggcagaagtggaagcaaacacgtccttcttcacatgatggcaggaagaagaagtgctgagcaaaaggggggaaagtcccttataaaatcatcagatatcctgagaactcactattatgagaacagcatggaggtaactgctcccatgattgcccccatgccaaaccatatcacctggtttcttgctaagctacctgatgagcaataaaccctcttgttgcctagaacacacatatttccgaatggctcaggtcaactttggcagagggtgaaacctggcttagctggatacttctggcacaagctgcttcagaagccctggacattatatcttcagataaaaaaactgaagccagatcttagcctgagttttgtatacttacagtgtccacttctgtttattccaaagaacagtccaggcttggctggaatgatccaatacttcctatgattttatcctcattagccactcaacctagaatccaattttaattatactccagaagcatcaagtggtaggtgaggctgccgtttcagaaagggacagtataagggtcagtccaattgaaaaagcagttctcaggacttgctttagctcattctcatcatagagctttctctgcagaaggaacctactgggtcctccttcctggtccttgaacttctgacctagagtggcttaatcctgctgccacctctctctcacactctgatgccgaatgattccaggaactgggccatgctctggtgggaatgaccttaccctgagcatgtcattcatgcattgaacagcagctgagagcagagctaaggctgatccctataaggagagaagaatcacatcctgcagaagtcagtctagaagagcaggtactgtagccacagcaaagacacagttgatacctgaataacaataatacaagacaggatatgggaacagcaaaagatttgggtgtcagaagaggctgagaacacttcaggcaggaacattcagagttgttcttggaggaagtaggcacgaaggctgggcaggatttcacggggcagagatggagcaaacaattcaagtgaaaggcatggcatgggaaagggagcgctggccacagggagtgcaacattgtgatgcaaggccactgtggagccattgctagcgtattaactgcaaagttttgaattgaatcagaaggtaattggaggcctccagactaagcatttagacacttgagggacatattcacaactgagcctcgggaagattattctgcaagatatctctacaatgacaagatttagtctgtggaaaagggatttttttttggagggaagagggtatgtgtgccagtgtgtatgtgtgtgtgtgtggtccttggactcaaccccaccacctactggcagaaagtcaaggccagctagaaagttttgttcacttctatcttctgtccctaccagaatgccacctgcctgagggaaagggtttttgatcataactcaggattctcagcacctcttatccgatagctttggaatgaatgacaaggccttcataacagccactgcaactgctgtctcctttcctttgctacccctcccgctccagccatgcctgcttcccccaagaccttccgtgctccaggcccaaactccaaagccagcaacttagacaagagtcctctggctttggaaagagggcggcttttgttttcctcctcatgtttcctccccagcaaaatctccctctacatagagaagcctctccttgtggatagtagcaaagccaccaaccttggggaccagccttgggaatctcaaggcttgagagagagagagagaggaaagaaaaagtatcttgctttcgaacaaacaaaaaggaaataaaaagacccgataatctcaaaaggttacttgctgcttgaaatttttgattcggtgtattctacctagtaactgctgagaaataaggctcgacaccattggctggttcactcacacccggccaatcctggactctaaaatacttagggaaatcttgggacactgtggaagcccagagaatctgatcccgggtcccacaacttcacatatcgcgagtaagtgggaggcaaagaaaattctttttctcctcttttgggacagtttgtgactagtagtgcctgtgcccctggaaaggttggagacttgggggacgactggagaattgccatttgaggaccaaaggagaaaagaaactacac

SEQ ID NO: 35577 - DNA, 2300 bp, Homo sapien
gtcctccttcctggtccttgaacttctgacctagagtggcttaatcctgctgccacctctctctcacactctgatgccgaatgattccaggaactgggccatgctctggtgggaatgaccttaccctgagcatgtcattcatgcattgaacagcagctgagagcagagctaaggctgatccctataaggagagaagaatcacatcctgcagaagtcagtctagaagagcaggtactgtagccacagcaaagacacagttgatacctgaataacaataatacaagacaggatatgggaacagcaaaagatttgggtgtcagaagaggctgagaacacttcaggcaggaacattcagagttgttcttggaggaagtaggcacgaaggctgggcaggatttcacggggcagagatggagcaaacaattcaagtgaaaggcatggcatgggaaagggagcgctggccacagggagtgcaacattgtgatgcaaggccactgtggagccattgctagcgtattaactgcaaagttttgaattgaatcagaaggtaattggaggcctccagactaagcatttagacacttgagggacatattcacaactgagcctcgggaagattattctgcaagatatctctacaatgacaagatttagtctgtggaaaagggatttttttttggagggaagagggtatgtgtgccagtgtgtatgtgtgtgtgtgtggtccttggactcaaccccaccacctactggcagaaagtcaaggccagctagaaagttttgttcacttctatcttctgtccctaccagaatgccacctgcctgagggaaagggtttttgatcataactcaggattctcagcacctcttatccgatagctttggaatgaatgacaaggccttcataacagccactgcaactgctgtctcctttcctttgctacccctcccgctccagccatgcctgcttcccccaagaccttccgtgctccaggcccaaactccaaagccagcaacttagacaagagtcctctggctttggaaagagggcggcttttgttttcctcctcatgtttcctccccagcaaaatctccctctacatagagaagcctctccttgtggatagtagcaaagccaccaaccttggggaccagccttgggaatctcaaggcttgagagagagagagagaggaaagaaaaagtatcttgctttcgaacaaacaaaaaggaaataaaaagacccgataatctcaaaaggttacttgctgcttgaaatttttgattcggtgtattctacctagtaactgctgagaaataaggctcgacaccattggctggttcactcacacccggccaatcctggactctaaaatacttagggaaatcttgggacactgtggaagcccagagaatctgatcccgggtcccacaacttcacatatcgcgagtaagtgggaggcaaagaaaattctttttctcctcttttgggacagtttgtgactagtagtgcctgtgcccctggaaaggttggagacttgggggacgactggagaattgccatttgaggaccaaaggagaaaagaaactacacgctaattctagaaggtaggaaagggagggtaggcgctacagctccggggtgaaggcggtcgatggaagtagcgggatccgctgtggacttgagagggggttctgggagagggaaagcccaccggtggggcggcgcctcctcgcctggctttacctccggtggcccggcgtggatcgcggggaggaggaagtgaagggaggagggtgtgatagaatccagcgacaactgaagaaaccggactctggccagagaagtgagccgaggagggcggaaaaaggcccccttgatcttggcattgatggcttacttcatggaatgtttaaggaatccctctctcaggagatacctgagccttcggatgcaggggactctctgaagttggggcactgatgagacctacttgagtgacgggagaggttgggcccgaccagcactgaggtgccaagactcctaggctgattctcctctgtaaccctaggcctcctgtccctgcctgctctgggtgctcatggaaccagctgctgccctgcacttctcccggccagcctccctcctcctcctcctcagcctgtgtgcactggtctcaggtagggatgtgtgccacttgctgctgtcacctatcagaaaggatcatcaaccctgtagtctgcaaaggcaaagaaagaaggactgtggagttgttgacttatcctttcattctgaacatgt

SEQ ID NO: 35578 - DNA, 2300 bp, Homo sapien
tggtcccagaaactcctaatctgaagcttagcacctcagctgctgtgtcaaaaatgacttggatccttcaggcaagggtggggtgatcattcttactgatataatttcaagcagcacagcttctgatagactgtgaatttaaaaatgagcaaatgggctgggctcagtggctcatgcctgtaatcccagcactttgggaggccgaagcgggcgtatcacctgaggtcaggagtttgagatcagcctgggcaacacggtgaaacccagtctctactaaaaatacaaaattagccgggcatggtggcacatgcctgcaatcccagctactcaggaggctgaggcaggagaatcgcttgaaccttcggagccggaggatgcggtgagccgagatcgcaccattgcactccagcctgggcaacaagagtaaatctccatctcaccaaaaaaaaaaaaagaaaaagaaaagaaataaaaatgagcaaatgaacatttaaataaataagtatgatggataaatagggaatgaacagtggtatggattataataaagtaagaaagtttcgtaaaatattaagtatatcactataatctacatggtaggcatattggtattcaccaaaaattctttcacctttgctttatgttttagaagtgttatggtaaactgttgggaaggaaaagggggagggaagaattgtgggattctgttggtaacagagaccagaaataccattggcttaaacaaaacaagggttttcttgttttttcttgatgttgttgtttgttttcatgtaaaatgaatttagatggcggtagtccagggctgacctggcagctcagagatgtcattcatgccccagcctgcttctgacttcattctctgctgtctctgcatgtggctttcaacctcaaggttgcctcatggttctaagagggctgccgcacctctagttcaaaagtctacatccaagacaagaggaagaaggaagtacggagagtgtacactcacactcccagctatcttggcctccattctgaaggatctctgggagaaacacaagcccacaactttacctacaaactattgattccaacttagtcccttgttctctggtatctatgagatagcagagcctattgaagtacccaagaaaattaggctttatcaccaagaagaaagggggactgcatgatgcagaagggaccagccatctcaaccagatactgcacagcctaaattcaaactgttacaatataatcaaatttcatcaaccccagtcacatcttaatcttaggagttttgatcactgacttgcaaatccaaaaagtgtgttttgaggtcctaggccacaggaagaaccagtttgtctcacagacctcttacagagatggcatttgtagtctatctagattccagcttcagataatatgtactccactggcagcacgagaaataaatacacaggaaaatacaatatagcacaaaccaggagctgagggcgaatgaagatgctcagaaacacctgcactaaaagtttcctgaaaaaggtaaaaaatgtcaatcagcactgcctctggaaaccagaaacattatattatttgataacagatcctaagtctggatgctggaggtgcttaaaaatgtgcattgcgtctggctttctttccatgtatacatttatttgacgctgtagtaaaatctcctccttcaggtacccatattcatgcaagcaaatgttagcaaactgccacagtagcattttaattagtgcacaactttctctcttcaccacattataatcttttctcattttgttctgctgctatttctattatgataaaagacttaagtaaatatgtagaaatacttatatacatggacacgcaataatgattcaaatagataaacacagaaacacaaacactaagggaggtacggctggaatttttctgcaacgtgtacaattcaatgtactttcacttttcatttcaaccctcctcagtggtttcctcccagcaactgatgagaaacatcacctctgagccaatcaaaaaactaattcttccaaaaagagattgttattattcctcacaataaccagatagcctctgctttctttttcctttcttcggaatgagagactcaaccataatagaaagaatggagaactattaaccaccattcttcagtgggctgtgattttcagaggggaatactaagaagtaagtggggaatgttgattagagcctgggctacaatgcctgggaggacaagagctgaatcgctgagagtggtgagt

SEQ ID NO: 35579 - DNA, 2300 bp, Homo sapien
cacagctatattaccttcacagactgtagtttattgtaaagcaaaaggaaatcaatgcttaccctgtatcctggttcttccagggttggcaggtccataaagaaccttgccaacgtgacccttcctgtctctatccctcccactacagagcatgattgggttaggttgttactatctaaccgggcacaccccagtagagcctgatttctttctaagctaccccatcgtcaactgatcctcttccttctcagaacacacacgtttccctctagctcagatcaactttggcagaggctgaagcctggcttagctggatgcttctggcaaaagggctacttcaaagccctgggccttatttcttcaggtaaaaaaatataaagtcagatctcatcctggctggccatgctgttagaccctttcatccttctcttctgcctcttctcaacagctgcccagtcctgtttggaattcatatacatacagttctaatactgatgtatttaccctcataagccactcaacccagaatcttatttgaattataatccagaaacatcaggtgacgtgtgagactactgtatgagaaagagacagtttaagggtcagtccaatggaaaaaagagttctcagagctttctttagcttattctcatcaaagagctttctctgcagaaggaacctactggttcctcctttccagtcctagaaatcctgacctagagtggcttaatcctgctagcacctctctctcgcactctggtgccaaatgactccaggaactgggccatgatgtggtgggaatgaccttaccctgagcatgtcactcatgcattgaacaacagctaagagcagagcttagagcttagagctgggccctgtaaggtgagaggaatcacatcctgcagaagtctgtcctgagaagcaggtactcctgtcacagcagagacacagtggatacctgagtaacaataatacaagacaggacgtgggaacagcaaaagatttgggtgtcagaagaggccgagaacacttcaggcaggaacattcagagttgttcttggaggaagtaggcacgaaggctgggcaggatttcacggggcagagatggagcaagcaattgaaatgaaagccatggcatgggaaaaggagcactggccacagggagtgcaacgttgtgatgcaaggccactgtggagccattgctagcgtattaactgcaaagttttgaattgaatcagaagggaattggaggcctccagactaagcatttagacacttgaggggaatattgacaactgggcctcgggaagattattctggaagatatctttacaattacaagattggagcctttgggagagggatgatgtttacgggaggatggtatgtgtgctagtgtgtgtgtctgtgtgtggctcttggacccaacctgaccacctactatctagaaggtgaaggacaactagaaagttttgctcaattccatcttctgccaccaccagaatgccacctccctgagggaaaaggtttttgatcctcagtcaggattctcagcacctcttatccgatagctttggaatgaatggcaaggccttcataacagccactgcaactgctgtctcctttcctttgctacccctcccgctccagccatgccagcttcccccaagccctcctgcgctccaggcccaacctccaaagccagcaacttgaacaggagtcctctggctttggaaagggggcggcttacgttttcctgctcatgtttcctccccagcaaaattgccctctacatagagaggcctctccttgtggacaccagcaaagccaccgacctcagtgacaaaccccagggaatctccccaaggaatctcaaagcgagagagagagagagagtcttgagagagaaagagagagagagagagtcttgctttcgaacaaagaaaaaggaaataaaaagacccgataatctcaaaaggttatttgctgcttgaaatttgtgattcggtgtattctacccagcaactgctgagaaataaggttcgacaccattggctggttcactcacacccggccaatcctgggctctaaaatacttagggaactcttgggactgtggaagcccaggagaccagatttcgtttcctgcatctccaaacatggcgacctaggagaaggggaagaacaattttttctcctcttttgggaaggtttgtgtctagtagtgcctgtgcccctgggcagattggagagaagagggacgactggagaatcgtcgagaaccagcggagaaaagaaaa

SEQ ID NO: 35580 - DNA, 2300 bp, Homo sapien
gagtctcagccaatcccagtagccgaacttcagtcggcggcagtcaaccctgcagccaagtgatcagactatgttcaaataaggccaactctgagctgtaaccaattaagctgtttctgtgtgtcacttcccttgtggaatggagctcactgaacctctctgatggctgcccgatcgttctgatggtttgcaaattgttctttgttcaaattaaaccctgctaaatttaatttgtctaaagtttttattaacaacagaaaactattgattacctttttttgtgggctatgattttcagataggaatattaaggagtaagtggggaaaattgcttagagccagggctacaaggcctggaagaaaagggactgaaaagctgagaggggaactggcacagagaaaggggtgaggatggagagggtagaatgcaaagagtaaggacctgaagaggctgagatttggctgaagagggacaacctgaatagagaaaccttccaactgcatgttcttaggaactaattacagtcagaaaggagcaaagactccttttttttttttttgtcagagtctcactgttgcccaggctggagtgcagtgacacaatctcggctcactgcagcatccaccttcccagccaagcaattctctggcctcagcctccggagtagctgggaatacaggcatacgccaccacacctggcaaattttttgtatttttaatagagacggggtttcaccatgttggccaggctggccggccaggctggtactgaactcctgacctcaagtgatccacccaccttggcctcccaaagtgctgtgattacaggcatgagccactgcccccagccaggagacgaaaagactcctaaaatatctcctggttatgtttaggaacatattccaaaaggttctaaaaagagatgtgccttaaagattcatatgtatattgtaaattttcaactccatattttctagatgtccccaacatccccacaacagcccgtcaacaccctgcccaggtgaccaagtacaccagtgcaacagggctggttcctgcctgcttgcccttgcttaactgtgacctagtgacctcctcccatcttttgatctttattcctctagttcacttcctttgtcactatctctccacccacacctacttgccttaatcaccttaacagcaaaggctgaattattgtaaacaaaaggagtctgtctttttagtgcatgggtccccaagtatgtatatatgaatatgcaatgaaccccaggatactaagcttcacttaaggattttttcctacaaggactcagctgtcacatttgggggcattttgttttgttttgtgaatgtttaaccaagctaatggaggaactattggtacaatgaactcaaaaaatgtacaggatcagcagggcatagtggctcacgcctgtaatttcagcactttgagaggctgagttgggaggatcacttgagcccaaaagttcaagatcagactgggaaacatagtgagacttcatctctaaaaaattaaaataaaataaaataaatacaaggaaaaaagaaaaatgtactggattgaggggaaaaatttatgatgcaaacagaagagcatttatgattgaagtgagagaaggataatgggggaggatggtgaaagaacatcaatctaaatttatatttaaatttacatgaatccagtgcaggcagcatctcaggggagggaggagtctatttttctgttgatttcctgggctaaattcctgactgactcattgctgaaagtaaataacatattattatagttgaaagatttttttttagtgtagtgatttcaaactgtgctcatttatatgcaacccatgaacgcctcccttctcctatgtctccttttgagttgtagggccagtttgaagctttatatatcatttaccaaacttagggtggtgagtgggtgctgatggcagcctggtttgaaaatctccactggagagaagacacagcaggattcagatgcaaatgaccagagcactccaagttggaaagaactgctgagcgggtctgtagagcccatcgctctctcctgtctattcatcagctaggctgaagctcctgacagactcacaccagtatcttgctgctccagaaaggtcgaagatggcagttttcccaaactccggcttgcccagatgtctgctcaccctcattcttctccagctgcccaagctggtttcagataggtctctctctctggcctgcagagttaaaacatctcaataaatataaagtataa

SEQ ID NO: 35581 - DNA, 2300 bp, Homo sapien
agctaaaagaaattaaagaccagccaacatagaaaaatctccttgccttcccctcaactgtctgaaatgaattataaaacaccccttttgtaaagaaaaatttacatctataaaagaaatttttactagtagaggtatttataccaggaagagaactgctttgagacaagttttaccacttggggaacttttatctgtaacaaggtaacctttactcaccatacattttcttctctcaccatcccataatttgtctccatcgtttcccagaagccctgacttcctcctttctgtagctcaggatgctatattaacttcaatcatccggcccttctttgagtctcatattttgagatttgagggactcctgtacatatgcatgtaattaaaatggtttttctcctattaatctgttttagataaatttaattaatagcctagccaaataacctagaggggtaaagagaagcagatttttccctcccctacacaaggaacaaccaggcatgtctagtaatgacaattctctaggaatggggttttgaaggagccccaacccctttctattccctccagtgactgtcaggcgctgtttttcactgtgattgtggggtggtttctaggctactgcagagctgtggtggggtggtggtagtgtaataggacatgttaaaatgcctataaaacgtactgttcttactgaggttcagccatttttcttgaataaaattcactctgattgctgcaagccttaggttaatttacagagttctgagaaagttgattctggcaattttttttttttttgagatggagtttcactcttgttgcccaggctagagtgcaagggcacgatcttggctcactgcaacttctgcctcctgggttcaagagattctcctgcctcagcctcctgagtggctgggattacaggcatgcaccacaatgcctggctaattttgtatttttagtagagatggggtttctccatgttggtcaggctggtctcgaaatcccaacctcagttgattcgcccgccttggcctcccagagtgcaggggattacaggcgtgacccactgcacctggccttttctgccaatctttgccagtgtttactgcttttatggagggagggattttcagaagtcctcacttaaccattctcactgacttctctacgtgtgtgtgtgcgtgcatgcacacgtgtttaatgtctaaaaatataatttgaaaataacttgtgctttaaaacctcagccttttcctcccagggtagatttggttatcttagagcagcaattctcagatgttttggtctcatgaccttcttatactcttgaaaataattgagaatcccagagagtttttatttatgtgagttatatctatcaacacttagcatttaaaaattaaaactgggctgggtgtggtggtgcacatctgtaactccagcacgttgggaggccaaggtgggtggatcgcttgagctcaggagttcgagacaagcctgggcaacatagtgagaccttgtctctacaaaaaaatacaaaaattagctatgtgtggtggcatgcacctgtaatttcagctacgtgggaggctgaggcaggaacatcacttgagcctgggaggtgaaggttgcagtgagtctagatggcaccactactctccagcctaggcgaatgattgagaccctgtctcaaataaataaataaaacaggttttttttttttttttaaatgagagtctcgctctgttgccctggctggagtgtagtggtacaatctcggctcactgcaacctccgcctcccaaattcaagtgattctcctgcctcagtttcctagtagctgggattacaggcatgcaccaccatgtctggctaatttttttatttttcatagagacaaggtttcaccatgttggccaggtctgactcctgggctcaagtgatcggcttgcctcggcctccctgagtgctgggattacaggtgtgagccaccatgcccggcccttaaaacacagcattttaaacacaataatacacattgtgacatacattccaataggtgtcagagggatgatgtcatcatgtcttcaacatctggaaaactccaatgcacacatgtgagagtatgtgagtaaaagaggcaaataacttaaaaaaaatttatttatttatttttaaaaatagagatgggggtctcactatgttgtccaggctggtcttgaattcctgggctcaagtgatcctctcgcttcttttttttttgaaacagagttctcactctgtcaccca

SEQ ID NO: 35582 - DNA, 2300 bp, Homo sapien
ggcggaggttgcagtgagccaagattacgccactgcactccagcctaggcgacagagtgagattccgtctcaaaaaaaaaaagaaaagaaaagaaatatgcttataccatttgatctgatgactctatttctggaaatttattaaacagtttatcaggacattatccaatttgcaaataaagacttatatataaagtgtattatttacaataggaaaaaaatcccaaatgtcccacaatcatggcaattatacaactattaacaatattttgagttacacaaaaagtctaattgattgcttttatgatatacataagcataaaataaatcttggaaggactatgccaaaatgtgaattgaggctatcattagttagtagattaagtgtgacctccattttataaaaatatttttctgtatttttaaattttttcataacaatgagaggtaggtttagtataaattaaggaattgtaggcctcatgatgagttgcttcaaaagaaataattgtcagggaggcaacttttgggccctgtaaacagaattcacagcctacccttaagactggcctttaatggagttgttccaacagacacagcacctaaggtggacggacgctccaataacgaagatggctatagacagaggctactgctaccttggcctctgggctttcatttttcaacccgcagaaataataatagaataacaatttatcctccgctgagttcctactatgtgctaagcactttacctgcttaatctcacttaatcctcccaacacctcttcaagaaaggtatgatcaatattattaccattttagagatcaaagaactgaggcttggaaagaggaaataactggctgaagccatcacatctcatttgtgtgtttccttgcctctcttctctttttctcttttctgcctttcatttggtccagctcatcaatgcatatcttgatttctgagctgaagaccacaaatccagttttccatctctctgaaaaacttttcatctcccttttttttttcctcagagtgaatataccaggccacctggaggcaggctttcctgagagcacctcccgcttccttttcctgctggcttttaacttttgccccgggggccacagccagctttctcacttggtagcagtggcctcttgtgcctttttctccaagatcacccaggtcagtatgtgtggttactctcagctccctgagggagtgagcagccagaggggcatagcatacttctctccctccagctcctttctccttggtcctaggccctctactcttcaagcccttttgcttgcttcagctcctgcttcttgctccatctcctcccatcttttctctcttctccaattcatttccttggactccatttctgcctttatacccttatctttattatcattgccaaaagcaaataccaaattcttgtatttgaaaaaagactttggccaggcacggtggctcacgcctgtaatcccagcactttgggaggccaaggcgggtggatcacgaggtcaggagttcgaggccagcctggccaacgtggtgaaactccgtctctactgaaaatacaaaaaatagcggggcatggtggtgcgcgcctgtagtcccagctactccggaggctgaggcagaacaatcgcttgaacccaggaggctgaggttgcattgagccgagatcatgccactgcactccaagctgggcaacagagcaagactgtctcaaaaataaataaataaataaataaaaaggagactttttttttagtgcagtgattccaagatttgttcatcgatatgcaaccaactaatgagtgttatgcctcacagttcccttctcctaagttttagagttagagtagtgggtgggaaggtgataaccacagtgtaaactaaaaatccatactggggatggaggctgagaggaggtttcaggggcaaatgaccagaacacttgcagctggaaagaactgtagagaggactttggaaagcggagggttgacagagccggtagttgtctcctgtccattcatctcctaggctgaagctcctgaggggactcacatcagttatcttgctgctccagaagggtgggagatggcagttttcccaagctccggtctccccagatgtctgctcaccctcattctcctccagctgcccaaactggattcaggtaagtctctctctctctctgggctgcatagttgaaatatatcaataaatgtaaaataaacaatcccacttggctctccctggagacctccactggatcca

SEQ ID NO: 35583 - DNA, 2300 bp, Homo sapien
cctcataactttttaatttacttatttgtatttttaaaatcaacaaataaagatatatatatttatgatgtacaaaatgatgttttgttctatgtgtacattgtgggaaggctaaatcaagctaattaacatatccattacatcacatacttatctttttctttttgtggcaagaacatttaaaatccactctcttagcaattttcaagtattcaataacgttgttattaactatagtcaccatgttggacatagcaaaacttctgaatcggtaggcctgagaagaacagaatttgcctctaattgattccctggagatggggatttaatgcttaatttaagggattaaacattgtattctatcaattgaactcacgatgaaagtattataggtgtctaagaaagctgtttctaatgtccacagaagcaaaatgacttatctaagattctccaggtagtgaccagttctagttctgtctgaaattcgtactcaggtcccctgacttccagtcagtgatattccgaccatggcatcctgactgctaacccttgctaacaaaatttgaagtaggtcacctctgacctttgtttatgtttagaaaagttgttgtgctcaaggccttctatcaagtacccgctgcgccaggtttagtaaaatacataagctactccccatttttgttgttgctgtttttgcttttgctttttaaagtttttattacagtataacatccacaccgaaaagtgcgcaaatcctccataaactccgacagagaggcaagacaagccaggcttcccacgctcctgtcccctccaccggccctgccaagggtaaccacgtgctgggagatttgcagcacaacgcaaaggagaaggattagcgagcaccttgttccagcaaaaactggagcaagcctaaaacttcctgggaattaagtgtaaatttaagccaggtattctagtaatgttgagttcaacaggattgccattattttaactagaattcagttgagagcagagcgccatcgccgtcttccgccttagtcactcggccctgggctggctcacgcccgccccgccccctccccgcccctcccacgcccgccccgcccctcccacgcccccgcccccgtcccgctccccctaccccgacccgccctccctcgcccgccgccccacccgccgcagccctccccgcgcagcctgggagtgactcggcgttcactcgggagacgccgctctgtggcccggacaaccggtcctatgcagcgccgtccgaggcagttcgcggagaggcggcttaccttttaacccaggaatgcccatatcttgagaaaaagaacaacaagggggtgggcgggggtggggacatggggtaggggggcggctggtggatggggaactaatagcgtttagacaagagacagaagtgagtcctgagcacaatgtagcataagcgcgtcaggatggccgagcggtctaaggcgctgcgttcaggtcgcagtctcccctggaggcgtgggttcgaatcccactcctgacagttcgtacttttagtatttagacacaaatcgagtttaagtttacgctacgttttcctacctgctctttgtgacatggtcttctctctttttaaaaaataaattttccgagttccggaataaaagcactctttgtttttattagccactccaaggacagcaaaaagtactctgtactccgaaaataatttcagaacctaccggtgttttgaaatctcacctcctttttccgtttctcctctgtctctagttgtctttccctctccctccttcacaggcagagttgaataaatgttactcttcagttcatggctcattacattactgcagggctcctctttatttagttatagttatctttttaattccatttcttcagtctcattccccacctcatccttactccccgtaagaaatcactgcaagagttccggtctggcagagagcgcggagagacgcagagcgcgggccgctcctccagggcgctccaggccctccggccccgggtcggcgggtgagctagggggcgccccgggacaggccgcgccctctgccctgcagataccggaggcctctgctgtggctgcccactggctgggcccaggccttgaagcggtggcgaacgtctcttccctaccctacctcggtgactgatggcggcggcggcctctcccagtccggaccctgccggccgtcgggtctcccggcccaagcctgccgggcctggacgaaacccccgccgagcagcctggacgcagc

SEQ ID NO: 35584 - DNA, 2300 bp, Homo sapien
ttaaaagtattattctgagatagagtccagaatcaccaagctgcccttggggtccatagtacaaaacctaacgagaagatccctatgctattgcctagggagtaatccataacctaggtctaccttaatatttatgcagaaagagcagaatattttttgtaacggctgttgaaaccttatgaactgaaaacaaatattttctaatctcaaagtgtatattctcaatatcaggcagttttacttctgtttagtagacctcatcttatttaaaatgctcaccaggcatggggatgatttattctcagaaatatggacaaactaaaacacacacatatgagacgtttgtttgctttcaaagtgaaaaagtgaacattcatatgagtgtccgggttgatgatgctccttataaagctgtcaaattctgagatcaaggccctgcagtagaagcagcatgcagtgaggaggcctagcacagtttcgcttagtaaaatatttgaagaaaaaaaaaaaaagacccacagagagacaaatgaaaactcagaccacgtcaccgtacaacggcttccagtttcctacagaataccagccagagtccttacaagagcctgtaaagctggccagagtccttacaagggcctataaagctggaggtggtctcccaggatctcctattcctctccactgagcaccggcctcctcaacataactcccaagcctgcttccacctccaggccttttccctagcgatttttccctgttccagatcactcatttccccgatatcagcatttatccctcattcatcactttcactgctggcctttcctatcctctttccctgttttattattatttttctccaatcgcttatcactattattttgtttatttaatgctttattatccgcttccgccactgccatgtaatcttgagggcaagggtctctcatgttttcttcaccgttatctgcagtgccttgaacactaatactggttgaatgaacgaacgcattaatggagcggtgatattggggcagagaggatgcagggcttgcttttcaccgccatttttcagccggcagagacagaccgagaaaggaatgaaggccacggggcgtgtgcagaagtagctaccagagagtccatgcgctgcgagcctggaccagcgggcaaacgcggcttacaggcgttcacccagatattacgggtacaacctagtttcttatgaaatacctcgcccctaaggtacgcgcagggccagtggcgcaatggataacgcgtctgactacggatcagaagattccaggttcgactcctggctggctcggtgtaagcagggtcgttttacaactttctgactccgcaggagtaaggaaattcctgcaagataaatttgcctggaagactcagaagcaagaggggcagctcccgacaacatatggggttatcatttctttgcggagcattctgccactgaccacgtggtaacgccaactacgccagagaaacgctcgccctacccaagttgtgcccagccttgcctggccattttggccgaagaacgaaggaccgttcagagattaaattaaagtctctattgtgttcttccctattcagtcatttgtagaataaattctatggcttcagtttgaacactggaggggctgggtctgagcttttcattggtttttctggtttgagaggtcggtacagagacgcacgcgcacatcagcaaaacacgcacttggaacgaagaaacacggaactaggcaggaagaactatttactctgaaaaataagcccttagtgggtttccgtagtgtagtggttatcacgttcgcctcacacgcgaaaggtccccggttcgaaaccgggcggaaacacgtttttttttcctcatcttactacgaaattcttccagtgtgtatcttttaaagactttttcaggctgtcataaatttcctgtcttcttgtcttgctagatcggggcagcagtgcttagggcgggcctcagaggctcacacacgtatcgccagggggagaaccagctctctccggcttggactcggggcggctccccgcctgcagccccggaagcgcatcctcaccttccctcgccttcctgttcctggcggagccgggctccgctcgtcttctctgtcttagggctggtgctggccctgcccacgcctagggctccggcgcgtcacgggcctcagctgggattcccgcgcccctcggacggccacgagactcgggtaagtgcctcacagactttgtgcgctaccccggaaaatgag

SEQ ID NO: 35585 - DNA, 2300 bp, Homo sapien
atttaaccgtttgaaaagtgtattttgaccaaatgtataaaagtaaatacatctgtgaaataggataacttattcaggcaattgaggttggagaggagataaaacattacatttaattcatcgagactcgccccactcaaataaatgtttcatggacttgaggagattaatggccaagttaaatgtactttcaatttttgttcagaaaagaaaaaaaaaatctgtgtgccataaaggagtgaacattgggctcaatggcctacttgcacaagaaggatcatttgccctgtgcatgtttcattatatgacaaggtaattatctttaatggaacatgaaaaagaatgaaacagatttttttttctcttttcttttttttttttttttttttttttttgagacggagtcttgctctgtggagtggctggagtgcggtggcaacatatctgctcactgcaacctctgcctcctaggttgcagtgattctcctgcctcggcctcccgagtagctgggattacaggcgcccaccaccaccacgcccggctgattcttgtagttttaacagagacaggggtgtcaccattttggccaggttggtctcgaactcctgacctcaggtgatctccccgtctcggcctgctgaagtcctgggattacagaggtaagtcaccgcgccgggccataatgaaacagatttcggatgccagattccaccacaagtggattttttcattaacaagggaggataatagctattctgagcttcagagtcatagaaagctagacaagaatcttacactttgcaaaactaatatttgaaatgatattaccttgtgttaatcatttaaaaatgtatcattttagcacacccatggataggtttttgctgagttaagaattaatgtgatggccagctgctgtgggctcacgcctatgatcctagggctttagaaggccaaaacgggcggatcacttgaggccaagagttcgagaccagcctggccaacatggcaaaaatcacaactctactaaaaatataaaaattaggcgggcgtggtggcttgcgtttgtaatcccagctgctcgaaggctgaggcgggagaacgggagaatcgctcgaacctgggaagcggaggttgcagtgagccgatatcgcgccactgcactccagcccaggcgacagagcgagactctgtctcaaaaaaaaaaaaaaaattattatgctttcgaagttgcattatttagcctgctcttccttctcttcctcctgtcagttatctcaataaaatcccattaaaattgcattgttaaagtgtttcaaattctatttttaggtagaggttaaaattggttatataatgcattcatcacaacaaaagatggtcattgctaaattcttatcagttccttgtgcctccttaacattttatgtttctttttgtaaactagtgagggtggtgctcccgttttctccctgtttcagagaaaagggcctctgaatatcagtcagttccgaaggggtagtggatgtcaaaagaacatcaacgacgcaggtaaacaggacgacaagcatccacgattgcccaaccttccgcagagatggcatccccagcgggaagtgaaagtcgtgtgaatccttcgatagctcagttggtagagcggaggactgtagttggctgtgtccttagacatccttaggtcgctggttcgaatccggctcgaaggagttcacaattttttttttttgcgtaagttttaaaattcattctcagaaatgcgtatttcacttatacatatcctcgataagaatctatttaaaactattctggatgtgcagtgaatctctttaattttttattattctccgtaacaatttttaacacgcgccatcaagacttcatccctataattcgtataatccaaccctcttagaagccctgggcactgaggaagtgaatcagacactggtccactgggctagagatccacagaggcgtctccacccctcaaccccggatccacagccgggggaaaggggcggctggtgggaattactcggagcaactggtaattggtggggcacgcgcgtgccctggtgttcagagttctgaatcgttgcgagtcagttacaagctgaaccactagcgtctgaaccctatacatctgaagccgggatgaaattcaggagttctattcccccttctccttttaattgtcatggtggtgtctttcgaccctagcagagaatatgtggtcgatattagaatcacctggggagattttacaaagcatctatgcttg

SEQ ID NO: 35586 - DNA, 2300 bp, Homo sapien
ctaaagaatccaaaacgagggtaatgacatccttcgatagctcagctggtagagcggaggactgtaggggtttgaatgtggtcatccttaggtcgctggttcgaatccggctcggaggagttccatttttaaaagtgtctcttctgggcctgaaataaggaaacttggagaacgcatgtgcagcttgcttattcaggaatttgtaagacgctcagagaaggaaaataatccaccctgaaaattgctaacaagggttgcttcacagacagttgagtgggactcgattttcaccaagttgagaagggatcatgaggaatgtggggaacgggaagaacacgctgccccaaggcttcatttttttttttttgtcggtttcacggtcctttagcaccccctgttatattgatacttggtgtgaataaacattttattaatgataatttcaaatatatacaaagtagagaaaatagctaatagctaccattagccaccacactggcacaacttaccgacactcttgcatccatcatgcccctcccctagctccagatcttttaaagccaccccaacacgtgttctcatttcattaactgtactgtgttttgaagatgtcagtgtttataattaaatagcagtagacggagtttatcgctctcatcgtaccccgctcctcttcaaaaaaggagcagtggacacctacctgacagaaagttctcttcaataaagttaatgaaacaggcgtgtttgaattcgagaagtctattattagacttttagacactccatgaaagagtgcagggccctgttactttagaaatatacttggggactggcaaaaactgtcatctctgattttaatagtggacacatttactccctgcttccattctctgggctactctgcgctcttggagcgagatgggaaattttgtcaggccgcagcaaggacggatttatgttgatagtcatcaaactcgccccgggctgcttccagaaagctaaccggattacttgtacgcggttcccagcactgtcctttgcagtcagcttgtcgctggcgccgatgggaagaactgaaacgcctcaagggtggggacggcgccccctgctggtcgcgccctcgggcgacgataagagactgaggacccgagcccgcgcggggaaaactgccctgagcttggcttagggatggtccgcaggccgcctggtgggagcaggaccgccgtggcccggtccgttctgcggttgcgtaggtcatagaaggaaaagtggtttgtgatctgatagggaatctgaggacagacccagggagagcagaaataagcgcgccgccggggggtcgccagaattggaggcttgtgcgcctctgacaagtatttgcaacataagtatgcatatggataatgtatcaatacacacgtgtaatagatgccaaacaaattcttcaaataattgtcacacatttaaattttcagacattcacaaaatcaaatgtaaaatattaaactgaaagttcacaacttaaattttcaaaaattaaatctaattaaatttccaaagttgaactgttttcaaaattaaattttaaaatattcaaaattccgaggtaaatttccagaaatagttaaaacctcaaaactcaaaatttttaaatgaaatttataaactttaaaaggtgagtcattcctcagctggaatcgcacccggggcccttgaataaaatgctattttgatcgctagaacacatagaaacttctctaaaattgttctgcaaaattccctaaaaagccggcatcaacccgccttttagcgtctcgacaaggcgttctatagggtaggttatatttggggatctgccttttctggttctgcctgtcctgagttggagatctgaccgggaatctgagcctaacccaagtttcccatcccgcttccacgctctgaatcaggcttccgacctgacacaccacttcctccctctcccctcggccttcccctggacccgactgtattgcccaatcatttcctttcatttgtcatcaccaccttggacccgccccctcgtctcaggccgtcgcacgcgttttgcgtcagttggcaaggcactttacggccgtcgtgccgctcgtgtcagtcaacatggaggcagaggaatcggagaaggccgcaacggagcaagagccgctggaagggacagaacagacactagatgcggaggaggagcaggaggaatccgaagaagcggcctgtggcagcaagaaacgggtagtgccaggtattgtgtacctgggccatatccc

SEQ ID NO: 35587 - DNA, 2300 bp, Homo sapien
tttgtttctatttaaacagcacttgtttttttatatgaagtaactcatttaatccacaactatataatattgttatccccccattaaaactgagctcagagagatgactcaatttgcctcttaatattttatcctttgttcctcaccttttccccagcttttcccagtgtgcatatggtgaatgcttattacaggaaattcatgagaaatgcacatgttatagactagagaatgaagtgtacctgccaatatgagtggatttattttatctagcaccaagagtagcaaactgagtaataattctcagtcatgatcctgtggttgtagtgtatactctgattcaacttagtttcactcctgactgagaagctgggactctgcatttgatggcaatggagtgggctgatttctttccaaataagttgaggtgggactcctggtagagtaagagggctttaatagggtatgtctgggtgcctaaaagctttctctctctttttttttttcagagacagggtctctctatgttgctcaggctggccttgagctcctgggctcaagcgatcctcccgcctcagcctcccaaagtactgggattacaggcatgagccaccacgccctgccctaaaaatgttcaaaagtcgtatttacagctactctcaaattcctttttttttgtgattccttataaaacctttctccctgcatttatcttgttatattacagtagaattatgaggggaaaatcctttggtggaagtctagggacatgctcagttcccaggaggcttaatgtgaattttagtgaattgcttaagatccagtattagatctgctggtccctgcccaccccccttttattttttgagacagggtctcactttgtcacccaggctggagtgtagtggcatgatcctgtctcactgtagcctccatcttctgggctcaagcaatcctcccacctcagtttcctgagtagctgggaccgcaggcatgcaccatcacgcccagctaatttttaaaatattttttgtagagatgaggtctcactgtgttgcccaggctgctctcgaactcccgttctcaagcgatccacccaccttggcctcccaaagtgctgagattacagccacggtgctcggctcccatcttgaaatcaatacctgacagaatattaaagaaaatgaaaattggccgggtgtggtggctgacgcctgtaatcccaacactttgggaggccaagcctagtggatcacttgaggtcaggagttcgagaccagcctgggcaacacggtgaaaccctgtctctactaaaaatacaaaaattagccgggtgtaatggcgggcccctgtaatgccagctacgcaagaggctgaggcaggagaatcgctgcttgaacccgggaggcggaggttgcagtgagccgagattgaaaatgaaaaattttctatcttctgttaccagggcccttgaaaccacacttttttcgcaccccttgttaactggagacacgaaggcgggcggaggggagaggccatcggaaacctggcaatgtcttttgcagctgcatggtgtgtgcccagccaccttcagcagttattgtggccagtctgtggctgacctgggctatcagggttagcgcactccagtgagctcccccagcacattgcctgcaaatgaattcagagaacttctttttgtttttcacctttgcctccaattccattgtgtcaattatcattgattatttaatcaggactttatggttggacgtgcagcttcttctaatctttttttcttttaagtgtttaaaagaataatgctgacatgagtcaattttagttgtacaaatacagctattgtgtaaaaattgtcagaagcggaattgcagagtctaagagagaccatctttggtatttattttgttagcaagaaaaaaattgagagtctgataatttaggaaaataccagtcacaggaaaataccagtcacaggaatacaggtggaaacctagctagaggtctccaccccttttattcgtgctctattgtgacgtccaaagcctgacccaaggaactgattcaggtagaggcgacgccagctcagtgtagggggcaagctctgcaagaccttggccgagtgacttctgctgctttttgctgtggggactctactggatggaccagcacatgagagagatggagtttggaaacaaaacaagtggttcagaaacatgggattgctttcatatctactggcatttagaaggagcttggtaaatttaatcaagaaacaagga

SEQ ID NO: 35588 - DNA, 2300 bp, Homo sapien
ccacacaggtgagaagccgtataaatgcctggaatgtatgagaagttttactcggagtgccaacctaattaggcaccaggcaactcacactcacacttttaaatgccttgaatatgaaaaaagctttaactgtagctcagatcttattgtacatcagagaattcacatggaagagaaaccacatcagtggtctgcgtgtgagagtggcttcctcctaggaatggactttgttgcccaacagaaaatgagaactcaaacagaggagctacactataaatacactgtatgtgataaaagcttccaccagagttcagcccttcttcaacatcagacagtacacattggtgaaaaaccgtttgtctgtaatgtgagtgaaaaaggtcttgagcttagccctccccatgcgtcagaagcctcacagatgtcttgaccaggcgagaagctgtaataccaatattaaaaattatttatgtatcagagaactcattaagatgaggacaaatctcagactttgctcagagctcagaattcagtggggaccagagagcctgcaattggaaatatgagaaattctttgcccagagagctgccctaacagaacacttcatcctcactccaacgagaaatctacagatgcccagaggttttgaaaacttaccgtctgagctcaaatttgatcactcacaagaggattcatacaagtgggaaaccttagaaatgcactgagtgtgagagagctttctactaatgctcagcccttctcgttgtaagagaattcacaccggagaacaactttttaaatgccttcagtgtcagttgtgctgcagacagtatgaacatctcattggacctcagaaaacccaccctggggagaagccccagcaagtgtgaaaaaagcttctaacaaaactctgacttacccatcagagaagccatactggtgaaaaattgtatatttgtcttaagtatggcaaaagcattcgttggagagccttacttgggtttgcacccaaaaaaaaaaacccaatctgaggaaagactgcaagtgtctgaatgaagagtgcttgtcaatgatcaactcttgtggtacatcagggaactcacataggtgaaaaaacccatacttaccttgagtctgagaaaacctttggtagaagctcctgtcttatcaggccccaaaaaacctgttctgcagtgagagatttaattgtgggtgagaatctatgtacatataatatgtatgagaagactgttctcatagttagttgactcatatggtagagaggactttacatgaaatcagtatgaaaatagttttttagatacccagaagcttgttctgggagaagctagggtgggtcagagtagacctgatgggtaactcaggtaaagatgcttttcttttatctgaactacttaatgattgctttacttttactttttaaaaaattcagaaatccaataaaggaaaggacggtaaccttatgatagaaggtgtggcatgtgttactgttgggggaaaggagtatattgactttgccttggttgatatttttatgcttgtctaggatgggactagagtgttgatagtaacatggcagccttttgctggcagtgaaatgaacttaagaagctagggagtagctatcctagatcaaaactctcctaatagtttttcctttgcaggaccaatcttataaagaaacagcatactcagctttttacttagtgtcagttgaggcatactctcaaaagttttttcccctaaaatatctttcaagttattactggtatttgaaatttcaagtttagaaattcatttctttttaactcaaagtgcaaatttcatataatgattatgatggttttagtgtccatatttttgtggcttcacttatcatctctttcagcagtagctacccacagtcagctcctagtaaaatggctacaggaaaactgaaagaaaagtttaagcctgagtaggcatagagtaaaaaatgcataatgatgcattattaatataagagtaaggctttttttattttgagtatcctaactccaaacctagtgttcttttcactccattatcctgctgtttatagcaaatcaagacccataatgatacgtctttcatttatttcagttctgccaaggaaagagaaaataccttttaatcccagggaaaggattgcaatcaccacattataaggtatatggcgtggaatgcagaattctaaatactagaagggaaaagtagttggcagattcatcagaggcttaaggataagtacttgtttcca

SEQ ID NO: 35589 - DNA, 2300 bp, Homo sapien
ctattccttcgagtctcaccttatgtctcatctcctacagagtcttttctgactctttctcaaagttcttacaaagtgcttcacctctatgcccccagatgaccttatacaacttctacctctaccacaccacctaaaacccctgccgtctccataccagactgtgagccattaaaggagtggtattgagtctcactggcctttaattcctaacacacagcatagtgtcctgtttttttggtttttgtttctttttgacatggagtttcacttttgttgcccgggctggagtgcccttggctcactgcaaccttcacctcccaggttcaagcgattctcctgtctcagcctcccaagtagctgggattacaggcatgcgccaccacgcctggctaattttgtatttttagtagagacagggtttcaccatgttggtcaggctggtctcaaactcgcgacctcaggtgatccacccgcctcagccttccaaagtgctggcattacaggcgtgagccaccgtgcccggcctatggtgtcctgttaattggaggtgctcaataaatgtttaactgaataaaacaattaataaagagtactttgggccaatgtatcctgaaagaaaaggttgaacagttcaattctacacatattcagaccttgttatatgcagtgcagagatcagaatccaacttgcttaatttttattccaataattttacacaatacactcaccactattgaggtagccataagtatagtgactgcaagcacagaatctggcatcagactgttcacattacagcttcatcagtaatatgtgatcctgggcaagctacttaatctctctgtgcaccagtttcctcctaaaagaatacatatctcacacgatttttgttacaactgaatgagacaatagtgtaaagttattagaacagtgtttgatacatgctacacactcaaaatgttattattcaaaatattaagacaaccctgagtggaatattttgaccttgaaagtttcattaaaaataaacatgaaagtagaataagctgtagaccctctgcggaagaattccactagtaggaacatgattagttaatactgaatacgtgtctcagagactgcgctccccaattactaaacctcagcaactggctcacaatccaagtccttggccaggctgcccagggtttagttttccatattcctactactcatcttttccctttgatagctgaggacatttaaaaactgttttttgttggtttgttttttttaatttaacaattgagctgggagaatacccagtgttcaacctaaagaactgagttctgttccagccccaccactaggtgatttactcttagctgattccaaatcagaaacataatcagcaaggactggggaacctcccacagtactttctctcgctgctgttttctccacccacacaagtccaccacttttaaaagcatttcttccatctcgctggccacatcttcgtggatgacagcgctgccactgtgcttcagaatcctctatctctcccagatctttcctggtgtttctctcagggtcagtggcatctaatctttgtgactctactcctggtttgagtcctcggttaacagccttggggaaactgtaacataaactgcaacgctgttggtgccgtttcttcttagacagggtggcagcgatcgcctccccccgcagccggccttccactgcgccagcaagaccccctcccaccaaaacgccgagggctcccagagcgcaggcgccccgggccccgcccctttccgaagactcggctcctattggcccaggggccggggttggaacgccctagtggccggagaggggtgatcatgtgacttgcgggggtggggctgcgccggcctcttcccagccagcttgaaagggtttgcgtagccggccttgtgggcccttgaagcgctctgttaaagcgctctgtgggcggcctggccccaactcctctagtctaggcgcacgaagggagttgctcctaggtcttgtccgtgccgggttcgcttttctttccttcccgaagcctggcccttagatctactatcgcagagtctgcggccgccaggaagcccagattcgagtgtccggagagtaaccggaagtgctgtccccaggcctaggggcggcgccggcggctgccagggtaagcgcggcctgcggggcccaggggtgggatgggtgcgcggtgggacccaagacccacggccacagtcgagtgggagcagcccctgttcctggacactgagca

SEQ ID NO: 35590 - DNA, 2300 bp, Homo sapien
gtgagcattgatagaacctctgcagtgctgggtgtggtggctcacacctggaatgctagccctttgggagaccgaggtcagaggatctcttgagcccaggagtttgagaccagtctgcacaacatggaccccatctctacaaaatatttaagatgagttgtggctgggtgcagtggcggacacctgtaatcccagcactttgtgaggctgaggtgggtggatcacgaggccaagagttcaagtccagcctgaccaacatggtgaaaccccgtctctactaagaaaacacagaaattagctgggtgtggtggcatgcacctgtaatcccagctactcaggaggctaaagcaggagaatcgcttgaactggggaggtggaggttgcagtgagccgagattgtgccactgcactccagcctgggcgacagagcaagactccgtctcaaaaaaaagaaaaaaaaaaatagttgggtatggtcgtgcttgcctctagtcccagctacttgggaggctgaggtaggaggactgtttgagcccagtaggtcaaggctgcagtccgccataattgcaccactgtactcccacctgggtgacagagtgagaccttgtttcaaaaaagaacctttgcaatgatggaaatgccccatgtctgcactgtctgaaatggtagccactagctacttgtggctattgaggtcttgatgtatgactagataactgaatttatttggtttaattaaaaaaaaattttttttgagacagcctcactctgttgcccaggctggagtgcagtggcgtaatcacagctcactgctcaacctcctgggctcaagtgatccttcctcctcggccccccaagtagctggagccacaggcatgcgccactacacctagcaaatatttagcctttttatagagactgggtttcactgtgtttcctaggctgatcttgaactcctgagctcaagtggtcctcctgcctcgacctcccaaagtgctgggattacagacctgagctaccatgcccagcctggtttagtttaatttcattttacattcattcattcattcattcattcattcatgagatagggtcttgttctgtcacccaggctggagtgtagtggtgcaaacacagctcaccacagctttgacctccgggactgaagcagtcctcccacctcagcctcccaagtagctgggaccacaggtgtgtgcctccatgcttggctaacttttgtactttttgtaggctagtcttgaactcctaggctcaagcagtcctcccacctcggtctcccaaagtgcttggatgacagacatgagccagcgcgcctgacctaaagacatatttttctttctagtgtagttcagccttaagactgtatcagcagatagagacagaaaagtaagaaaaattgagtatcagattatatttataaataaagcagttactaattgatgtttttttttaaacctcctttttaattctgggttacatcattccctggctgtctttttttttgtattttttttattattatattttaagttttagggtacatgtgcacattgtgcaggttacttacatacgtatacatgtgccatgctggtgtgctgcacccactaactcgtcatctagcattaggtatatctcccaatgctatccctcccccctccccccaccccacaacagtccccagagtgtgatattccccttcctgtgtccatgtgatctcattgttcaattcccacctatgagtgagaatatgcggtgtttggttttttgttcttgcgatagtttactgagaatgatgatttccagtttctccctggctgtctttaccctagcatcagtgagtcctgcagtcactacagccccccagtgaggacagatattttggtcaccatcaagtggatctttatttttatctaacatttacaattctgccagtccttactcttaattctctttgccttgaatcccaggatccacctctgatgttcagtgaagagtaccagaaaagtctgctagagcagtaccatctgggtctggatcaaaaacgcagaaaatacgtggttggagagctcatctggaattttgccgatttcatgactaaccagtgtaagtggcagtttagcgcatgggataatgtacccgtcctcattttttcaggttgccttgcccattctggacattttggctgtaagaatattggaaacaaagggggaaagctggtttattccatgtaggttgcgttgagaatttcctaggaaaagtaagttgtgcttaggaagtag

SEQ ID NO: 35591 - DNA, 2300 bp, Homo sapien
ctaactgaactcattgtagattttattggatcagatatatgaagagacttggaagacttgggtttgtctggaactgggtgaaatagagaaggacgatcattgacatagaaagctcattactttgacctttgattataaatagtcttacaataaaatggcatctccactgtctaaaacacatttttacatttgctctccttctgaaattatttatgtgaaattaacaaatctacttattaccttagaaacaaacgatccctaatttatattatttattgtatatttgtagatccacttaaaattgatttgcaatataaggaaaaaatgcattttataagttgtttgctttgtgtagtggatcttgttaaccgtaggactactgttgcattgaaacaaaatagaattaatctgttcaggtaaagagaactggaagtgagatttgttgtcactccttctccttcaagtactgaccagtcttttaattcacacataactaacactctgtgcaataatatttttttgttctctgtcttttcaaatagaactcaagctccatgaggagatgtttcattgtcagtgagcacattcttgtcaattagttccttcttgtttattagtatagcccctgtgtctagaacctttccaggtattcagtagccatttaaaaattatttgttgaatgaattgttattttaaagaacatccacaagttttgcctgactgggcatgggaatacatgcccatctttggactgaatgtccatttttcccttcttttatcaaaatattggttaaatgatcaggaccactgttagaaggaattttatctctaaaaatagtttaccttctatggatgtaaaaaaatagttgtagtagtactggcttttatattattcgatgtttcaaagcggtttttttttccatcacaatattctacgttcttgaaaagtactcgttcatgtgactgctatcatttatgcttgtgcagcacgtagatacaggagagaagataaggaaaatgcttaccctgtgtctccttccctgtaacacagttttttttaccatattgattctccactttctgctccctaagtaaaattttgcaacaggcgtttgggaaactctggatataagaaaaaaattttaatattgtacaaagagacaagaggtgacttcttttttatttttcatttagagtttatagtttaattaaagaaaatgcacatatatctaaagataatcatggataatacactcatataattactactttcagcggttataacaacagccaaagcacaaacagaaatgagaaaggattatcagcattatgcaaatacatatcctctttaagaattcctgttatagtgaaagcattaaaataattgaacacgtacagagaccatatactttgtgatctttttaaaaaagtattcaaaatatatttctgtgtgcaaaacattttcataatgatcttgtttaaatgaaagtatttagaatagcacattgtaaaattatgcggcagagcacaagtatttttctctttagaagacacataataaaatagaatcatcagtgttttttcataaacatgaatcttgagagtgctacttgatcctgcataataagggtactgttttgcttaatgtaagcatagtatactaattcttttaaaattcagaaagcatatttacagtctaggcagatgggacatgaaggtcacacagcatgagcagtgaaatatctcatttacctagagttctggagagaattttaggaactcttatttattatcagtgcataaataagagtaaactgtacaaaactgtttgcaaaactctcctctttctactcagaaggctttccctagaataatcattatggactctgtccatcctttactcatgcactgcatggggacaggtgttagttatgagattggtgaatttagaaagctaaccaatttcatacctattttgcgattctcaattcacaaacttttgtgcgtttcttaattatttcctttctttttcttgtagagagcagtcatgatggcctgcactccacacaatgcaacagagtgaaggagcaggttctggttctttggtgtagtcctgaagcttcctaagaaagttcacatcaggtgatggataggagcaaccctgtaaaaccagccttagactatttttcaaacagtaagtaataaaggtgacattttgatctttatctgcttacttacttctgctatgattctattgattctaacattgaaggagcagtaaatttatatgtattatcaaa

SEQ ID NO: 35592 - DNA, 2300 bp, Homo sapien
ccagaacttaaaatttaaatcaagaaaaggcaaaggacatgaacagatattttctcaaaagaagacactcaagtatatgaaaaaacactcatcctcactcatcatcaaataaataaatgcaagcaaaaaccacagtaagatgccaactcacatcagtcacaatagctataattaaaaagtcaaaaaattagatgttggccaggctgcagagtaaagggaatgcttatacaactactgttggtggaaatgtaaactggttcaggcactgtggaaagtattttggagatttctctaagaacttaaaacagagatacccttcgacccagcattcccattactgggtatatattcaaaggaaaataaattattctaccagaaaaatatatatgcactcgtatgttcatcagcatgttattcacaacagcacagacatggaatgaacctaggtgcccatcaacggtggattggataaagaaaatgtggtacatatacactatggaatactatgcctccataaaaaagaatgaaattatgtcctttgcagcaacatggatggagctaaggacataatcctaagcaaattagtgctggaaaagaaaaccagataccacacattctcacttataagtggaacctaaacattgagcacacaggaacattaacatgggaacaagacatgctgcaggctatgggggtgggggagagaggggagcatgggctgaataactacctactgggtactatgctcactaccagggtgcactgtacaaaagtaacaaatctgcatatgcactatctgtgtctgaaaaaaattgaaattataaaaaccaagagaatatgtttctaatgaatgtagactttatttgatggactggattagaatataatatttttttaaggggaaaggcattgggggatgcacaatgtctacaggtttctaaatctctctggtttctcacctaattcatagtctcttatgtcattctcatagttttcatattctgcctttccacctcttctttttaacaagtaaaattcctcatagcatacaaaaaaccaattttataaaaaacccctattatagatcagggacctgtggattatatgctattagaactacacaaaatgtctctgtatagttttctgtatctttggaatatctttgggtgaagctgcagaccttcttggtgagtgttacagctctgcgcagagccaaacagtgagcagcagcaagactgcaaagagcaaaagaacaaagcctccacactgtggaaagggaccccagcacgttgctgttgctggctctggcagccgcttttattcccttatctcaccccacccacatcctgatgattggtccatttcatagagagctgatgggttcattttacagagagctgattggtctgtttacaatcctttagctagacacaaaagttctccaaagtccccactagattagctagacacagagcactgatgggtgcgttcacataccttgagctagacacagcatgctgattggtgcatttacaatcctccagctagacgtaataagttctccaagtacccaccggactcaggagcccagctggctttgcctagtgcatcccggccgcgggcggagctgcccgccagtctctggcgcgctcccgcactcctcagccgttgggcggttgacgggaccgggtgccgcgtagcaggaggtggcgcccgtcccctcggggtggcgcgcgggagcccgcggctggggggcggggggcaggggacgggggcggggagcagggtgagggctccagcatggcaggctgcaggtcccgagccctgcccccttgccccgcggggaggtggctgaggcccagcgaaaattcgagcgcggcgccggcgggccatcactgttgggggacccagtgcaccctccgcagctgctggcccgggtgctaagcctctctcactgcccagggccggcggcgccagccgaccgctcagagtgcggggcgcgccgagcccgcgcccacccggaagtcgcgctggacctgcgagcaccgcaggcagcccaggttccggcccgcgcctctccctccacacctccccgccggcagagggagcccgctcaggcctcagccagcacagagaggggctcccacggtgcagctgcgggctgaagggctcctgaagcgcggccagagtgggctgaggccgaggaggcgccgagagccagcgaggggatgccagcaagctgtcacctctcagaaatacaggaagaacatcaataatgttcgaagttataaagtaggttt

SEQ ID NO: 35593 - DNA, 2300 bp, Homo sapien
tatatcaatatttattaaaagttcatatattacttttgatcccctggagaggaatacaaaattcaaataattattctatttttatatcccaatttgtaattatgaaactctagcattttaatttttctctttcaagtttacctgaagcttcacaaaattctgtgaggaatctattataacaggtattttgcttatttccacacaaacagaaggaaatgtgtattttctatgccctgaagaatttactcttttctgtaaatgacatatggtagttaattctttttggtaataaaatattcctgtttttatgccgaacagccttttcatttaaattcagggcaacatatcaaagctttgccgtaataatacagagtaatcaactaaagtaatatagaagttaaataacaaagagtttaaacaatttaatatgtcttctattaatttcaaactgaaattttacagaaatttggaatatgctgccagagtacacacacacatacacacacacacacacacacaatcacacgctcacatcacacactcacacccagctaaaggaaattaccacagctataatgatttcattaaatatctgaaattaaagtttcttttggacttttcagctgaagctcatagtaaataaaagtaatatgatcactgttgcatactgtgaatcaacagcacacagaaaccttagactttctatatttacacagcttaattatccgaactgaaacctgaggccatctgtgtcaacatgatttcacaattcattccagaaaattatttttcaggaaagtaaggctgcaaaccaataaataacttattgtttgcttcaggaaatttctgcaaatcaatttatgtcagtaagcaactctcctctgggccaacagattgctcacctgggcaggtagcagcttgtgtcaataacagtttacttatgaagacttctgtcatggcccttaactcacagtgtcccccaatcctaaactctatgtcctgaacattacctcttcttatcagtcattggtcttgaaaggccccgggcaaccatgtgagcccagacgtcaataccctatcgataccaccttatcatctactcttctaacataacccctcaaggtggtgaccccacttacagtcgtattttattgaatttagctttccctaatcaacatgctagtctattggatgcagtgtcagaggcaacaatcacagaggttctgaaagcatcagcccacggttttctaaacatcatggttcaagacccttaacacgaaacagaaagtttccccgaggcgccgtaaacaacccgtttgggcgcttccctgataattatagtgaaatctggcatctaattttttttggtggactctcaaattttatatttacgttttgcttcctagaaataaaaaatgtttttataaggaattctttgatcgtttatgttttattcttgatagaaacctactttataacttcgaacattattgatgttcttcctgtatttctgagaggtgacagcttgctggcatcccctcgctggctctcggcgcctcctcggcctcagcccactctggccgcgcttcaggagcccttcagcccgcagctgcaccgtgggagcccctctctgtgctggctgaggcctgagcgggctccctctgccggcggggaggtgtggagggagaggcgcgggccggaacctgggctgcctgcggtgctcgcaggtccagcgcgacttccgggtgggcgcgggctcggcgcgccccgcactctgagcggtcggctggcgccgccggccctgggcagtgagagaggcttagcacccgggccagcagctgcggagggtgcactgggtcccccaacagtgatggcccgccggcgccgcgctcgaattttcgctgggcctcagccacctccccgcggggcaagggggcagggctcgggacctgcagcctgccatgctggagccctcaccctgctccccgcccccgtcccctgccccccgccccccagccgcgggctcccgcgcgccaccccgaggggacgggcgccacctcctgctacgcggcacccggtcccgtcaaccgcccaacggctgaggagtgcgggagcgcgccagagactggcgggcagctccgcccgcggccgggatgcactaggcaaagccagctgggctcctgagtccggtgggtacttggagaacttattacgtctagctggaggattgtaaatgcaccaatcagcatgctgtgtctagctcaaggtatgtgaacgcacccatcagtgctctgtgtcta

SEQ ID NO: 35594 - DNA, 2300 bp, Homo sapien
atagtggatttaacaaaaatactaattgttttagatgttattactgtgctaaatttagatccattttaaataaactagatagtaactcaagtttatatacaattactacctttgaaaccaaaacctagtcatagtgggagcttccaaatgctttatagaccttggatttttacctaagagacacatgactgaagttacaacctagagcaacatcgtttgttgggtgactggttctcatttgtgacaacctgaataagggggaacttgtttttcctcacttcttctaggcaaagtcaaaaacagtatttaaaatactaacgaaaggagttttaaaattgaaattgacttgtttcagaaaagagtctgggataaatgtcctcaagctttctgccttcattacgccccgaattgtcctgtttaggcttctaatgcctttgcttatatagatataccataaagggaaaatagtattctaatcagaaataaagcattgatctttctcaggctgaaaactacagcattcaaattccgttgtagccgggcttgatggctcatgcctgtaatcctagcactttaaggctgaggctagtggatcacctgaagtcagttcgagaccagcctagccaacatggtgaaaccccatctctactaaaaatacaaaaattatccgggcatggtggcgcatgcctgtaatcccagctacacggaagggtgaagcaggagaatcgctggaacccgggaggcggaggctgcagtgagctgagatcgcgccaccgcactccagtctgggcgacagaggaagtctccttctcaaaaaaaaaaaaactgattatgttgccataaagggtccctttaaaaaaaaaaacgctctatccaacgaaaactaattagaaataaatctccttcccgaaagcgataaaatactaaagaatgagaaactgacagtttactgagtttgtaaggaaggccaaataaaggcggggtttggattcctttggcgcacccaagccgaccgtggacttcctggatacaacaaccaatcaggatgcagaggaagggcgggcgttgcccgggcaaattcaaactgacaaccgctgcaacttggcactgttccaaatcactaaccgacgggggaccgacgagtattttaattggtttctaacgtattttaattggtttcgaacttataatagaaaatttcccatctccttacttaactctaagattagaatggcagatctaaaaaaaaaaagtcactaaggattagttaaataactgctctacttcagaccaaaaaacacagtagcaagttacaagggtttgtcagtggccagcagaggaggaatacaagcaccagctctttctttgagaacatgggtggctcttaaaagagccgttagggttgagagtttgcaaccaactcactgtttacttagcgctggtgtacttggtgacggccttagtaccctcggacacggcgtgcttggccaactccccaggcagcagcaggcgcacggccgtctggatctccctggaggtgatggtcgagcgcttgttgtaatgcgccaggcgggaagcctcacctgcgatgcgctcgaaaatgtcgttcacaaacgaattcatgatgcccatggccttggacgaaatgccggtgtcagggtggacctgcttcagaaccttgtacacatagatggaatagctctccttgcggctgcgcttgcgcttcttgccgtctttcttctgcgccttagtcaccgccttcttggagccctttttcggggcgggagcagacttcgctggctctggcatagcactgtgtagctataaagcgccaacgaaaaggaaaaacagcgtgagcagggtatgacaaggcgcttttatatagaatcgcttatgcaaataaggtgaagagttgaagtcttgtgtctgattggtagttattcagggtaacgtcagaggtcaggtctgcccaatcaggattcgcaaatccagaagacgcactactattggttgaaattaaactgcagccctaaccaacaacacgtcttctttttcgcgcccaatagtgtttataaaaagcgccgcctttcccgttcactttgtggttgctcgtagtgagttgcgctcgctatgtctggacgtggcaagcagggaggcaaagcccgcgctaaggccaagactcgctcttctagggccggtctccagttccccgtgggccgagtgcaccgcctgctccgcaaaggcaactatgccgagcgggtcggggccggcgcgccggtgtatctggcagcggtgctgga

SEQ ID NO: 35595 - DNA, 2300 bp, Homo sapien
ttacgccggtaatcccagcactttgggaggccgaggccggtggatcacgaggtcaggacatcaagaccatcctggctaacacggtgaaaccccgtatctactaaaaatacaaaaaagtagctgggcatggtggcagacgcctgtagccccagctactcaggaggctgaggcaggagaatggcgtgaacccgggaggcggagcttgcagtgagccgagatagcgccactgcactccagcctgggcgacagagcgagactccgtctcaaaaaaaaaaaaaaaattacatcagagttcagtgaacagagggaggaggcacaattgtgcaatcttggcatgagtattccttatttagctacaacaccaaaagttatttgcactaccgtagtaaataaccctcctttacagaaaactgccagtcttgctaggaggcctcagtttgtgtcaggaacgcccaataccctgtacttttctaatagtcataaacatttctaatatttctaatgtacatttctaatactcatcaacatttgttgaaccatattataatcctctatatattttccctcctatctgtgaggcagacattttaacagtctgtgtgctaacactttacctcagatttcttcatgggttttaaggtttattattaactatcctgtcaagttcttctaggtaagcaacttgggatattaggcctttccaaatgagccatctttcttgggctccagataacgtcatcccagtattttactcacttcattttaaaggaatactttgcaacatgcagtagggtgggtaagagaatgcttcacagctatccatcaggaaagatgtgagtctctgacagagcctttgcagggaggtggactattgtgtcacaaagttcttcagcctcgctctcgtgcagcggcgtcaccgccgagctctcgcaggagcggcagcttgctgatcagcagctcggagttctggtagcgccgaacgtcgcgcagggccactgtgccgggcacgtagcggcgggacttcttcatgccgccctggcccgcgtggaacagctgtctgctaaattctagcccgggcgataactcttttgggccaaagtgcttcaagaactcacgaagccactggtgctctgtggacacacactgattaagtttaaaattaagtaatggcctaagagatttgttcacatcttaacttttaagcgtggtaaaatctggaccaccttccctctagtttttcttttaaatctgcggtgttcgctacactgttttcaaaaagatgggtaatttatgactagagtcttgtccatgtctcactttctttcacatggaataaatgttaagttcttttagagaagacgtgggtggccctgaaaagagccgttggtttggactcgattttacttgagctgccacaaactagtacagatagttacttgcccttcgccttgtggtggctctcagtctttttgggcagtagcacggcctgaatgttgggcaggacaccgccctgtgcgatggtgactttgcccagcagcttgttgagctcctcgtcgttgcggatggccagttggagatgacgcgggatgatgcgggtcttcttgttgtcgcgggccgcgttgcccgccagttccaggatctcggcggtcaggtactccagcaccgctgccagatacaccggcgcgccggccccgacccgctcggcatagttgcctttgcggagcaggcggtgcactcggcccacggggaactggagaccggccctagaagagcgagtcttggccttagcgcgggctttgcctccctgcttgccacgtccagacatagcgagcgcaactcactacgagcaaccacaaagtgaacgggaaaggcggcgctttttataaacactattgggcgcgaaaaagaagacgtgttgttggttagggctgcagtttaatttcaaccaatagtagtgcgtcttctggatttgcgaatcctgattgggcagacctgacctctgacgttaccctgaataactaccaatcagacacaagacttcaactcttcaccttatttgcataagcgattctatataaaagcgccttgtcataccctgctcacgctgtttttccttttcgttggcgctttatagctacacagtgctatgccagagccagcgaagtctgctcccgccccgaaaaagggctccaagaaggcggtgactaaggcgcagaagaaagacggcaagaagcgcaagcgcagccgcaaggagagctattccatctatgtgtacaaggttctgaagcaggtccaccctg

SEQ ID NO: 35596 - DNA, 2300 bp, Homo sapien
ctatgcgaaaactcatgaaatcagatacagaaaaaggcttctgattagtgagaagctcaagtagagaaatatacttgttaactaatgttggggaaatacaattttaaaatcttctcccaaagaagacaaaggaaataattttattattgaataagcattaaaccagggagagttgcttatcacaggaaaccttatgaagaggttgcaaaagcagaaagaaatcttgcttattatgtatggctacattggataggttttgcaattcgaagtcaggtgacagctaaagttcagcccattttctcgctggaaactgggagacagaccactatcttttttaatgattaacatttcaaagggatggctctccaggcattgagaaaatattctgagttataaggcctatttagccattaaaaggatttacatacattttaaaaggacagagaaagacattttgaaagtgatgggaaaggaaagggaagtcttttgttttcaacagataattaagcctctcatttttaatttgtatttacccttagattaacgtattcaattaacctatgctaccttaccctctttacaacatatactgaattcagctacagcaagttacagccagtcatatcaatttttttttgttttccaaaggtgtatggcaagttttcttttattgcaacataaatgcaaaaatttctaaagtattttaatgaaaagtttatcttcatttactttatgacatttaagtggaatactttgaaaatacttcaagcactgctgtaaggtactcattaaaataaagagtagcaagaaaatcaccaaatgggccgggtgcggtggctcatatattcagtatatgataataagttcctcaaatcagtgggggaaatagttaatgtattgtgctgactaaccaactgattaactttttgaaaagttatttctatatacaagaaatcaagtccttattagtaaagttagattactttaaatggttctacccagcattagttaaggttgtaggcatatcaggaactgctactggtgcaggggccaagagaaaacctcccttttggcctctgaaagttcactgaaaatcaactgacaagattaataagagaaaaggcatacaaatttattaaggtacagggctgaggaccacagaatattaccccaaccccccagtggggtacagaagcttatatactctttctcagaggcaaaagaggagatgggtaatgtagacaattctttgaggaacagtaaatgattattagagagaaggaatggaccaaggagacagaaattaacttgtaaatgattctctttggaatctgaatgagatcaagaggccagctttagcttgtggaaaagtccatctaggtatggttgcattctcgtcttcttttctgcagtagataatgaggtaaccgaaggcaattgtgcttcttttgataagaagctttcttggtcatatcaggaaattccagagaaagtccctccctgtatttggggaagagaaacaggacaaagttagagggaccttgattcttagacttgtttctgagaaccctcaattttcaaaaacacccaccattaccaagctcgatatttggggggataattctccaccccaaacactagaaatgaaaataagtagaaaagaacttagcaatatacctgaacgatctttaaattctatgagtctatcttgttctattgctaggaatttagcatatggagtatatttccattgtatattaaggagaaaaatgccacaaaatagcatagttccatacaaataatgttaaaggaaaacatgcatatatgcagagataacattctttttgctttatgtatcttctataatgttaacatttttgttatgaggcaggaatcatgttaaatgaaaaaaggaaaaacagcctaggtcttgaggattaaaaaggactgaaggagaacaagagggagtagagcacagcaggcctgtttcccttttaggtcccctcccccaatgcagagggacttcccgccaaagctcttccggttttcagtctggtccgcagaggttacccataaaagaaagctgccatcacaggcagcagacctttgttctctgaccacttgataatgtcaggacgcggcaaaggaggtaagggcctggggaaagggggtgccaagcgccaccgcaaggtgctgcgcgacaacatccagggtatcaccaagccagccattcggcgccttgctcgccgcggcggcgtgaagcgcatttctggcctcatctatgaggagacccgcggagt

SEQ ID NO: 35597 - DNA, 2300 bp, Homo sapien
acggggtttcacactatgttagccatgctggttttgaattcctgacttcaagtgatctgccctcctatataggtatagatatagatcagtgcctcctatataggtaaacaataaatataattatttgttgatacatttcttagaatattaatgtaaccccaaaattactggtaggataaataagacttggatcaacagtgaacatatgctttgcatgtatgaagtttttcaatatgaccctgctaatctccaaatgcctaagggcgggcaatatccccaaagactagaacaatgcgtggccaaatatgttaaatacacacacacacacacacacacacacacacacacacacacacaaaattcccctgtgaaactggcctacatttctaaatcacaaatttagccaggtaacaacctagcttaaaattcgtggactctttctttcacttggttcttccaaaaaagtttcacactgctcatcaccggcatagtcattctagcctctaatcacacaataaaacccaccacctaattctaacccaccacctaacacttagctcaaaccctgtgctgctggggaagttcccttctcctctactccaacttcttgcttcggggcggactgtctctagtctgtctgttgtctcccctctgaatctacttgcttttcattttccttttctataagctttcttgtcaaaaggaaaaattactgattggaccaattgacgctgaacatgccttaaaaactagtaaactattccaaaaatctccgtgatgatttcatgttccgtttcttcactcctgagaaaagctgtgctcctccccttacccttgcagactatcctgcctggtggtctggcatcttcccgatgtcccgtgggctgcagagatggaatcagggggtgagggggaagcaaagcaaggcagagctgggtacagcctagaagaggttaaataaggtaactgctcgagcgaaagccatacgtactggaacgccatcgggaaccaaatttactaatatataaactcacgttagaacgccattacatggtggaaagtacacgtgacacaataggctttcaacaagttctaacaggaagtcacagcactcgacacaacggaagtatccattttcgcgccaagagccaggaagcactttctgttaacacaagtttcctgcacatccctaattttttaggcgccatattcctcactcagtactaacaaagtgtatgtggcttctccttagccagactcgattacaagcactgcatgcattactcagtgtgataagatcatgataatccctttaaaaagatcgcccgaatttaagcctggattaggaacacgtgtttacagctctaatatcgataatttaagtggctcttaaaagagcctttggggttgggctttaagacgcttacttggcaagtttacttagcgctggtgtacttggtgacggccttggtgccctcggacacggcgtgcttggccaactccccgggcagcagcaggcgcacggccgtctggatctccctggaggtgatggtcgagcgcttgttgtaatgcgccaggcgggaagcctcacccgcgatgcgttcgaagatgtcgttgacgaaggagttcatgattcccatggccttagaggagatgccggtgtcggggtggacctgcttcagcaccttgtacacgtatacggagtagctctccttgcggctgcgcttgcgcttcttgccgtccttcttctgcgccttagtcacggctttcttcgagcccttcttgggcgcgggagcggacttcgctggttccggcatgttgaaggcgaactacgagcctgagacgagcagcagatcgagaaaacgggaagtaatgggagcaaggtaccaggagtcgtttttatataggacctctcatgcaaataaggtgaagagtgaaagtcctgtatctgattggtggttattagggtgacgtcagaggttagttatacccaatcaacccaatctgcaaatccaaaagacgtacttccattggttaaaactaagctacaaccctaaccaatgacatatcttctttttcgcgcccaatagtgtttataaaaggcgctgcctttcctcgttggctactttcagtaagttgtgaccagtatgtctggacgtggcaagcaaggcggtaaagctcgcgccaaggccaagacccgctcttctcgggctgggcttcagttccccgtgggccgagtgcaccgcctgctccgcaagggtaattatgccgagcgggttggagccggcgcgccagtgtac

SEQ ID NO: 35598 - DNA, 2300 bp, Homo sapien
gtcgtggtggtgtgtgcctgtaatcccagctattcgggaggccgagacaggagaatcgcttgaacctgggaggtggaggttgcagtgagccgagatcgcgccgcgccactgcactccagcctgttggagactccatctcaaaaaaaaaaaaaaaaaaaaaaaaaccactggaattagtaaatagatttcagggatttgtacgtttgatttcacttattacccctgctgaataagcttctccggagtatcctacaacaacttttgggtcttcattgctttccagtgggttaatttagaaacattgtaaagagttgctccagcccaaccgcgaaagaagcgctttacaatgttatctagcgaagcaaacatgaagtgaaacaaacatgactgtgtccagctttctctaagacagtgtagaatggctctgaaaagagcctttgttttccagttttcacaacctcgctccttatttggccttatggtggctctcagtcttcttaggcagcagcacggcctggatattgggcaagacaccaccctgcgcgatggtgactttgcccagcagcttgttgagctcctcgtcgttgcggatggccagttggaggtgacgcgggatgatacgggtcttcttgttgtcgcgggccgcattgccagccagctccaggatctcagcggtcaggtactccagcaccgcagccaggtacactggcgcgccggctccaacccgctcggcataattacccttgcggagcaggcggtgcactcggcccacggggaactgaagcccagcccgagaagagcgggtcttggccttggcgcgagctttaccgccttgcttgccacgtccagacatactggtcacaacttactgaaagtagccaacgaggaaaggcagcgccttttataaacactattgggcgcgaaaaagaagatatgtcattggttagggttgtagcttagttttaaccaatggaagtacgtcttttggatttgcagattgggttgattgggtataactaacctctgacgtcaccctaataaccaccaatcagatacaggactttcactcttcaccttatttgcatgagaggtcctatataaaaacgactcctggtaccttgctcccattacttcccgttttctcgatctgctgctcgtctcaggctcgtagttcgccttcaacatgccggaaccagcgaagtccgctcccgcgcccaagaagggctcgaagaaagccgtgactaaggcgcagaagaaggacggcaagaagcgcaagcgcagccgcaaggagagctactccgtatacgtgtacaaggtgctgaagcaggtccaccccgacaccggcatctcctctaaggccatgggaatcatgaactccttcgtcaacgacatcttcgaacgcatcgcgggtgaggcttcccgcctggcgcattacaacaagcgctcgaccatcacctccagggagatccagacggccgtgcgcctgctgctgcccggggagttggccaagcacgccgtgtccgagggcaccaaggccgtcaccaagtacaccagcgctaagtaaacttgccaagtaagcgtcttaaagcccaaccccaaaggctcttttaagagccacttaaattatcgatattagagctgtaaacacgtgttcctaatccaggcttaaattcgggcgatctttttaaagggattatcatgatcttatcacactgagtaatgcatgcagtgcttgtaatcgagtctggctaaggagaagccacatacactttgttagtactgagtgaggaatatggcgcctaaaaaattagggatgtgcaggaaacttgtgttaacagaaagtgcttcctggctcttggcgcgaaaatggatacttccgttgtgtcgagtgctgtgacttcctgttagaacttgttgaaagcctattgtgtcacgtgtactttccaccatgtaatggcgttctaacgtgagtttatatattagtaaatttggttcccgatggcgttccagtacgtatggctttcgctcgagcagttaccttatttaacctcttctaggctgtacccagctctgccttgctttgcttccccctcaccccctgattccatctctgcagcccacgggacatcgggaagatgccagaccaccaggcaggatagtctgcaagggtaaggggaggagcacagcttttctcaggagtgaagaaacggaacatgaaatcatcacggagatttttggaatagtttactagtttttaaggcatgttcagcgtcaattggtccaatcagtaatttttcctt

SEQ ID NO: 35599 - DNA, 2300 bp, Homo sapien
aatacataaagttaatactattttttggtgtcttttttaagtggcttgaattccgtagagaaaaaataaagatgtatacatgtaatatttcaattaatatatatcctatccccataggcatagagagcgtaatggggccctccattttagagaggagataaacaaagatgacctctttataggtgttacttgatcagagacctacatagattgaaaaaaagtgagaaaggtagttatcaggggaagagggaatttaaagtgcaaaggccttaagacagaaaatgtgtttggcattttgtgggaatagccagaaagccttgaggctatgaagtaaaagcaggccaagtaatatcaagagggggtggggcggaggaaggaaactcatagggcttcctagggtaggtaaattaatgtggacaagcaatcaaaagcaatagcaatcccgatctaataaatttgataatacaaattagctagacagaaaaagctatgttgtatcctaagctactacaagagtgcattaatacacctgctccaaagaaatgggactaaggatttacaaatatgggattcaggaaattctgcatcccatattctccttccatcggaatcaaattctaatgcaaatgagtcactagactttcatcacctgggtaaagttactcttaagagttagaccacttaagaatcaggctgccctttcttgcttttcaagaatacttagaattgcaaaatttgcctttaaagaatggcaagtatatcccatttttatggctgtttgacaacactattaatgtaatagaattattacactggaggccgggcgctgtggctcacgcctgtaatcccagcactttgggaggccgaggcgggcggatcacctgaggtcaggagttcgagaccagcctggccaccatggtggaaccccgtctccactaaaaatacaaaaaaactagccggtcgtggtggtgtgtgcctgtaatcccagctattcgggaggccgagacaggagaatcgcttgaacctgggaggtggaggttgcagtgagccgagatcgcgccgcgccactgcactccagcctgttggagactccatctcaaaaaaaaaaaaaaaaaaaaaaaaaccactggaattagtaaatagatttcagggatttgtacgtttgatttcacttattacccctgctgaataagcttctccggagtatcctacaacaacttttgggtcttcattgctttccagtgggttaatttagaaacattgtaaagagttgctccagcccaaccgcgaaagaagcgctttacaatgttatctagcgaagcaaacatgaagtgaaacaaacatgactgtgtccagctttctctaagacagtgtagaatggctctgaaaagagcctttgttttccagttttcacaacctcgctccttatttggccttatggtggctctcagtcttcttaggcagcagcacggcctggatattgggcaagacaccaccctgcgcgatggtgactttgcccagcagcttgttgagctcctcgtcgttgcggatggccagttggaggtgacgcgggatgatacgggtcttcttgttgtcgcgggccgcattgccagccagctccaggatctcagcggtcaggtactccagcaccgcagccaggtacactggcgcgccggctccaacccgctcggcataattacccttgcggagcaggcggtgcactcggcccacggggaactgaagcccagcccgagaagagcgggtcttggccttggcgcgagctttaccgccttgcttgccacgtccagacatactggtcacaacttactgaaagtagccaacgaggaaaggcagcgccttttataaacactattgggcgcgaaaaagaagatatgtcattggttagggttgtagcttagttttaaccaatggaagtacgtcttttggatttgcagattgggttgattgggtataactaacctctgacgtcaccctaataaccaccaatcagatacaggactttcactcttcaccttatttgcatgagaggtcctatataaaaacgactcctggtaccttgctcccattacttcccgttttctcgatctgctgctcgtctcaggctcgtagttcgccttcaacatgccggaaccagcgaagtccgctcccgcgcccaagaagggctcgaagaaagccgtgactaaggcgcagaagaaggacggcaagaagcgcaagcgcagccgcaaggagagctactccgtatacgtgtacaaggtgctgaagcaggtccaccccgacac

SEQ ID NO: 35600 - DNA, 2300 bp, Homo sapien
cagggtttcaccatgttggccaggctggtctcgaactcatgaccttgtgatccagctgcctcggcctcccaaagtgctgggattacaagcgtgagcaactgcgcccggccatatatcagtctttaaataaaagccaaagccctttctatggcttgccagcagggttgaatctctgattacttctctcttctcatctaattcaaattccttcattgactttccagcccactaactgttgatgttccttggtggtgccaagcaggtttgtgactcagagtctttgcacctgctctttcttgggccagaaaccctctgactccagataacctcatgctccccctggctcctcattcttacctcaagtatttttttccctgccttcctccctccccactcactcccttgcctcaactcttaggtcacattcttagggaattctttcctgagcagaaaactaattcattaattaatcaatttatccatatagccttttgctcactgcatattcattgagaacctttcaagtgccttgaagtagtttgggtgttatgggtacaccagtgaacaaaacagacaaaattgcttcccagaataagcttacttcctggggaatggtttgggagagaagtgcaataaaatgtcatcactatcagggagtgacaacagaaggatcaggggacagggtctcaggtgttgtgccatttataagggtggtcaggtaaaacccatttggtaagataaaatatatgaatggggaactataggaagtgataaaataagacttgcagatatttggaggaaaagcatcctaaggagagcaaaaattctaaggaaggagtgagtcttgtgaaatatgaaatagtccaatgcagttggagcagtgaacccaggaggggtaggagatgaaatcatgacagtatatacaacagggggccaggtcatacagagttttaaaaactgttttcaaaactttagatttactttgagtaagatggggcatcagggaagtgttctaaaccagggagtgaatgattgtgaatgattgggctaatatttaattctgtctctctgtctgctgagtgtagaataaatcatgaggcagaaacagggtgaccagctaaaagccttccatgatatcccaagtcagagatgatggtggctcagcagtggtagcactgaaggtagtgagaagtcatcagattctggatatattttttaaatttatgggaataactttttaaatgtacaatatttctcatagtgataagtcccatgaaaaagaattaggaataaagtttgaaaaggaatagaagagggccataggtttggcaatttttaaaaagctgaccatggaagacctttctgaatgaatgacctttgaataaagatccagttgaagtgagggagcaaaccacgtgggtatatagggaaatcacaatccatagggtgggaacaacaagaataagaaccctaaggcagaagcaagcctggtatgttcaaagaactgtaaggagtctatggacagtgtgagattgtgggtcagagaagctcgggacagtgaagcagagcagaaagtgagggggctggaaaatagacaaggtgagattgggggacaaagagatgagtatggagagaaagactgaaaaagagatgggggactgagaaaaaagagacggaaagactgagtgtgggaacaactgaggggtactgaagatatgctgaggggcagaaagaaaagactgagaataagtgggcaactggggttccagaggaggtgctgaggtggggagagacagaggttgaaggacaataaggcatgcaaaggaggaatctgagataaagagaaggtagaccgaagagcggagaggaggagactgagacagcgagggctactgagagctgagggaagaacagactgagaggcccagagagaagaaactgggagttccgatgctgcatcagcagcctctgtgtacagactctggcgtccctgccccgctttagcagttcctacagacgcttgacctgccaggaaaggaaagaaacctgagcctctgctgaaaggtgatggatttaaggcccggctgctgaggataagataaaggtcctcctgggggagaacagagtcccgaacaccatggccgtctggcttgcccagtggctgggccctctgctcttggtttccctctggggactcttggctccaggtaagaggaggctgagggtcaagcagggcatcctaagggggccagcctgacttccttccctccatgtcccacagcctcccttcttaggcgcct

SEQ ID NO: 35601 - DNA, 2300 bp, Homo sapien
cccaccacgcccctaccttcctcccgcgcccaaagaattttgcacaagctgtcctcacaagagcccgagattacacagcgagtaagtgacacagaggcagaaagatatgcgattccaacccctcagcccgcaggctgacggcgtctcctcccttagttcccccatctcattttcgcgtcggtcgcctcctccgccccggtgcgggccgtgctggatttctccgagtataatgacgtaaggatggcgggcagcaggtgcgggacggggaggggtcccagcgggcggagtcccttgacacttccggataccttcctctgcggtccgcccacaggtggtatcccgaagcctaatgagcaccgcgatcggcgggtccctggaggtaggaggtggggcctagtccgagggggactgggagggaaaagaggcctcggatgccagggaagaggaggccagagaagggcgaaacctgcaacgtggcggggtctaaggaaggtcggagctcgggggaatacgcaggttttggaagaaggcgggagctgacgaagaggaggggcaccaggaaaagaggcgctccccagagagggcggggtttgggcagggacaatcctatccggaggtgaggctcaaggtggggcggggccacaatggaggacggggcctgcagggaagacccgagaaggagggctgcgaggcaggggattgggggcgggggcctgggggcgggggcctgggccaagagctaggtctgcaccctctgagtcccgctaggggaaagtggggaacccaaggaggacgcaggtcctgggtagggaaagccgaggcccagcctaagtcttggcggacatcgcctcttgcttcccacagtgccgggcggcggtgtccgtcgccttcgctgaagtggagcggcggctgcgctcgggtggggcggctcaagcagcattgcggacggagctgagcgcttgcgggcccctgggccgcgctgaaaaccaggcggagctgttgggggcgctgcaggcactggtgggaggtgtagtgcagtatgatgggcagacgggagcgccgctaagcgtgcgacagctctgcggacttctcctcgggggcgggggcaaccgcagccactccacgccctactgcgggcttcgtcgggcggtgcaggtgagcactccctggcacagctgggaggagttagcggacaaagattcctgccccacttccgttgtgtgatcttgggcaagcgagaaccttctctgaaacttcgttttctcatctgtaaaatggggataacacttcacagggccgatgggaagatgaaatgaggcgggtcatgtagagcaatcagctgggagcctggcacacagtgtgcgaatgttagagactgcgattattacctattttgcctatcctgtcctgttctcttttggggggcctgcaggagtgcctggcacatggcaaattctcacttagtatttttagaatgaatgaaaaaatgttatctctggggatagggttctcctaggtacctgggactgcagcctctaaatccacaactgcaatccagctgtcgcttttccagcactgtctggaccaagtgctgtataaagtgcttcacatatattatttcattaagttctcaagagataggcactattattatcgccacttacagaaaaggaaactgaagtctgaaagattatcacttgcccaagctctcacaggtaataaggtctcagtcttctagtgcattgatctctaactcacaaggacccaggcatccaccccctctgaccactgactcccaggagaactcaggaactcacccttctatttctgacttttgacctctggggacataggcctctgcaccctggcttgctgggaagagaggaggaatttatgtcttatgtatgtacattgttccctagattgtcttgcacagcctgggccagaagtgtttaagcttttcccgagcagagacagtggcacagctgaggagcacagaacctcaactgtctggtgtgggtgaccggcagtggttgtatcagacatgtaccgagttcggcttctgtaagtgactggcctaaccctaactttgtcccctcaaacaacctttttactatgcccagagaagtcatcttacaggtggtctggactcatttcgacccagctctcaggcactgtgtaacctgcagatgttgggctggagaaggtggaagccatactagtgtatgcatgtgcttggccctcacatgcctcctcacgcacacactgaggtctccacttgagtgatcttcccttcagcc

SEQ ID NO: 35602 - DNA, 2300 bp, Homo sapien
ggggcctgcagggaagacccgagaaggagggctgcgaggcaggggattgggggcgggggcctgggggcgggggcctgggccaagagctaggtctgcaccctctgagtcccgctaggggaaagtggggaacccaaggaggacgcaggtcctgggtagggaaagccgaggcccagcctaagtcttggcggacatcgcctcttgcttcccacagtgccgggcggcggtgtccgtcgccttcgctgaagtggagcggcggctgcgctcgggtggggcggctcaagcagcattgcggacggagctgagcgcttgcgggcccctgggccgcgctgaaaaccaggcggagctgttgggggcgctgcaggcactggtgggaggtgtagtgcagtatgatgggcagacgggagcgccgctaagcgtgcgacagctctgcggacttctcctcgggggcgggggcaaccgcagccactccacgccctactgcgggcttcgtcgggcggtgcaggtgagcactccctggcacagctgggaggagttagcggacaaagattcctgccccacttccgttgtgtgatcttgggcaagcgagaaccttctctgaaacttcgttttctcatctgtaaaatggggataacacttcacagggccgatgggaagatgaaatgaggcgggtcatgtagagcaatcagctgggagcctggcacacagtgtgcgaatgttagagactgcgattattacctattttgcctatcctgtcctgttctcttttggggggcctgcaggagtgcctggcacatggcaaattctcacttagtatttttagaatgaatgaaaaaatgttatctctggggatagggttctcctaggtacctgggactgcagcctctaaatccacaactgcaatccagctgtcgcttttccagcactgtctggaccaagtgctgtataaagtgcttcacatatattatttcattaagttctcaagagataggcactattattatcgccacttacagaaaaggaaactgaagtctgaaagattatcacttgcccaagctctcacaggtaataaggtctcagtcttctagtgcattgatctctaactcacaaggacccaggcatccaccccctctgaccactgactcccaggagaactcaggaactcacccttctatttctgacttttgacctctggggacataggcctctgcaccctggcttgctgggaagagaggaggaatttatgtcttatgtatgtacattgttccctagattgtcttgcacagcctgggccagaagtgtttaagcttttcccgagcagagacagtggcacagctgaggagcacagaacctcaactgtctggtgtgggtgaccggcagtggttgtatcagacatgtaccgagttcggcttctgtaagtgactggcctaaccctaactttgtcccctcaaacaacctttttactatgcccagagaagtcatcttacaggtggtctggactcatttcgacccagctctcaggcactgtgtaacctgcagatgttgggctggagaaggtggaagccatactagtgtatgcatgtgcttggccctcacatgcctcctcacgcacacactgaggtctccacttgagtgatcttcccttcagcctattctttctctgtgtccccattccagggatggccccctttccccatccaccagactagaaacttgagccttgttttagttgcttccttcccattttctagctagcctgtcaattactgagtcctcctcactctgcatggacaactctgtagtccatcccttgtgctttctatgcctacctctgctgtcctgctgggaacctccattctttcttgccgggatcccttcccagccgcttctctggtctcatggttttcacttcctctgtacaatccaactttttcatagcatccacagagatccttgtaaatataaccttgtccctcctgtactcaaaaccacagctcctcaaagaccccagggtagtgttgccagatacaatacaggatgcccagttaaatttgaatttcagatatacaacagatttttttttagtataagcatgtcccaaatactacatatggtaaattaaatgttcaaattccagctccattttctactcgtaatcttgggcaaacttgggcaagtgacttacttctctatgcctgtttccacatctataaaatgggaatacaagcaatatttctctcatagggttgtttcaaggactaaaggaggtaatatttgtagcattctaagaataatgcaggtct

SEQ ID NO: 35603 - DNA, 2300 bp, Homo sapien
tgttagagactgcgattattacctattttgcctatcctgtcctgttctcttttggggggcctgcaggagtgcctggcacatggcaaattctcacttagtatttttagaatgaatgaaaaaatgttatctctggggatagggttctcctaggtacctgggactgcagcctctaaatccacaactgcaatccagctgtcgcttttccagcactgtctggaccaagtgctgtataaagtgcttcacatatattatttcattaagttctcaagagataggcactattattatcgccacttacagaaaaggaaactgaagtctgaaagattatcacttgcccaagctctcacaggtaataaggtctcagtcttctagtgcattgatctctaactcacaaggacccaggcatccaccccctctgaccactgactcccaggagaactcaggaactcacccttctatttctgacttttgacctctggggacataggcctctgcaccctggcttgctgggaagagaggaggaatttatgtcttatgtatgtacattgttccctagattgtcttgcacagcctgggccagaagtgtttaagcttttcccgagcagagacagtggcacagctgaggagcacagaacctcaactgtctggtgtgggtgaccggcagtggttgtatcagacatgtaccgagttcggcttctgtaagtgactggcctaaccctaactttgtcccctcaaacaacctttttactatgcccagagaagtcatcttacaggtggtctggactcatttcgacccagctctcaggcactgtgtaacctgcagatgttgggctggagaaggtggaagccatactagtgtatgcatgtgcttggccctcacatgcctcctcacgcacacactgaggtctccacttgagtgatcttcccttcagcctattctttctctgtgtccccattccagggatggccccctttccccatccaccagactagaaacttgagccttgttttagttgcttccttcccattttctagctagcctgtcaattactgagtcctcctcactctgcatggacaactctgtagtccatcccttgtgctttctatgcctacctctgctgtcctgctgggaacctccattctttcttgccgggatcccttcccagccgcttctctggtctcatggttttcacttcctctgtacaatccaactttttcatagcatccacagagatccttgtaaatataaccttgtccctcctgtactcaaaaccacagctcctcaaagaccccagggtagtgttgccagatacaatacaggatgcccagttaaatttgaatttcagatatacaacagatttttttttagtataagcatgtcccaaatactacatatggtaaattaaatgttcaaattccagctccattttctactcgtaatcttgggcaaacttgggcaagtgacttacttctctatgcctgtttccacatctataaaatgggaatacaagcaatatttctctcatagggttgtttcaaggactaaaggaggtaatatttgtagcattctaagaataatgcaggtctacagtaagtattccataaacctcttgctattgttattattataaggctttacatattttaaccctcttaatacattagtcttcctaacatcttaggaactttgtacatgctgttcactttgcttggattattcatcttcaagtctcaatagggtggcctccctcaggaagccatgatccctcaagataagtcagccttgccacctccgacttcgatagctctgtgttctccttagcattttacacagcctgtcataatacattttttattgcctgtcttcccctctggactgagtcctgtgacagcagagcctggagctgtcttggttgccaccatgtgcccaacattgtacaacatttatctgagcacctggtaggtggtcaacaaatagggagggaagggatgaattaatctgatgttacagaagttatctttaccctgaaagcacagtgagctatgggttttaagcagggcagacataatacaatttgagctccgagcattccagacctttgcacgtgctatttcttctatttactatgccttccttctctatctttgtttggctcagttctactaatttctcaaggtcttatcctttgcaggatgctttccctgagcccatcatgtttcctctgggatccctgccttgtggcctttttccatcacagccctgatcactgtgggctatcactgtcaggggactgtgtgag

SEQ ID NO: 35604 - DNA, 2300 bp, Homo sapien
taatggtgttttttgaagagcagattttaattttaatgaaattgcatttaacattttttattgttagtgttttctatgtcctaagaaaatttttcttaccacaagattgtgaagagttttttttttttattttttgagacggagtctcactgtcgcccaggccggagtacagtggcacgatcttggctcactgcaacttccatctccctagttcaaacgattctcctgcctcagccacccgagaagctgggactacaggtgcgcaccaccacacctggctaatttttgtatttttagtagagatggggtttcaccatattggtcaggctggtctcgaactcctgggctcaagcgatctgccttcctctgcctcccaaagtgctgggattgcaggcatgagcagactggatattttcaattgtcctatcttcaagctcaatggttccttcttttgcatcctcatatctgctgttgagcacctctagtaaatttttaaactatgatacttttcaactctataatttctatttggttccattttaacattctatctttttattctctttctatgtttatattctctttacttgcttatacaccattcttttggtttcattttgttctttgttcatggtttcctttagctctttgagcatatttaagacagttgatttaaagtctttatctagcaaacccaatgtctgggcttcctcagggatagtttctctccatttctttttttctctgtgaatgagccacatatttctgtttctttatgccctgtagttttttgttgaaaagtggacattttgaatattataatctggaaactctggatatcagatgttttctcctccacagggtttactatagttgatttttgatgtttgaggatttcagtcatctctttctttagtgagtttcgcaaactatttttgcaaagactatattgcttgtcatgtgttgtcactgaagttctgttaccttagcagtcagccagtgacttgacaaagattttcataaatacctagagggagaaaaaacccaacactctggtcttttcagatgggctctgagctggtgtactccttatctctaagccaggccacctgcaactctgccttagctatcatcttctgcttgcacggactccaaagatcaatcaggggtacaagccaaaggtactcttaggactttctggagcatgcatctggccctgggcatgcaggttgcatttccacttccctggtgtctaagtctgaggtctccagagaaacagaatcaataggatgtgtgtgcatgtgtacagtaatctgaatactgcagggcaagctggagaccaagtttataatataccttgctgtaaggaaacataaaaagttatgtaataactagatggtaattcagtgtcaggagaagggctgtttatctgttaaatgaaaaagacttcatcaaccctgttggctaattggaaagtaaattgatttaataccttattacatttgatcactttatcaacttcaattaaacctttactacatttgtaaaaatattaaatatgcttcctaagcaaagaatgttcttcagaacaagcaaacttagcatttaatgacagaaattactcagtagttaaccatattctataaatacatttcattattcataaaataacagtgtggtacaattagcactccgaaaagtggattcatattcatatattgctatttataggttataaatattacctgtgtataaaaagtaaaaaatatttcaagttataagtttataattaaaatacaatactagaatttgaaataaaattgttttttattacatgggaaattgtctttaaaatagaacagactactcctgaaaaacgggctagaacaaatggtaaaaatgtgtatgcaaatctcaactgccacgtaaacttactctgttctctagatatttgaacaatacatggcatccagcctctggaaatcccacaaaaatgtaatgaattcatgtatagttgagtatttgtccctctttcatgatagatttgtccctcgttcatgatcattttcatgtcaaaactgaaatttctttctaagaattcagtgattgctaaactttcatatgtggaatatatttatgctgctgtttaggctgtgctggcttcaatcaaaagatccaagaaaaccatgaatattttgtattcaagtgacacaacactgggaatcttacctgtctttcaaagtggcattgggctcatggggaacttattgctattcattacatatatgtacatcttctta

SEQ ID NO: 35605 - DNA, 2300 bp, Homo sapien
tagtgccttctgatatgaacctccactaacacagtgaccaggtcagatgcccttattaaaggttctcatgaaatcatgtgactcttttttttgagacagagtatcactttgtcacccaggctggagtgtagtggcgcgatctcggctcactgcagcctctgcctctcgggttcgagcaattctcctgcctcagcctcccagatagctgggattacaggcacgcgccactatgcctgactaatttttgtatttttagtagagacggggtttcaccatgttgaccaggctgatcttgaactcctgacctcaggtgatctgcccacctcagcttcccaaattgctaggattacaggcgtgagccactgtgcccagccatgtgactcttttttaaaagacatttgtaacagttacaattttatatttgtgtgtgattgtttggttatcacttactagacactcagctctatgaaatcatgtgctatttctgatttttgtttagcattgtattttcagtgcctagcacagtgctcgataaatacatgttgaatgaataaatgtttattagttcaaaacaaaagtattattcaaaacaaaagtatcctaaaaacgctttgagggagaaaactaatcagtaggcattgcaataactgtaaaatttgcttttttataataaaagtgatcaactttaaatataaatacttgactctattcaactttgtactctgtaaactcaagaatgcttcccaggaaaagacttttctctgtttttcaaaatttgataattcacatactttgtcgatctatcttcctttaacaaaccttatatttgctttataataattgatgcatttgagtatataatacatgtaatacctgatactttgtaaattcttttgcattacatgaataatgtttgtgtttaaaagaaaaggctttgcagcatattttagatcctacgtttctgccccaatagagactaatgaagagtcacgtattcatctatgacttattgtacccatactatgtaccaggcactcaagcatgtcaaaacattattattgaatgacaaataatgtaattcaatatgaatagcaaataatatcattcaatatgaataacattcttgttattcattctgctctttcactaaaagtaatgttaacttttagatagtgcgttctatattcttggctctgttctaggtgctttacgttaactcatttaatccttgtaataagcctgagatgtaggacttgttattgtccccattttgtagatgagacagagtttaactggccaagattctatagttggtaggtggtaaacctgggatttgaatctaggtctagctctagagtctacactcttaaataaggtttactacccactaaacagatttcttgatctcttcatgggtctccctagaagtttaaaaaagactacttatgggccgggtgcaatgactcaggcctataatcccagcactttgggaggccaaggcgggtggatcacctgaggtcaggagtttgagaccagcctagccaataggccagcctggccaatatggtgaaaccccatctctactaaaaatacaaaaattagctgggcatggtggtgggcacctgtaatcctagctactcaggaagctgaggcaggagaattgctcgaacctgggaggcggatgttgcagtgagccaaagattgcaccattgcactccaggctgggtgacagagcgactccgactcaaaaaaaaagactgcttatgatctcttttgaagtccttcttgtgttctatttcctctaggaaacctttccttattcaggctgttttactttaatgttagcacttattgttttaactatactatttgtcattggtttatattattatattatttacctactttatgcatacaaatcgtttttcttttttctttctttttttttttggagatagggtctcattctgtcaccccagactcactgcagcctcaaaatcctgggcccaggtgatcctcctacctcagcctcctgagtagctgagaccacccatgtgtgccatcatgcctggctaattttttgtattttttgtagagacagggtttcaccaccttgcccaggctggactcaagtgatctgcccacctcggcctcccaaagtactgggattacaggtgtgagccaccatgcctggcatacaaatcttttttgcccaaaattttaagataaaaagcaaggataatgtctcaaatttattttatagtgccaagaaaattagattataatgtgtaacacacagt

SEQ ID NO: 35606 - DNA, 2300 bp, Homo sapien
gatttaactttcatagtgggttgttgtgaggttaaacgacccaatatatctcaatagttttcaactctttcagaccaagcgggctctttgtataacaaatattttgtaatgcccccatttctatccataaataaaattcattaaattggcaataagcttaacctacctattttaaagccatatgatgccctaattctacaataaaggagaaataaaagagaatacactgcaactcaggctgataaaatgatcgaatctcagtaaaattcagaacaaagtaccttgatttagaccatagttgtccttatagaaaatcatcatatattagcactgaaaaaaaaaaaagaaagaaagaaaagaaaaagactctgtggttgtgtgtaaaaaaagagttaggttctagtctctgataattatcaatagaatttttacccatctgaatgtcctgcaaaacattaaaaaattgtttgggattgtcctgtgctgaaggacatctgggatccctgactcctacaaattaaatgccagtagttatttcttccactcaatacaaggaccaggtcctgtctgctgagttcctctggtttatgtgaaacattcaatataataactagctcatggccgggcgcggtggctcacccctgtaatcccagcactttgggaggccgaggcaggcagatcacgagttcaggagatcgagaccattctggctaacatggtgaaaccccgtctctactaaaaataccaaaaaaaaaaaaaaaaaattagccggacatggtggcgggcgcctgtagtcccagctactcgggaggctgaggcaggagaatggtgtgaacccgggagacggagctttcagtgagccgagattgtgccactgcactccatcctgggcgacagagcgagactctgtctcaaaaaataaataactaaataaaaataaaataactagctcatggcagctgcaagcaataacattctaaacctccaagaggacatcctccattgcttaggtctttcaggagctggctttaacaatttcattttcttataaactcatgcttcttaaacttgagtatgcatcagagtcacctggaggatttgttaaacacattgctaaactcaccaccagagtttttgattcagtaggtctggggttgggcctaacaatttgcatttctggcaagttcccgggtgatgctggtgctgctgatctacggaccatagtttgagaagcagtgtcctaaacctcttccttcaaatgtttaaattcagaggatctttttaaaatcttacatctttcttattccctacaaagttctgtaaaacaaaaggaacagatactcttatccctattgttttgttaccgaacaaacaaagattcaaggaagttagtgacttgcttaatgctgtacagcattttactaactcagatattagaattcagggttcttcaatcccagtgaagtgtttattccattaaccaacactgcctctgataataagggcagtatgccctatgttgaaaggatttgccaagtaatttctcctatatcctcgaaaaaaccaagggcgacagcattattttatagcacttaatgataaattcctcatttttacactctattagcttatgttggcctccttgttcttagagcatgacaaggatattccaacctcaagattttgtttgcagactttgcacttgctgttttctcagtctgcccagagatatctttatggcttactctctctttttacacaaatccgataaaaatgtttccttctcagaaaagctttccctggccatgccatctaaaataaaggtcttgtttatccttttattctacttttttggggatatgtttgtaactacttgagtttatatatgcttgtatggtttggtttagttttgctttttttttttttttttgctggccctctcataggggctttattctgtcttgtacttgttgcatccccagtgcctataaaagtccttatcacagagctgaatgaatgtgagaattcaatatgttaaaatctaaattatgagtttgacacaaattttagcctcgtctattcatttcatcaaacatatcaagacttacatatatatgccaggcacagttttgttgttaggaatataaagatgggaaaatcttgattcgtgtgtaggggtggggatggcaaaagatactccaaaagataatttcaaaacaggtagtaaatgctatgatagagtctaggtaactgctcttgttatctggaacctacttaaaccatggatggtgtcttagact

SEQ ID NO: 35607 - DNA, 2300 bp, Homo sapien
gacagtattttcaacaaatggtgctgggaaaactggatatccaaatgcaaaataataaagttgtagtatttacaccatctacaaaaattaacccaaaatggatcaaggacctaaatttaagaagcaaaactataaaactcttagcagaaaacataaaaatctttattagacaatgtaattttcaagtattgcacaggtgataaaaataaataaatggagcttcatcaaaattaaaaagttttatgcatcaaaggacactatcaaaagagagaaaaacttcacagactgggagaaaatatttgcaaatcatatctgaagaagaatatctggaatatacaaaaactcatgcaacacaacaaaacctaattcaaaaataggcaaaggatttgaacagacatttctccaaagaagacacacaaataagtacatgacaagatgctcaacatcactagccattagggaaatgcaaattaaagccacaatgagataaagcttatacccattatgatggttataatactacaactacaacaaaacagaagttaacaagtgttagcaaagatgtggagaactagaaccctcctgcactgctgatgggaatgtaaaacgatgcagccattatggaaaacagtttgatggttcctctagaaagctgattgcagagttaccatatgatatagcaattcaatgcctaggtgtatacccaaagaattgaaaacagtgactcagatacttgtacaccaatgttcacagcagcattattcacaatggccaaaaggcaggaaccacccaagtgttcaacaagagattaatggataaacaaaatattatgtatgtatatttatacactgtttgtgtataaacacacacatatacacgaaggaatattatttagccattaaaaggcatgaaggatacatgctgcagtatgaatgaaccttgaaaactttatgctaattaaaaataatccagacataaatagacaaatattgtattattttacttatatggcatatctagaacaggcaaattcatagaaacatagtgtaaaataaaggttaccagggactgtggggagcagggaatagagactgctcaatgggcatctttagggatgacgaaaatgttctagaattagatagtgacggtgctgttgtgaatacgctaaaaactttactgtatgactttaaaatggtaactttaatgttgtgcatagtttaccacagtttgaaagtgtttttaatttttaaaaataggaaatgataaaattagactttatctaattctttccagctttataatttggatcctgctcctttgtacttcatggctcatgctttatacttacttgatgtttctatggtacttgtgcacagctgtcatgtatcagacctgcagttttgcacatgctttccactcttctagttcctcaactatttgtaaggttgccctcctttatgttttccattaaatcttccattagtcaaaccactccagtgtccctcgttccataagtttcccctgctctgaactcccagggcacattgtgcaacttcattaccttatattaaaattatctggaattttaaaaaatctactagattagggtagtgtcctgattttattcatttttttcttttggtgaaatttgagacatgtcttgcatttaacagtatttaagcaactagattgtgcaacggagccagtttctccagacaggctggagagaccacttgcatcagaatcatctggggtgccccttgaaaatgcaatgttccgggccaacgagtcaatctcggagtgtaaatcttgtgaagctgtattttaacaagctcacttggtgatttatttgtgtacgctatttaaaactctgtgaaccaccggtctaggctatactttgcagtgtattaaggtggtcttcggcacctctcgcagacccccttcctcttgcctctagcgccaacctctcagcctctcgcataccaggggaggggctttgcaaaaccttccacgaaagtgaatcccagcacagccctgctgtagctggctctcaggcgcaagcgcagagctgcgaccgctgctgatacgttgctcagtctcagtgtggtctctgttttgcaactggtcgtccgcgtcaggagacttaggtccaggcgactgcccagacaatgactggtcccgcataccgagcagagcatgatcagcagcagtctgagtggaagagtgcctgtgatcttagggaacctgatgggcgttggagcagcggttcgacgcatgggtttctctttaatccttccgac

SEQ ID NO: 35608 - DNA, 2300 bp, Homo sapien
gtagcttgatagctcatttcttttccttactgaatgttccattgtctgaatgtaccatagtttatgtattcattcatgtactgaaggacatctggctgcttccaagttttgcctatcatgaacaaagctgctataaacattcttgggcacgttttgtgtggacatacattttcaactcctttgcataaataccaaggaacacaattactagatcatatggtaagagtatgtttagttttgtaagaaattgtcaaactgtcctccaacgtaactctaatattttgcattcccaccagcaatgaatgaaagttcctgtgctccacatccttgtcagcatttggtattgtcagggttctggattttggccattttgacaggtgtatagtggcatcccattgttttaatttgcatttcactgaggacatatgtggagcatcttttcatatgcttattttccatctgcatatcttctttggtgacatctgttagggtctttggcctatttttttaatcggtttgtctccttattgttgagttttaagagttcttatatattttggatatcagttctttatcagatatgtactttgcaagtattttctcccagtctgtgacttgtcttttcattctcttgaacatttttttttaaaccaatgttctcttcatggcaatatatgcattctctaagatgaccgaagctttctctatcatgttcccttgactgtaattgtttttcatacactctgttaggatttccaggtttaatgtttgtcagccaacagtctgagagacttgaccttggccccttatccaaatgctggggatgcacgccagcataataaaatgcaagtgccatgtcttaaatataaaaacctaccgatttgttggattctttttttctgccaaggacacagtgacagactggccatgggctacacttgcagctatgtgctcgctgacacaggcatataaaatgctttactaagtggcaaaacatgggaatattatctccgggtttccttaagcattagaaaaacatgttggggccgggcgcagtggctcacgcctgcaatcccagcactttgggaggccgaggcgggcggatcacttgaggtcaggagttcgagaccagcctggccaacatggtgaccccctcgtctctactaaaaatacaaaaattagccggggatggtggtgcatgcctgtaatcccagctactcgggaggctgaggcaggagaatcgcttgaacccgggaggtggaggttgcagcgagccgagatcgcgccattgcactccagcctgagcaacagagctagattccgtctcaaaaaaaaaaaaaaaaaaaaaaaagttggtcgccactcatttgagagtcgtgaaaacaattttaatgggtaactaccagtattttcaaaacgacaaaagagtagaacagaaaatagaaggtagaacatgtaataaaggtaacgattgtttgcgttttaaaactgtgtgtagacgtgtatttcttttttttcttttctttctttcttttttttttttttgttgttttgtttttttgagacggagtctcgctctgccgcccaggctggagtgcagtggcgcgatctcggctgactgcaacctcttcctcccgggttcaagcgattcttctgcctctgcctcctgagtagctacaggcgcgcgccaccacgcccggctaatttttgtatttttagtagagacggggtgtcaccatattggccaggctgagtctcgaactcctgacctagtgatccacccacctcggcctcccaaagtgctcagattacagacgtgagccactgcgctcggtcagtagacgtgcatttcttataatcagttcagtcagacaagtttacaatgcacacgcatacctgaaacaggagcaaaagactggcggcgaaaatgtgcggcccatcgcagggcgaaagtacacgttagctaaagcctctgggaaatgaagttcaggaacaccttcgcggagtgttctgggaacgctggtccagtgtgcccgcccggcgccggcgtgcggggcggggctcgctcgtaacgaccggaagtgaccgttgaagccggttgtaggcgtggaaagaggttggcgcgctggaagtccagttgcttcggctccctgcgttaggtctggtggcggtcaatgcgcttccggacccgggatcagagtgtgtggatcgctatagggggaggggagctcaggtatcaccatggcaacagccagccctccggactcgtgacgtcacccttctgatttcgcgcttagagg

SEQ ID NO: 35609 - DNA, 2300 bp, Homo sapien
gaatccaagaggcagaggtttcagtgagccaagatcacaccattgcactccagctttagcgacagggtgggactctatctcaaaaacaaacaaaacagattgggcctggtgcagtggttcctgcctgtaatcccagcacttcgggaggctgaggcgggtggatcttgtgagcccagaagttagagaccagcctaggctatacaggatattaatctagatattaattatttgatggcttcagatatagatatagatataaatatagatattgtaaatgccatttccattccttggctgtgttttcactcttttaatgctgtcttttgcagccaataaatcccttatttaaaataagcccaatgcatcttattttatgatttatgttcctaatgtactgtttgagaaatctttgcctagcccaagatcatgaagatgttctactgtgttttcttctagaaattttatctttttttctatcacattgatgtctattatataataaaataattttgtttataatgtgacataggggtcaaggtttatttttactctatgtgattaaaaagatcattcttacttgactgaattgacctacgtattttgtaaattggcagcataagttttcaagcttagttaatcttctacaatattgacatgatttttcaaattcctttgcatttacaaaaatatacttaatttccacaaaaatacatgctggtattttgattgggatttcattgaatctattgatcaatttaggaaaaattaatatcctaacaatattaaatcttcctaattataaacctgatacatcacttcattcatttaagtcttctttaatttatcccagtaatgttttttagtttttattatagtttttttgcacattttttttacatttattaatgctgttgtaaatggaactttttgttgttgttttgtgaaacagtatctcactttgtcacccacgctggagtgtagtggcatggtcatggcttactgcacccttgaccttccaggttcaagcgatcctcttacctcagcctcccaagtagctgagaccacaaatgtgcaccaccacgcctggctaatttttttaaacaatgtttttgtagagataggctctcactatattgtctagtctcaaactcctgggctcaagagactttcctgcctctgcctcccaaagtgctgggattacaggtgggagccactgcactcatcctcaaaaattgactttttaaaatttcatttttcatttgtttgttgctagtatacgtgagcatatttgatattttgtatgttgaccatgaagtcagtaccatgctaaatttacttactaattccaatcattttttagattcttctcagttttgtacactcataatcaagttctaataatgaaggctgtatttcccaatattaatatcaatcatttatttttcttattttactgcagtagctactattgccaccatagtattgaatagaagtgataatcgtgggcattcttgtcatgttcccaaactcaggttcatcgtaggtgttttgtagttaagatttattagactaaagaaattcccctttattctcattttgagagtttttaatcatgaattattgaattttatcaaatgcttagtctatgtctactaagatgaaaatttggtttttatatttattctattaatgtggcaaattacattttaaaaagttaaacccctctccctctccctctccctctccctcaccccacggtctccctctcatgcggagccgaagctggactgtactgctgccatctcggctcactgcaacctccctgcctgattctcctgcctcagtctgccgaatgcctgcaattgcaggcacgcgccgccacgcctgactggttttggtggagacggggtttcgctgtgttggccgggccggtctccagcccctaaccgcgagtgatccgccaacctcggcctcccaaggtgccgggattgcagacggagtctcgttcactcagtgctcaatggtgcccaggctggagtgcagtggcgtgatctcggctcactacaacctacacctcccagccgcctgccttggcctcccaaagtgccgagattgcagcctctgcccggccgccaccccgtctgggaagtgaggagtgtctctgcctggccgcccatcgtctgggatgtgaggagcccctctgcctggctgcccagtctggaaagtgaggaacgtctccgcccggccgccatcccatctaggaagtgaggagcgcctcttcccagccgccatcacatcta

SEQ ID NO: 35610 - DNA, 2300 bp, Homo sapien
cagatagtccttcgagatattattacagttagttagagaattaagaacaggagctttcttaaagataatacagggacaactgtgacttttctctccatatgaataaaaatttacatttttcctatcttctattttatggccagagaaaactctgagtattcagatttatcccaaaagtttctaaaatgaccaaactgttcagaatcatgcttttttcccttttctttctttcttttttttttttgttttttgttttttgttttttgagatggagtcttgctctgttgtccaggctggagtgcagtggtgggatctcagctcaccgcaacctccgctatcttggttcaagagattctcttgcgtcagcctctccagtagctaggattacaggcacccgctaccacactcagctagtttttgtatttttagtagagttggggtttcaccatgttggccaggctggtctcgaagtcgtgacctcaagtgatctgcctgcctcggcctcccagagtgctgggattacaggcgcgagccaccacgcctgagcagaatcatgctcttaattgtacttgaaaaacaaaactttatctgaaaaaactttctgagtttttgtttgtatgtttttgtttctgctaaagctcaaagtttctgaccctaggcaagtttttattagtcatagtgcattaataacaaataaatacaaatagggctaataggaaaaaaaggactaagaaactaagaggtaagaaacagaagaatgacaggttttgctttaaggaaaagtggagtggcccggccttggtggctcatgcctgtaatcccagcactttgggaggccgaggcgggtggatcacgaggtcaggagtttgagaccagcctggccaaggtggtgaaacctcgtctctactaaaaatacaaaaattagccaggtgcggtggtgggtgcctgtaatcccagctactcgggaggctgaggaggctgaggcaggagaatcgcttgaacacgggaggtggaggttgcagtgagccgaggtcgcgccactgcactctagcctgggcgacagagcaagattccgtcaaaaaaaaaaaaaaattaaaaagatttgcttccaaccacataaggggaggagtggtttatagattaataaaattgccacgagttggtatttcttttctttcatcttgttttctttcttttttttttttttttgaggcgcagtttcgctgttgttgcccaggctggagtgcaatggcgctatctcggctaatcacaacctccgcctcctgggtttaagcgattctcctgcctcagcctccctagtagctgggattgcaggcatgcaccaccacatccggctaattctttttatttttagtagaaacaaggtttctccattttggtcaggctggtctcaaactcccaacctcaggtgatccgcccacctcggcctcccaaagtgctgggattacaggcgtgagccaccgcgccaggccttcttcttcttttttttttttttttttttttttttttgagaggagtcttgcactgtcgcgcgggctggtgtgcagtggtgtcatctcggctcgctgcaacctccgcctccaaggttcaagcgattctcctgcctcagtctcccgagtagctaggattacaggcgcccgccaccacgcccaactagttttttgtatttttagtacagacgaggttttactatgttggccaggttggtttcgaactcctgaccttgtgatccgcccgtctcggcctcccaaagtgttgggattacaggcgtgagccaccgcgcccggccgagttagtaattcttgaaggtgtgtcaggtacattggatgcactgtactattctgtctacctttgtatatatactttaaaggtttttccccacaatttctctgggaaacctgaacctttcttccccgtgtgtttagaagggaaggtgaggagagtcaaaggcacatggagcattaacagttggaataaacgacagagacacggaaacctccgaggtttccagagcggacccggaaatgacgccaggggatgcaaacccttctgcccctttttgctacccctgaagcttactgttagtggtcgagtttttctggaagtgggcttccgcgatcgcggggaccaacgccctgagctcttgtgcccaaaggggatcgccaggttttttgatgcggatcgaaagggactggccccggagcctacaacctgacgcaggtgggacttggggaaatgtcgagaaacctaggtctgggacttgagttggcttccagggc

SEQ ID NO: 35611 - DNA, 2300 bp, Homo sapien
aattttggccagccactctccccattgctagcatggataataaaacttactctatttttaattacacctcattcctttttttttcttttttttttttttttttttgagatggagtctcactctgttgcccaggctggagtgcagtggcacgatctcagctcactgcagccctgcctcctgggttcaagcgattcttctgcctgagcctcctgagtagctgggagtacaggcgcacgccagcacacccagctaatttttgtatttttagtagagacggggtttcaccatataggcgaggctggtctcaaactcctgacctcgtgatccgtccgcctcggcctcccaaagtcctgggattacaggcatgagccaccacgcccggcctcattcttgttcttttggcttttttctacaagtgacaatcagccagaccctctttcagctacaggaagagtttgataaagagaatgcctgagctcaatcttgtgtgttttaaggaaacagaaaaaaagggaaaagaaaaagtcttttcctgccttgtacctctgtctaactaaaaagagaggcagcttcctcacagaaaaatatcactgatcttaaaactgaattcaaagaactgaagaaggaagtttctagtgtttcacttctgtggatttggcccagaaaaatccacagagaaggtgttaaagtcaggtaatttatcctgcatcccttagaaagccctagagccaatcaaaactctccccaaagggctgaaatcaggctctgagggttgtgggagtgacagagccatgtaagctctctggattcacaggtttaggtcactgctgatggattcaattactatgggaggacatttcatgctgtctaattttcattcaattggatgattctcccaaatccttcgttctttaccataagtttactcattattttagctttacctcaaggcactttcccctgggaatttttctgagaccagtgtgagttaggtgtacttcctgtgttttgatttgtcatactaaaaatcttacaagtatgaatttctacatgaaataaaggtaagatcttaatcttaacaatctaggtcttagatttcacggtatgggcattaaacaagtgtttatttctgtatagcctttttgatgagtacccagcaatcccacttctacgaatgtctatcagtgaaattccagcttagctctgtagtggcttcatagaatccagtcattgcagcaatttcaggcagcagagagttggggcaacctgcatgtccatcaccagaatgagtaagtactgcagtgaatacaagtttgtgtgaagtttcatgctctgcaggagtcacaactaatgaagcagaggtacatgtataccaaaaacaggtggatttttcagtgcaaagtaaaatctaagaaacaaaatgtatatcaggatgtatagtacaataccaaaattaaaattacagagttacacaaaatacagtgggtgaggcagtagctgaatgactaatgccagagggaatggtggcaaattgtgtgaagaggggaagaaactaagttaaattatctgattggcacacttgccacctcttggaagacacctgattacactcagtcccctgccctcttgctggccaggaagataattggtcacaggtggccccctgaccccacctcactccacagtttcttatggcaaagcgtttccttgacagaaaatgctaaatgtcgccaaagcccctcccttggggtcctggtttctaaaaagtctttttttctgtaatcaagaggttaatgtttgggtgtgttggaaggatacagaaaaaggcatagcacagtatggacaatggtcttgaaataaaattcctccttattctgcctgaaatttcctgacatgatgacatggtatttatgaggatgtgggtcactgggcgaaagccttccttggtcttgaatcatggattttgggtattgttggttttggtgaatggaatatataaggaaagaaaaaaagggccacaaatatgaaaatgctctaaaagaaacaataatttcacaatactgaacgtgagccattcaggaaatgtccattttaaattttaaagatagctcctgggtgaacggtggtttttgtaatgcagtggttgtcacgtgtgccacccacgcgaaatggaaactgggcagaaatatctccttatgggtctctctctctccctctctcgctctctacttcagcttgggtaatttgtttcactaaactcaactcaagctctcttaaacccaggtctggtgcttaaaaca

SEQ ID NO: 35612 - DNA, 2300 bp, Homo sapien
tgtagagagctttttaggacattatctggcacatgataagcagtaaataattatgaaaaagagccttcttattttttactagatagaatgatgtactgtaatttattgctaatcagtcaaattgcttcagtcttatactacaaacagtgctgctggaaacccctgcatatattattttgcatattttcaaaaatagtaaattcctaggggtgaaatttctgatgtaaagataggtgcattttaaaattttgacaggtattaccaaattttcctttatgaaagcactaccaatttgtggggccaccagcaatgattgagaattaaggtctgggaggcttattcaggattttccattcctatagcagaatactatgactggcctatggtgaatagtagatgcttaataaatgttagtaaattggatggtaaatagtatacgaaaaacagttgggtttgggtgaaaacaagaaaaacttttaaaaatctactctggcatcttttgctagcaggcattgacaattaggagaaggcaaggtgttaacttttactgatctcccacttttttttttgagacaaggcctggctttatcacccaggctggagtgcagtggtgcgatctcagctcactgtaaactccgcctaccaggctcaagccatcctcctacatcagccccctaagtagctgggacaacaggggcgcgccaccactcctggctaatttttgtgctttttgcagagacggggttttgctatgttgcccaggctggttgcgaactcctgggctcaagggatccgcccgcctccacctcccaaagtgctgggattacaggcatgagccaccgcgcccacccctctagtttccagtttagtcggaaagattaaaaacgccagccttgttttcctagtgctgtttttggtttttacctcgggtcttttgtcgtgccttaaaatcatgtctggttgcgcaagtgagggaaaggattgggtaaagggggcgccaccgcaagttgctgtgcaacatccagacatcaccagacccaccacctggagcctggcctggcggtgtcaaacgcattctggtctcatctttttagaaacccgtggatgctcaaggaatttccggataacgtgatcccggatgcgcttgactgacttacacggaacgagcaaagcgcaaagcagtccctgctaaggacttagtttatgccctcaagcgcaaaggtcggaccctctatggtgttggtagctatatgcacgtacctcatgtacatttcaccttaaatggctttcaaagagctagattaatttagtggatagatcaaaatgatttatgacccctcgccccccagtgataggaagagcgaaccagctcttctttagataatagtgagtggctctgaaaagagcctttgggttggacaagagcttgagaatttacttggagctggtgtacttggtgacggccttggtgccctccgacaccgcgtgcttggccagctcccccggaagcagcaggcgcacggcggtctggatctccctggaggtgatggtcgagcgcttgttgtagtgcgccaggcgggaagcctcgcttgcgatgcgctcgaagatgtcgttgacgaaggagttcatgattcccatggccttagaagagatgccggtgtcggggtggacctgcttcagcaccttgtacacgtacacggagtagctctccttgcggctgcgcttgcgcttcttgccatccttcttctgggccttggtcaccgccttcttggagcccttcttcggggcgggagcagacttggccagctcgggcataatgaaacaatagtggcaaaaccaaaacaagaagtcggtctcctctttttatataatagtttatgcggccgaggtagtgggaaggtctctgctgattggtaattatccgtggatgacgacagatgccagttttgcccaatcaaaataggtatcctgcataatcgagtcctattggtctaaataaaaataaaacgtaagccaatcgcacagcttccttttcgcgcccagtagaggctataaaatgtacgtttttctagtttcacttcagtctttcttgaccgtatagataataggccttttgccatgtctgggcgtggcaagcagggaggcaaagctcgcgccaaggccaagacccgctcttctcgggccgggcttcagtttcccgtaggccgagtgcatcgcctgctccgcaaaggcaactatgcggagcgggtcggtgctggagcgccggtgtacctggcggcggtgctggagtacctgaccgc

SEQ ID NO: 35613 - DNA, 2300 bp, Homo sapien
ttcgtacgcgccatgccttcagagctagattcacttcaggagaaagagaaagctagccgcttatttatagtgagagtctgaagctgattggacaaaagtatgctgaaggcctacccaacagtaaccggattggcgaaggactcaaatttttgttgttcacctattcctctgacagacttagcagttcatggtctccatattttattttctattttcgctatacagttgttcactatactagcgatttccagtggaaatgagagcaatataagtaatttacacttatctaggagaacattgtaacaaaacaaggaaaaattaatttttaatattttgcttaatccaatatagccaacatatttcaatgttatcgaaattaaaattgttaggtattttacactttttggcactgacttttccaaatgcaatgtgtattttatataaaattcatgctatggaatttccaatgatcactatccacaattggctagtggctgcaatactggacaggacagccttatacacctgtcccctcaattttctatcttttgaccacttaaatttaaaaaacttctatttttataaccaagaaaagctggttcgcatgtgagaaattcaaggccaaaaaatgtcaaagaaacaactttatgtgaacttttcacttttagattaaagtaattccattgcagcttatttttccaatactctagaaatgtaattcattttcttttaagaatctattccattcgtacatccagatctgattcagattaaaaacatcaagtcagatattttaaaagtggaatttaccatgctgaaacaaattaagtcatctctgtactaagaaatcaatttgtgtggctgggggtgggaaagctcgggaaattttaatttcaatgaattttcagaaaatgcttcaaagagaactacctggcaccataagtaactgttctaattagtctaataattattctcaactcaatcattaatgttcaaatgcaattaattatacagattcgagagatatttctcagaaatgaagaatccaagtcgttgatctagatttggattgaacgtcgaatgcccggtttgttatttaccaagacccagaaaacatctggccccaaagcagacatgtttgcttcaacagactaaaagtaaaacccgacggtgaaccatacagaattcaacatacttggataatgccagcttaggaaaaactaaattttcttccactaagcttaagatgaaggcgtgtttaatacttttaatgttatccaggctttttataaagctaacgagattgtcactacctaaccaagacaccgaagactgatctacgtaacctttggagtggtttagaagtaggcaaagacgagaaattacattaaacatagtgctcagttcttccacaaaattgtaggtggctctgaaaagagcctttggttcctttgggattgagttgctgcaaactaatccaggcttctacttgcccttcgccttgtggtggctctcggtcttcttgggcagtagcacggcctggatgttgggcaggacgccaccctgtgcgatggtgactttgcccagaagcttgttgagctcctcatcgttgcggatggccagctggaggtgacgcgggatgatgcgagtcttcttgttgtcgcgggccgcgttgccagccagctccaggatctcggcggtcaggtactccagcaccgccgccaggtacaccggcgctccagcaccgacccgctccgcatagttgcctttgcggagcaggcgatgcactcggcctacgggaaactgaagcccggcccgagaagagcgggtcttggccttggcgcgagctttgcctccctgcttgccacgcccagacatggcaaaaggcctattatctatacggtcaagaaagactgaagtgaaactagaaaaacgtacattttatagcctctactgggcgcgaaaaggaagctgtgcgattggcttacgttttatttttatttagaccaataggactcgattatgcaggatacctattttgattgggcaaaactggcatctgtcgtcatccacggataattaccaatcagcagagaccttcccactacctcggccgcataaactattatataaaaagaggagaccgacttcttgttttggttttgccactattgtttcattatgcccgagctggccaagtctgctcccgccccgaagaagggctccaagaaggcggtgaccaaggcccagaagaaggatggcaagaagcgcaagcgcagccgcaaggagagctactccgt

SEQ ID NO: 35614 - DNA, 2300 bp, Homo sapien
ggagttggaaaccagcctgggcaatgtggcgaaaccccatctctccaaaaaataaaattagccaaacgtggtggcgtgtgcctgtggtcccagatactcaggaggctgcgttgggagaatcgcttgtgtccagaagttggaggttgcaatgagccgagatcgtaccactgtcctccagcctgggtgacaaagcgagaccctgtctcaaaaaaaaaaaaaaaaaaaaaaaaagataacatgaggaactgacctcactattctcaaaatagcctttggcttttctcagaagagatatttttttctgagtgtaggtattcacccactagtgctcttggaatcaataagtattcagaaccaaccttaccatcgaacatcaccagcttggactactatgcttggccatctacttatccagcagttactaagtatttaactcacttactaattgtaagtgtttacaggatacatttgtaacataacacccaggtacaaaaaggttaattacatacagaattaaacagaaaaatatcagaacacatacaatgaagttaactattattaacatgtgatttcagcagtacactaacataaatacatgtaattattgggtcactgccgaacatgtatatgtttgaaagacccttaattagaaaacttctaaggccaatttttttttattccaaactcttgtaagtgcaaaaattaaaaatagaaaacaaaacatgaccaatgtatacattggtaaacataaaactgtctggttttgtttaaatatacccattgagcagctcctttcctagaggccaggaaatagggctgaggactctaccctcagttttcaatctagagactgtgaaactgtagagaaacacactgtctagtagcaatccatatactttttctagtaagcatattaaaaaccgaatactatactatattccttacagcccagtgagtttcccagaatcataaataaaacccaccagtacctactatgtaactcccagtaagaggctttgacttttgtcaaagttgtgtcccagtaaaatgccttcaagataccacaaactggcctggcgcagtggctcacgcctgtaatcccagcactttgggaggcctaggcgggtggattacctgaggtcgagtcagagaccagcctggccaccaaggtaaaacccctgaaaacacgtgttagcaaacgtaccttgttagtatctacattaagaaaaaaaaaaaaaaaaaaaaccttgaaattcaggcaatgtaaacaggttaaagattaacaccgaaacatcatgagtgtactgtgtagtggtgaagcagctgaaaacggactcgtgtcatctttttatgattgttgaagtggctctgaaaagagcctttgtttttatgcgcttttcaactcggtctttacttagtcttgtggtggctctcagttttctttggcagcagcacggcctggatgttgggcaggacgccaccctgtgcgatggtgactttgcccagaagcttgttgagctcctcatcgttgcggatggccagctggaggtgacgcgggatgatgcgagtcttcttgttgtcgcgggccgcgttgccagccagctccaggatctcggcggtcaggtactccagcaccgccgccaggtacaccggcgctccagcaccgacccgctccgcatagttgcctttgcggagcaggcgatgcactcggcctacgggaaactgaagcccggcccgagaagagcgggtcttggccttggcgcgagctttgcctccctgcttaccacgcccagacatggcaaaaggtctattacctttacggtcaagaaagactgaaatgaaattggaaaaacgtacattttatagcctctactgggcgcgaaaaggaagctgtgcgattggcttacgttttatttttatttagaccaataggactcgagtatgcaggatacctattttgattgggcaaaactggcatctgacgtcatccacggataatcaccaatcagcactgacctattctactcctaatttgcataataacatttaaataaagaggacgaaacagccctaaggttgtcttttattttgttttccaccatgcctgaaccagtcaaatctgctccagtccctaaaaaaggctccaagaaggccattaacaaggctcagaagaaggatggaaagaagcgcaaacgcagccgcaaggagagctactctgtgtatgtgtacaaggtgctgaagcaggtccaccccgacaccggcatctcttccaaggctatgggaatcatgaactccttcgt

SEQ ID NO: 35615 - DNA, 2300 bp, Homo sapien
caaaccttcagaggacaaaggggaagttttcctttggattctacagtttcaatagacaaccaaaagttaaagttaaagttgggaattatttaaatatgcttcactctttgaatgtattattcttacttaatctattaacatgtatatgtctttgctaacgttttgataatttattgaatggaatcctaaattggaaattcctagcataaatcacacatatgttagaaagtatttttcaggttgggtttctttaaagaagtgtgaggattcaaaggctctggaaaagcaatctcagtgcagatgccttttgaatccttccaggtatctgagttttctcacaattttaaaaattgatttaaacataactagaatatttctggcaatttaactgtaacacatctacagaacactcactaggtattcacagtgatattaagagcaattattttttccagttcattttctttgatttacctgattttttttgagacagagtcttgctctgttgcccaggttagtgcagtggcgcgatcacgactcggttcactgcaacctctgcctcccgggttcaagcgattctcctgcctcagcctcccgagaagctggtgttacaggcacgtgccactgcacccgtttaattttttgtatttttagtacagacggggtttcaccacgttggccaggctagtctcaaactcctgatctcaagtgatccgcccgcctctgactcccagagtgctgggattacaggcgtgagccaccacgcctggactaaccctccacatatttatttatgactttacctataacttctgcttccctaaaatgtacaaaacagttgcattctgactgcctcagaaccactttctcatggtctcgggggattgtgtcttccctaagccacggtcactcatagttgctaataatcctctttaaaatattttgggccgggcgcagtggctcacacctgtgatcccaacactgggaggccgaggcaagtggaccacctaaggtcaggagttcgataccagtctggccaacgtggtgaaaccccgtatctactaaaaatacaaaaagtagcagggcctggtgccacatgcctgtggtcccacctactcgagaggctgaggcagaagaatcgcttgaacccggaaggtggagattgcagtgaaccgagatcgtgccattgcactccagggtgggcaacaaagtgagactacacctcaaaaacaacaacaaaaaacaaaaaaaaacccacatatacaagtacatttatatgtacgaagcgagtcccaaagggtacctaatgggagacaaacttaacagtgaactggctctttcttgagaaacgtggacggctctgaaaagagcctttggggtgtgggtcacggcggaactgttactgcagcgagaggctcacttggagctggtatacttggtgacggccttggtgccctcggacacggcgtgcttggccaattccccgggtagcagtaggcgcacggccgtctggatctccctcgaagtgatggtcgagcgcttgttgtaatgcgccaggcgtgacgcttctccggcgatacgctcaaagatgtcgttgacgaaggagttcatgattcccatagccttggaagagatgccggtgtcggggtggacctgcttcagcaccttgtacacatacacagagtagctctccttgcggctgcgtttgcgcttctttccatccttcttctgagccttgttaatggccttcttggagccttttttagggactggagcagatttgactggttcaggcatggtggaaaacaaaataaaagacaaccttagggctgtttcgtcctctttatttaaatgttattatgcaaattaggagtagaataggtcagtgctgattggtgattatccgtggatgacgtcagatgccagttttgcccaatcaaaataggtatcctgcatactcgagtcctattggtctaaataaaaataaaacgtaagccaatcgcacagcttccttttcgcgcccagtagaggctataaaatgtacgtttttccaatttcatttcagtctttcttgaccgtaaaggtaatagaccttttgccatgtctgggcgtggtaagcagggaggcaaagctcgcgccaaggccaagacccgctcttctcgggccgggcttcagtttcccgtaggccgagtgcatcgcctgctccgcaaaggcaactatgcggagcgggtcggtgctggagcgccggtgtacctggcggcggtgctggagtacctgaccgccgagatcctggagctggc

SEQ ID NO: 35616 - DNA, 2300 bp, Homo sapien
ttcccctatgtactctgaagcttcactgaaaatcactgtcaagaggcagattaatagaagaaaaggcatacacatttatttaacatgtacgcagaagccttcagaatgaagacctaaagatacaggggaaattgtccatttttatgcttaggttcaacaaagtatggacagctatgtagaaatatgactggacataatgtgtatgatctaatgctaagagactgagtggggaaacccagccaggcctgtctagattcttcttgggcgctctgtgtagtatttcttttgtatatggggcagggccctctctggaacggaggtcctacgacttacagtcaaacaaggtaagtcaaataatttctttgtggccagtttttacacgaaaaaataaaatttttaggtttcttattgtttttttcttttcttttcttttctttttttttgagatggagtctcactcagttgtctagcctggagtgctgtggtgtgatttcggctcaatgtaagcgccgcttcccaggttcaagagattctcctgcctcaccctcctgagtagctaatattacaggtatgtgacaccacgcccagttaatttttgtatttttagtaaagacggggtttcaccatgttggccaggttggtctcgaagtcctgactttaagtgacctgcctgcctcagcctccctaagtgctgggattacaggcatgagccagcgcgcccggcctaaacaagcttatattaaagatgacaatttattacttataaacaaatcaataaatcttgctgggtaactagttcattaactcaagactcaatcaacaaaactaaaagtaaattctgaatgtaacatagaatttaaaaaccataatactcaatgctggtaaacatacacagcagttactgctggcaaaagtgaatggaataaaacttttgaggaaaatgtagtaacagttatcaaaataccttaaaatctgcatcctttgtgacaaagcgcttcaattctacattttcctcaggaagtaaattttgtacagttctcctttaaattaggaaaagaaaattagcacattattgctaagtactagaaatactgtgaaagtggacctagaaaattcttatgatggaatattaagcagatataaattactgcttttaaaatttttcctaatgtgaattttctaagcttttaaccgtgaacatagattccctttggcaaaccaccttgattaaattatagacagaatagaattttggtaatagttccgagtatgtataatgttaaaggtggtacttaatccgcagggaaaagatgaattatttaaaaaatctggttgattaataaattcctagggaattggttaacactgtagcaggcagaattcaggagaagaaataataaagacattaaaatcacttttgtaaactttttaaataagggaaattgattaaaacaacgcgaagttgtaaaatgccatatactgcatacattttgtgggaaaaaatgtgcatttatctgctcaccaaattatcttattagctagcagtagagctctttgtgtgatgggaagatgggataacaggctgttgttactgtactggtttttttttttaatatatttaaaaaaaagagtgtctcctaaagtgtaagcgctatcatgctggactaatgttttaatttaatttaattgttgtcttggtagagatggggtctcgctattttgctcacgcagatctcaaactcctgacgcccaggtacactcccatctcggcctcctaaaatggtgggatcacagacgtcagccaccgagcccggtcacttttttgtattccccacagtattgatgtatatcttctgcgttcaaaagcaattttttaaagcctcataacgtggtaacagaatactttgcacattacaaaattcagaacacggaaacaagaagctcgcttttttttcccccctatttcggtttggccctttagatttcccctcccccaccggggcgggacttcccgccgacttctttcaggttctcagttcggtccgccaactgtcgtataaaggcgctgcctcaggccagaggcctcacaaagcgttgggtgagactcctcttgctcgtcatgtctggccgcggcaaaggcgggaagggtcttggcaaaggcggcgctaagcgccaccgtaaagtactgcgcgacaatatccagggcatcaccaagccggccatccggcgccttgctcgccgcggcggcgtgaagcgcatctccggcctcatctacgaggagactcgcggggtgctgaagg

SEQ ID NO: 35617 - DNA, 2300 bp, Homo sapien
aaataacagggaggggatagaaggcaattgttacttctggtaagaaattttcttggtccgattaggaaatgtcagagtcccttcgcatgtatgggaaagaagacgaagttagaggggctttgattctgaagcttatttctgaggcctttcaatgttcaaaagcgctcagcatgcccaagaaccacattttggggaatcattctgcaccccaacagtaccgtcactatcctattctaactttgtagatgagcaaagatttaaaaagaataaacaagtcacctcgtgtctgatcggtaacaagtcagctcgagtctgaaaggtaaacatttaatctaaaaccaaagttttctatttccagagtttcaactcttaactactttctaaacaaagaattgaatactaagagattatattagaatagttataggagttttataattttcattgatgttaaaataatttcagagtggccgagcgcagtggctcaagcctgtaatcccagcacattgggaggccgaggcatatggatcacgaggtcgggagttggagactagcctggccaacatggtgaaaccccgtctctactaaagatacaaaaaaattagccgggcgtggtggtgagtgcctgtaatcccagctactcaggggaggctgaggtgggagaatcgcttgaacccgggaggtggaggttgcagtgagccaagattgggccattgcactccagcctgagcgaaagggcgagactccgtctccacaaaaaaaaaaaaaaaaaaaaaaattcagagtataaccctgtatttattaataagaaagaaaatcaaatatacggaatcaaagttgctccataatggttgataacaaatctttagttgggtcatataaaagtgtctttttaaaaacctacaagcgtccaagcgaagcggctcacgcctgtaatcccagcactttgggaggctgaggcgggcggatcacgatgtcaagagatcaagagcatcctgtccaacatggtgaaacttgttctttactaaaaatacaaaaaattagctgggcgtggtggcgcatgcctgtagtccgcgctaatccggaggttgaggcatgagaatcgcttgaacccgggaggtggaggttgcagtgagccgagattgcaccactgccctccggcctgacgacagagcgagactccttccaaaaaaaaaaaaaaaccccacacacaaaacctacaaacaccaattttctagttataagagcttgttttaaggattttaattctattccaattaagtcctaaagctaatgcaattatcaaaatctcgaagagattttattcaaacttcacaaaaggtctctaaagttgtccagaaaccttggtgaaacagattaggaaatttggaaaggaaataatgcggagacccgtagtaccaaatcatgagacctctaatacaattttaaatattaatgtaataaaatttaaattttggtgtaataaaatcataaatttcaatattggtcccaagtatagagaaaaagtacatttatgttgaatgtggaaaacattatttttaaaatacagccgattaaaaaattgctggggaactgattataactattgataattcctaagaaacatagacaccaaaacatcacttttatctctttaatagaaattggttaaattataatcaatataaggaggttacaaaactccatatacaacactgtatacattttcttggaaaaatatgtgcaactgctctgcaaaatacatgattaactagcctgtgtgatgggataacattgtagtttcttaatttcttgtcctttcttgtatttcccacagtattgatgtatatcttctgcgttcaaaagcaattttttaaagcctcataacgtggtaacaaaatactatgcacgttacaaaattcagaacacggaaacaagaagctcgctttttttttccccctatttcggtttggccctttagatttcccctcccccaccggggcgggacttcccgccgacttctttcaggttctcagttcggtccgccaactgtcgtataaaggcgctgcctcaggccagagtcctcacaaagcgttgggtgagactcctcttgctcgtcatgtctggccgcggcaaaggcgggaagggtcttggcaaaggcggcgctaagcgccaccgtaaagtactgcgcgacaatatccagggcatcaccaagccggccatccggcgccttgctcgccgcggcggcgtgaagcgcatctccggcctcatctacgaggagactcgcggggtgctgaagg

SEQ ID NO: 35618 - DNA, 2300 bp, Homo sapien
attttacttctggaactcacgaactctgaaaaatattacttagctagctttcatgattaaatggtggttcttgggagaaacagaatcaatggaataattttattatcaacttcaatgatcataacagcatattttatttaaaaacttattttaatttcaaaaatcttacaggccttctatggagctgtatcatttactctatattgagaaacaattattgaaaatttatacacataaataacacagatgacattttaaaagggaacaaatgaattaattcattgaaatcaggatggagtcctcaacatcaaataataaatttttttaaacaatgtgatatttatgatttttgtgattgctgttttattccaagaaatactagttgtatgtgattgcaatcaagacttaaatctaggaaataaaaatgtgtgaagagactcaaaaattaatgtatttcaatggactggagatcctgtagaaattcattttcattaacatgtctgtatgaggaaaacagtagcttatataagtttaggtggagaggaatagaaggccctctctatagctaggaggacttggtgatctgagaaggaaaggagtgatcttggtgaaagaaaggaagcaggaaaaactgacaggaacaggagtatatgaccatgatataataaaaaacctgacttacaatgtccttcattcatactgtttttaaataacacgttctaaagtaatctcacaccctaaccccaaccctttcccatcatttatataaacagtccattatgacatgtattctttgcccaagccaacttgaagctccttttggatagagactttatgtatctggattaatattgtattcccatttaggagagtgcctggcacaccatagatgctcagaaagattcaattgaactcgaataggtaggccaaacacacacggggtcctaaattgtgcagaagggtcagatacctaaattttgcttccatggtcttatgaagtataaactaaaagcccaagtaaggagcaaaggttagtttaccaattttatctctggaacccaggtacactgaaaagtattatttagctagctttcagtcctctgtaatacagaaagtaaatatctgacactaggttcatttgaaacactcttgctctgtcacacaagctggactgcagtggtgcaatcatagctcattgcagcctcgaactcctgggctcaagtgatccttctggtctcagcctcccgagtagctaggactacaggctatgagacgccaggcacggttagttattttacttttgtaaagatcaggctggcttcgaactccaaggctctagcggtccttccgcctcggcttcccaaagcggttctgtttaccggatggtgccaaacagttccaggctcttggtgcccggtagaaattggacgacacacacacagatagcaaagcaaagcagcaaaagtttagtaaacagagtattacactctcgggggtgggagagagcggactgacctctgcgaggtgagatcagcgtcagcttgctgtagtttgagtcattttatgtgtgtgcgtgcgtgtgtgtatgttttctgttcccagtgctgcctaatctatagccagcatctgcccttttattgataggtttgttgcttactttgtcctctgtggcttgtgcctctatcttataatcttaaatatatgcatgatatgtagcccatatgcatgaaccttaagtagctgattatcatacgggcttttgttaaggatacttttcctctctaatacgcatgcccatctctgaagagctgcctcttaaactggtttgttccagatcttgccggccacgaggtccttgctcacattatctcttttgtttcggctgcaaaaggttcactgcttgttatctcgcttcttgttcacccgcccatctaccttacttctgccctttgcttttacttattctgccctctaactttcagctccctttgttattctcttgcctcacttttcttattgtttcagctgtattgcaggcgcgagctgccgcgcctaaatttcttgatgtaccgtaaacatttcaatgtctactttctatctcaaaacaatgtggtgtaaaagccgtttagttttgcttcatctccatacagcattccagtgccattgcaaaatgactcgactatcagataaaactgaacacagctctacttggtgaaaaagtaggtggctctgaaaagaacctttttggtttggaccgaggtatgagtaatgaactgctccagccccgctacttgcccttg

SEQ ID NO: 35619 - DNA, 2300 bp, Homo sapien
tgtattctttgcccaagccaacttgaagctccttttggatagagactttatgtatctggattaatattgtattcccatttaggagagtgcctggcacaccatagatgctcagaaagattcaattgaactcgaataggtaggccaaacacacacggggtcctaaattgtgcagaagggtcagatacctaaattttgcttccatggtcttatgaagtataaactaaaagcccaagtaaggagcaaaggttagtttaccaattttatctctggaacccaggtacactgaaaagtattatttagctagctttcagtcctctgtaatacagaaagtaaatatctgacactaggttcatttgaaacactcttgctctgtcacacaagctggactgcagtggtgcaatcatagctcattgcagcctcgaactcctgggctcaagtgatccttctggtctcagcctcccgagtagctaggactacaggctatgagacgccaggcacggttagttattttacttttgtaaagatcaggctggcttcgaactccaaggctctagcggtccttccgcctcggcttcccaaagcggttctgtttaccggatggtgccaaacagttccaggctcttggtgcccggtagaaattggacgacacacacacagatagcaaagcaaagcagcaaaagtttagtaaacagagtattacactctcgggggtgggagagagcggactgacctctgcgaggtgagatcagcgtcagcttgctgtagtttgagtcattttatgtgtgtgcgtgcgtgtgtgtatgttttctgttcccagtgctgcctaatctatagccagcatctgcccttttattgataggtttgttgcttactttgtcctctgtggcttgtgcctctatcttataatcttaaatatatgcatgatatgtagcccatatgcatgaaccttaagtagctgattatcatacgggcttttgttaaggatacttttcctctctaatacgcatgcccatctctgaagagctgcctcttaaactggtttgttccagatcttgccggccacgaggtccttgctcacattatctcttttgtttcggctgcaaaaggttcactgcttgttatctcgcttcttgttcacccgcccatctaccttacttctgccctttgcttttacttattctgccctctaactttcagctccctttgttattctcttgcctcacttttcttattgtttcagctgtattgcaggcgcgagctgccgcgcctaaatttcttgatgtaccgtaaacatttcaatgtctactttctatctcaaaacaatgtggtgtaaaagccgtttagttttgcttcatctccatacagcattccagtgccattgcaaaatgactcgactatcagataaaactgaacacagctctacttggtgaaaaagtaggtggctctgaaaagaacctttttggtttggaccgaggtatgagtaatgaactgctccagccccgctacttgcccttggccttgtggtggctctcagttttcttaggcagcagcacggcctggatattgggcaggacaccaccctgggcgatggtcactttaccaagcagcttgttgagctcctcgtcgttgcggatggccagctgcaagtggcgcgggatgatgcgggtcttcttgttgtcgcgggccgcgttgccagccagttccaggatctcggcggttaggtactccaacaccgccgccaggtacaccggcgctccggcaccgacccgctcagcgtagttgcccttgcggagcagtcggtgcactcggcccactgggaactgaagacccgcccttgaagaacgggtcttagccttggcgcgagctttgccgccctgcttgccacgtcccgacatgacgtaaaaaattcaatcagtaacgttcctgagactgacgtaacgctaaagctccgctacttatagtcaacagaggcacgaaaactaagctgtgctattggctaacattacagtttcgctttaaccaatgggattgcggttttgaaaaacacttattttgattggacaaagttaatatacgtttccaggactcaccactggttaaacgcacaacttcattctctaccccacttgcgttaagaagcagtgaataagcggtaggttgacagagctaccgtcttcctgtttttttcctccaattttccggcagttactcccagtcatgcccgagccctcaaagtccgctcctgccccgaagaaaggctccaagaaggcagtgacaaaggcccagaagaaggacggcaa

SEQ ID NO: 35620 - DNA, 2300 bp, Homo sapien
attaaaaatggcattttttccattctcatatgtctcctgttgcatgtgtgcaaaatattctttcatgtaaacagctaggaatcgaatggttgggtcactggagtacacttactggataaaaaatattatcaaaaaccttcagcaaatacaatttgatgtggaagagttcccacactgattcttggcaaagaccaaaatacttttaaatatgccactcctaagtgtttaaaatgaagacactcattttgatttcctgagttgggggtgggggaaaacaatggagaacagcccttctcctcctctatttttttttcttttaacatttcttccaattactagagatacagtaaacgcaagtgacacagacaagaaaacatggagcagaccctaacagaaaaagtagggaatagaaactatgttcataaataggaattccacacaagagaattatgggaatgagtaagacagcaagattcctccaaaaaacctgcactgccaagaattttcccaactagaacactcaccagagaaaacggtggccaagtttcaaactgccctcgcagtgtcgggattggccattgacatcaactcagcccgattgacgtgtacggtgctgtaaactgggttcaaacttttttctactgcctttctatcttaatatttagcaaatccaaactggggacaagggaggagaaacagcaccactctcaaaacaaacaagtcgatttgtacgtttgtgtgtgtgccaactgcttcattactaaagtacacatgaagtttagggacagagcgccggaagcactgtggatattttaccagtgacacttaagtattatattttctttggggtcaacaggaactgaattttccctttactaggtttgtctgatgataaacctcatccttcttcagatataaaattgtctcaagcgttgctgcaacatgcagtacactgcagtgctaattaatttcttttctttttctttcttttttgagacagagtttcgctcttactgcccaggctggggtgcaatggcccgatctcggctcactgcaacctccatctgccgggttcaagcgattctcctgcctcagcttcccgggtagctgggattacaggcgtccgccaccacgcccagctatttttttgtacttttagtagagacgggtttcaccatgttggctaggctcgtctcgaacttctaacctcaggtgagccacccgcttcggtttcccgaaccgggattagaggcttgagccaaaattagtttctaacaaggctaaaggaatcttggaaatcgtctttgtagcaagtaagaaatacctgctgtaagaacagtgagtgccagttctctttgggaagactgagtggctctgaaaagagcctttggggtgtgggccgagactgaccgaacgttccgcggtgggcgggctcacttggaactggtgtacttggtgacggccttggtgccctccgacaccgcgtgcttggccagctcccctggcagcagcaggcgcacggccgtctggatctccctggaggtgatggtcgagcgcttgttgtaatgcgccaggcgggaagcctcgccggcgatgcgctcgaagatgtcattgacgaaggagttcatgatgcccatggccttggacgagataccggtgtcggggtggacctgcttcagcaccttgtacacgtacacggagtagctctccttgcggctgcgcttgcgcttcttgccgtccttcttctgggcctttgtcactgccttcttggagcctttcttcggggcaggagcggactttgagggctcgggcatgactgggagtaactgccggaaaattggaggaaaaaaacaggaagacggtagctctgtcaacctaccgcttattcactgcttcttaacgcaagtggggtagagaatgaagttgtgcgtttaaccagtggtgagtcctggaaacgtatattaactttgtccaatcaaaataagtgtttttcaaaaccgcaatcccattggttaaagcgaaactgtaatgttagccaatagcacagcttagttttcgtgcctctgttgactataagtagcggagctttagcgttacgtcagtctcaggaacgttactgattgaattttttacgtcatgtcgggacgtggcaagcagggcggcaaagctcgcgccaaggctaagacccgttcttcaagggcgggtcttcagttcccagtgggccgagtgcaccgactgctccgcaagggcaactacgctgagcgggtcggtgccggagcgccggtgtacctggcggcggt

SEQ ID NO: 35621 - DNA, 2300 bp, Homo sapien
gaaaacatgaagcataatcaatttacatcttaaattagaggaacttcataggacaggtgtgaaagtggggagaagcgtggagtactttggtctacttaggacaaatgtagaaaaaagtaattagtagaaaaattccatctgccagcatggcatctggattagcaaggaaggatccaaacctcatttctaactggtgggaagaggtaatataaattggttctaatttctttccttcctctttctccattttaatctcaacacctttaggtcattttgtgcaaattaggcaagaaagcacattccctgctttcatgttataaaagaaaaattgaaagagaatgccacctggattacatggtagtcactgagtatcctaccaggtggcctgaaaattgtggtgtaacctgcaaaacgtccagtgatatttcagtagaggttgataggacttttactttaaatacttggttttctagacaataactcaacaggggattctcggtgttgaaattgagcctggataagtgaaattcgcacaataaaactcccgttttgtgtatttgacgtttgtaacataaaatacttagtagcagataatattggaaatatcataaggccacaatgtatcttttgcataaattaagaagcatttatgaaaggctttaggttaaagctaactgaacatttcaaaactagggataaacgagcgtcagttctatttaggaagtgtgaatatctctgaaaagagtccttagggtgtgggtcaggaagaacctagtggagtgtgagtcaggaagaacctagtggggttccaagtggacgaaccagcaaggagctcacttggagctggtgtgcttggttacggctttggtgctctcggacacagcatgcgtgacaggcgaacagccgtctggatctccctggaggtgatggtcgaacgcttgttgtaacgcgccaggcgggaagcctcgcccgcaatacgctcgaagatggcataacgaaggtgttcaagatccccattgctttggacgagatgccggtgttggtggacctgcttcagcaccttgtacaagtacacggagcagctctccttgcggctgcgctttcgcttcttgccttagtaatagtcttcttggaaccctttttcggggctgtggccgacttggtggggtcaggcgtgttgtagtttaactgcagaaagggtacaaggaataggaaaaagcggccgggcgcggcggcgcacgcctgtaattccagtactttgggaggcggaggcgggcggatcacttgaggtcaggagttcgagagcagcctgaacaacatggcgaaaccatgactcttcaaacaaatgtaaaaaattagctgggcgcgtgatgcactcctgtaaccccagctactggggaggctcagggaggaggatcgcttcggccaggaaggcggaggttgcggtgagccacgatcgcgccactgctctccaacctgggcggcaaagccagaccctgtctcaagggaaaaaaaaaaaaaaaaaaaaaaaaaaagtcgccgggcgctgtggctcacgcctttaatcccagcattttgggaggttgaggcaggtggctcacctgagctcaggggtttgagaccaggatgaccaatatggtgaaaccctgtctctactaaaaaatacaaaaattagccgggctatggtggctgacgcttgtaatctcagctactcaggaggccgaggcaggagaatcacttgaacccaggagcggacgttgcagcgaccggagatcgtaccaccgcactccagcccgggcgagagggagaccctgtcttaaaaaaacaaaaaaagaagaagaagaaaaagctgtgtgttgtaacgtcctgttcacgaattcttatgcaaatgaggtgattaataaaatagtgtgtaggactggtggcgattctagatgacgtcatatacacgtttgtccaatccaaagaagcatgtttcataacagcgattccattggttgaaataaaactgtaatttgagccaatggcacagctttattttcgcgcccagtattgactataagtagtggagctctggtgaacttctctcggctgttctcagttcctccatttatcgtttcttcgtcatgtcgggacgcggcaagcagggaggcaaagctcgcgccaaagccaagacccgctcttctcgtgccggtctccagttccccgtgggccgagtgcaccgactgctccgcaagggcaactatgctgagcgggtcggggccggcgcgccggtgtacctggcggcggtgctggagtac

SEQ ID NO: 35622 - DNA, 2300 bp, Homo sapien
gtagcaaattaatagaaacctgtagaacatatttaagattacttcctgtcaggtagtaaatgctgaatgagtgtcagctcttattgttataccctggctccattacacatggagttttggggtttttttctcctggaccttctaagttttgtgtttggaacagtggaaagtgcttggttagatcatttgctcatgaagatctccttttctttagttctcaatttgcattgttcggtaagaggcctatacaatatctgtgtctctgtggagaaatttataacacagcaaaagggctaggtaataaatagcttagggtttaaaggccatatatagtctctgtcacacactctttagtttttagttagtttgctttttcgagacaggatcttgctccattgccctggctggagtgcagtgctgctatcattgctcactgcagccttgacaccctgaattcaagtgatcctcccacctcagcctcccgagtagctgagactacaggcatgtgccaccacatccagcaaaatgttttgtatttttattaaagatggggttttaccaagttgcccaagctggtctccaactcctgagctcaagcaacccacctatcccagtgtccccaagtgctgagattacagacatgaaccaccgtgcccagcctttgtttttgttttttttttttttaacaatacttttaaaacataaagacacttcttagcttgagggccatacagaaaaaagccattgtccagatttggccatagtctgccaacttctccaggagttcttagaagatgaagtgcattggctactttaaattttcttgcacagcatttcaagaatgagaaataagtgactgttgatttcattaggaatccaaatcatcatttgatcatttttatcatccaggcatcctgtccaatcccctccacctcccataaattgtaaacttcatttatttcaacctcagtgtatttgcctatgttttcctgagttcctctgaacctctataatgtgaagtcgctcaatatccaatccaaccttttcacagtcaatagccagatattcttctaaaatattagcgctaaaacacacaaaaatacccatattgatgtatcctggctgctcatagaagagagtattcctgatggtgcagcttgttaaatgtgggtggagattcagggggagcagtgagaacatttcgaaaacctgacagtgtcctgggccacctaaacagtttgtgcatttgaggatcactgggagctcttgaataattttccacaagtttgagttttctctaaactgaattatctatattatttttcttccccttttttaatggatttgcccaggaactaaaaagagaaaacactctaattagaaaacataacacatttaagtttgaatgtgaatctgagtagttagatccttaagtcaaagcgatttgtattactggtgctgcaatgcagaagaagtcactctgactgtggaactcttccaagctgcaaaatcccattctgtaaagacattagcacatggaaactcctaggacacagaaccagtttgtaaagtcaagtctatgtggttaagttggggctgtaggcaaccagctgtcctgtgcctgtgttacttgctacagttagaaacaaacttcatgcccaaaccaaggaacccagtgtcttttctcttgcaaaaatcaaagcatgaactcatgggcaaatttttaaaaataactttcactggatacttagtagaaatttatcgcgacacgctactaactaacatgatgccctcagcccaatggattcttatgaaaagctgaagggattttttaaaatatctttcatcaattgcacaagattcttgaaaacacaaacaagtatgtgaacctggaggctgttttcctcctttggagcttcaaagtgccaaattctgtaccattgttttaagcatttaatcaaattttgaggactaacaaacacaatttgggagtccaaccgcgagcggcggcggccagagggcggtggattggacgctccaccaatcacagggcagcgccggcttatataagcccggggcccgagcatagcagcaacgcaaaacctgctctttagatttcgagcttattctcttctagcagtttcttgccaccatgtcggaaaccgctcctgccgagacagccaccccagcgccggtggagaaatccccggctaagaagaaggcaactaagaaggctgccggcgccggcgctgctaagcgcaaagcgacggggcccccagtctcagagctgatcaccaagg

SEQ ID NO: 35623 - DNA, 2300 bp, Homo sapien
tgtgatccacatgcatcggcctcccttctggctgggattacaggcgtgagccaccgcgtccggccatttgaaactctttttcttggaataaagtcatcctcggtcttttcctcctgcactttatttgtaaatgtaaaagacagggtttctgggcacagctgatttcctagttcaacagaaaagaggaacatgagggagctcaagcggcaccttcacaattctaaggaaatacagggtaaaagccacctttctttctcaaacagcttcctgaagtgtttctaggtggaatgaggaaaaaaaaatagaaagttcttgccccaaaaatgtggttggcgagggagagaaaggaacagaaaggacagctacagaaagagtaaaatataaggaaaagaatagagaaccaaatttgagaaaggtgaggaatcccaccttggagctatcatcaggcgtcgtcttttgcagtcagccactccataggctgatcacttcgagtttgtacggaagcagtttctacacgctatttcacaaatgcccgaaacgactgtgattacccctctagagatggcgccatttgattccagcagccacaaagcactagaacaatcgatgctaagaggtgacaggaaaaacaggctgcaaagacccagacaatggaatgcagcggtggtcagcctaaaacactgtagaagggcaagatgagctgagtaatttttaactgggcatcatttttagaaactggagtttaagtacccccttttccattttttcctgaagtcgtgggcagggcgcaaggtctgtgaatcggccgaccggatgcagctggtgtggagagttcccaatcaggtccgatttattactatataaagtactgctgcgaggcttgccgtgttgcattttgtttagtacaagacatgtctgggcgcggcaaaggcgggaagggtctgggcaaaggaggcgctaagcgccaccgcaaagttctgcgcgacaacattcagggcatcaccaagcccgccatccgacgcctggcacggcgtggaggcgttaagcgcatctcaggccttatatacgaggagacacgcggagttcttaaagtgtttttggagaatgtaatccgcgatgcagttacctacacggagcacgccaaacgcaagacagtcacagccatggacgtggtttacgcgctcaagcgccagggccgcaccctgtatggctttggcggctgagtgttttacttacttacacggttcctcaaaggcccttctcagggccacccatgaagtctgtgaaagagctgtagactaaagatagttaatttcttaagaacacttaaacgtatggcagttttggcaaattagcgattccacataagcagtcgctgaagtttgaggttcggtgcccctttcagcattacttagtggttaaaagtgccggcttctctgatacacggccaaatctataacgcctctctggtttttgcaaaagtcataatgaaacagccggtctcatttatcttgtatcgattactttaccgctaccaatgcgagggctgtgtaactatgacactgtggtccgcaacgcccaaaatgttttaatatcgccctttacagaaaaagtcggccaacttctaaaacattaagtacgtttaaatttgagaaatactggcataccacaacgctcgaatttcatatccccttcaatgcctccatttacaaatttactctagtttcacttttcctttacgttctttaactttttgtcaaatcagtaatgacacctcgtaattaaaatagtgcaaggcaagtttagatttatcaagcttatatttaaacaggattttgatgcatgaaaaatcctagacttttgggggatttttttttgtttccgtttttgtttttctttagctagcaaaaccattttacgtttcttgacccaaaacagaggcggaatgtctccctttcactagcagattaaactgggagccaattccgtgtgtgagacgtggcatggcacagtctactgtccaatcagaacgcgagggcagctataaataccgggatgatcagtttttttctctcatttgtgttgagtaggtacgtctacttagccatggcacgaacaaagcaaacagctcgcaagtccaccggcggcaaagcgccgcgcaagcagctggccaccaaggcggctcgcaagagcgctccggccaccggtggcgtcaagaagccccaccgctaccgccccggcaccgtggccctgcgcgagatccgccgctaccagaagtcgaccgagctgctaatccggaa

SEQ ID NO: 35624 - DNA, 2300 bp, Homo sapien
acacctgtagtcccaggatctggggaggctgaggtgggaagatcgcactccagccttggtgacagaccaagagcctgcctcaaaaaaaaaaaaaaaaaaaaaaaaaaaaaatttacacctctgaaaaacacagatgtcaatgctgtagggtacagaagttgtgagaccataagggtcacagcctgaactaataacaaaaaagaggttaatcgccgggcgcgatggctcacgcttgtaatcccaccactttgggtggccgaggcgggtggatcaccaggtcaggagatagggaccatccaggctaacacgctgaaaccccgtctctactacaaatacaaaaaataaggccgggagcagtggctcgcgcctgtaatcccagcactttgggaggccgaagtgggcggatcacgtgaggtcaggagttcgagaccagcctggccaaaacggcaaaaccccgtctctactaaaaatacaaaaattagccgagcgtagtggcgggtgcctttaatcccagctacttaggaggctaaggctgaagaatcgcttgaatccgggaggcggagaatcgcttgaacccgtgagggggagattgcagtgagcagagaactcaccattgcactccagcctggggtgacaagaccaaaactctgtcaaaaaaaaaaaaaaaaaaaaaaaaaaaaggaaaaagaggccagcctagctcagtgagaaactgattaactattacaacatgagtatgtaatgttttgcacatacagtaatcatagagtagttcataatgtacttgcagagactgatttttagaataaaattagatatttgctaaagaggtaaataatcatacacatttgaaatataaaaggtaaacattactgagaaacgaaatctgatagctggaaggcagggcaaggcagagccagcctaggtcaggaaggtcacacaacatttatttgaaacttttttttgagacggactcttactttgttgcccaggctggagtgcatggagtgcaggggctcgatcttggctcactgcaacctccgccttctgcgttcaagcgattttcttgcctcaacctcctgagtagctgggattatgggcgccctccaccacgccaggccaattttctttatttttagtagagaaggggtttcgccatcttagccaggctggtctcgaactcctgaccttgtgatccacatgcatcggcctcccttctggctgggattacaggcgtgagccaccgcgtccggccatttgaaactctttttcttggaataaagtcatcctcggtcttttcctcctgcactttatttgtaaatgtaaaagacagggtttctgggcacagctgatttcctagttcaacagaaaagaggaacatgagggagctcaagcggcaccttcacaattctaaggaaatacagggtaaaagccacctttctttctcaaacagcttcctgaagtgtttctaggtggaatgaggaaaaaaaaatagaaagttcttgccccaaaaatgtggttggcgagggagagaaaggaacagaaaggacagctacagaaagagtaaaatataaggaaaagaatagagaaccaaatttgagaaaggtgaggaatcccaccttggagctatcatcaggcgtcgtcttttgcagtcagccactccataggctgatcacttcgagtttgtacggaagcagtttctacacgctatttcacaaatgcccgaaacgactgtgattacccctctagagatggcgccatttgattccagcagccacaaagcactagaacaatcgatgctaagaggtgacaggaaaaacaggctgcaaagacccagacaatggaatgcagcggtggtcagcctaaaacactgtagaagggcaagatgagctgagtaatttttaactgggcatcatttttagaaactggagtttaagtacccccttttccattttttcctgaagtcgtgggcagggcgcaaggtctgtgaatcggccgaccggatgcagctggtgtggagagttcccaatcaggtccgatttattactatataaagtactgctgcgaggcttgccgtgttgcattttgtttagtacaagacatgtctgggcgcggcaaaggcgggaagggtctgggcaaaggaggcgctaagcgccaccgcaaagttctgcgcgacaacattcagggcatcaccaagcccgccatccgacgcctggcacggcgtggaggcgttaagcgcatctcaggccttatatacgaggagacacgcggagttcttaaagtgtttttggagaatgtaa

SEQ ID NO: 35625 - DNA, 2300 bp, Homo sapien
ggccatccgcaacgacgaggagctcaacaagctgcttggtaaagttaccatcgctcagggcggtgttctgcctaacatccaggccgtactgctccccaagaagactgagagccaccacaaagctaagggcaagtaagggctgaactttaaaaatgtaaacttacaagacaaaaggctcttttcagagccacccaccatttctacggaagaactgagcactctgttctccaaacctatcagaaatttgtggccgagttcaagcactgaggccattactttcctattgggtaaaataaaagtattgaatcaggcctagtaaatactatccaactgctaccttataacatgaaggaacctccttaattgtcccctccccacaaactgtcctgggtctttaaaaaacttggggccgggcgcggtggtttatgcgtccttagcattttgggaaactgaggcaggtgggtggggaggggagaaatctctagggacctggagttcgagaccaccctgataacgagacccctgcctcttaaaaaaaaaatgactgggcgcggtggctcacgcctgtaatcccagcactttgggaggccgaggagggtgtatcacaaggtcaagagatcgagaccacccaggcaaacatggtgaaaccctgtccctactaaaaacacaaaaattagccgggcgtggtggcgagcgctactaaggagacaggcaggagaatcgcttgaacccaggaggcagaggttgcagtgagccgagatcacgccactgcactccagcctgggcgacagagcgagactccatctaaaaaaaagaaagaaaaaaaataccaggcgcgaggccctcgcctgtatttggcggactgacagcagaaggaacacttgagtcccaggaatttgagatttcagtgagccatgacctcgccactgcactccagcctgggtgacaaagcgagaccccgtctcaaaaaaagaaaaacaaaacccaaacaaaagtatttctggtgatcatttgctcctgtgaatataataaatgttaaactaacctttttgttgtctttatgggtctttatcaataccagaacctggtagttctttgatcaactaaaatctccatcctaataaaatgctgttgtcagaactacccagattcactggcaaaaatctaatcactgacccaaacctgtaattccgcgcatgctaatgaaattaagcaataatttacataattaatccaatcagccattggattgcattaaactcagttaatgaagaggtcagataccatttattggtatcatttagtcaagcacctatcaaactccttccccacaccacactggacaaaactaaagttttggtgttttagagaatgtgccagcctaagtttaaattgtttttgttctgggtcttggtacagtcattaaaagatttaattaagcagttacaaaacggaactactttttggaaatactagcaaatacgttgttctactgtatgtatttttacacgatccgaaataggaaaaatgacccattggaaatgagtttaagactacgactgacctacacaaattctaggtcagattatcttttcattgggggaatcttaacatgattggttgaaaacaataaataaaagtggcgcggaggacgagcgcagtggctcacgcctgtaatctaagcactttggaagtccgaggcaggcggataacttgagatcaggagtttgagaccagcctggccaacatggtgaaaccccttctctgctaaaaaaaaattagccgggcgtcgtggcaagtgcctgtagtcccagctactccggaggctgaggcagaatcgcttgaacccgggaggcggaggttgcagtgagctgagatcgcgccaccacactccagcctaggcgacagaattagaagccgtcaggtaaaaaaaaaaaaaaaaaaaaaaaagtggcaggaaccaaatgaagatagtattaacaaccaaccaggtttttcctacaacagttctgaccaatcaggatcagatcatcgttataaattctggtagaagccactgctcattcagctgcttgctttcagagcatagctttctcaactatggcccggacgaagcagacagctcgcaagtctaccggcggcaaggcaccgcggaagcagctggccaccaaggcagcgcgcaaaagcgctccagcgactggcggtgtgaagaagccccaccgctacaggccaggcaccgtggccttgcgtgagatccgccgttatcagaagtcgactgagctgctcatccgcaaactgcc

SEQ ID NO: 35626 - DNA, 2300 bp, Homo sapien
gtaggtcagtcgtagtcttaaactcatttccaatgggtcatttttcctatttcggatcgtgtaaaaatacatacagtagaacaacgtatttgctagtatttccaaaaagtagttccgttttgtaactgcttaattaaatcttttaatgactgtaccaagacccagaacaaaaacaatttaaacttaggctggcacattctctaaaacaccaaaactttagttttgtccagtgtggtgtggggaaggagtttgataggtgcttgactaaatgataccaataaatggtatctgacctcttcattaactgagtttaatgcaatccaatggctgattggattaattatgtaaattattgcttaatttcattagcatgcgcggaattacaggtttgggtcagtgattagatttttgccagtgaatctgggtagttctgacaacagcattttattaggatggagattttagttgatcaaagaactaccaggttctggtattgataaagacccataaagacaacaaaaaggttagtttaacatttattatattcacaggagcaaatgatcaccagaaatacttttgtttgggttttgtttttctttttttgagacggggtctcgctttgtcacccaggctggagtgcagtggcgaggtcatggctcactgaaatctcaaattcctgggactcaagtgttccttctgctgtcagtccgccaaatacaggcgagggcctcgcgcctggtattttttttctttcttttttttagatggagtctcgctctgtcgcccaggctggagtgcagtggcgtgatctcggctcactgcaacctctgcctcctgggttcaagcgattctcctgcctgtctccttagtagcgctcgccaccacgcccggctaatttttgtgtttttagtagggacagggtttcaccatgtttgcctgggtggtctcgatctcttgaccttgtgatacaccctcctcggcctcccaaagtgctgggattacaggcgtgagccaccgcgcccagtcattttttttttaagaggcaggggtctcgttatcagggtggtctcgaactccaggtccctagagatttctcccctccccacccacctgcctcagtttcccaaaatgctaaggacgcataaaccaccgcgcccggccccaagttttttaaagacccaggacagtttgtggggaggggacaattaaggaggttccttcatgttataaggtagcagttggatagtatttactaggcctgattcaatacttttattttacccaataggaaagtaatggcctcagtgcttgaactcggccacaaatttctgataggtttggagaacagagtgctcagttcttccgtagaaatggtgggtggctctgaaaagagccttttgtcttgtaagtttacatttttaaagttcagcccttacttgcccttagctttgtggtggctctcagtcttcttggggagcagtacggcctggatgttaggcagaacaccgccctgagcgatggtaactttaccaagcagcttgttgagctcctcgtcgttgcggatggccagctgcaagtggcgcgggatgatgcgggtctttttgttgtcgcgggctgcgttgcccgccagctccaggatctcggcagttaggtactccagcaccgccgccaggtaaaccggcgcgccggccccgacccgctcagcgtagttgcccttgcggagcaggcggtgcactcgtcctacaggaaattggagcccagctctagaggagcgggttttggccttggcgcgagccttgccgccctgcttgccacgtccagacatggtaaaacgacctgtggcctaagtcagaaagtgagtgaaaggaacctacagggacgcgcattttatagcagctgctgggcgcgaaaaagaagctgggccattggctaagcttgcagcttcctcttaatgcaaatgagctttctgaatatacgtgttttgattggactatattgatattaacgtcatctgagtaacttccaatcagacagaagaatttctcaatctcatctgcatatagacttgtaaataaatagggcataacccagcttgtcctcattcttgttatttgagtgctctttcactctcctccgccatgcccgacccggctaaatctgctcctgcccccaaaaagggctccaagaaagccgtaaccaaggcccagaaaaaggacggcaagaagcgcaagcgcagccgcaaagagagttactctatctacgtgtacaaggtgctgaagcaagtccaccccgacaccggc

SEQ ID NO: 35627 - DNA, 2300 bp, Homo sapien
catagctgcaaaggaagtgacgtcaggaaaataaaggaaaagttaaggggtgattttaaagcctggagtggaattgtggaggggcttgctattttgctgctaaagatttacaatagaagtaatttattgaagaggggataacgcagtggcagaggatgcaatgctatgagaattcaggcactgttgagaagaggggatcatgccttgaaaagtctccactcccttgtactcgcacgctcttggtttacctcctatttctgtgatctcttctggggtccgcttctctttaaacgcggggttctccaacttctatctcaggattcctaatcatggactttaaaatcccagcctgaacgctgcccccgccccagctaatcctggcacacctccctccccaaggccaactgattaacattgcaaaaaagcggctttcccaagttgccaggttctttgttcaacattttatcctaaaggagcttccttagcctttaatgtttcccgtcccgctttgacaccaataatttcaacccaccctaacatatctgcagcgatgccagacgagatgcctattctctaaagtgtatggaaaatggacaccggtaagtcaatgtcacccaggatccgtacaactgcagtaagagggacggttaattcacagcttccagctcttggcgccagagtccgatgcactcctgcagataacggtcatttccattccgggagaacctcttcgaaaaacaacccggatgagactatctggcaaattgcagcccttggcgggcttttcaaatagagcgttgaccaatcaaagaagggggacgttacaggcactgaaagaataacccggccgcgcgcgatggctcacgcctgatatcccaacattttgggaggccgagatgggtggatcacgaagtcaggagttcgagactagcctggtcaagacggtaaaactccgtctctactaaaaatgcaataattagtcgggcacggtggcgggcgcctgtaatcccagctacttaggaggccgaagcagaattggttgaacccgggagacggagcttacagtgagccgagatcgcggcactgcactctatcctgggcgacagagccaagactccatttaaaaaaaaaaaaaaaaaacaacacaaaaggaaagagtaaccgaaaaccgaaagcaaacttgtaattatagcttaaagcacaactgcaagcctttttccccaagggtatctaagaacccaagctaaatttgtctgatggagcgtctatactcacacgcaaaaagcctagggagcttagcttaccttttcccgccgtcttccctcctaatggaggccggccggagtccacccaaaagactacaagcaaaatgcacaggctctttctctggaagcgtgagtggctctgaaaagagcctttggattgctggcagctgcgagagctcacttggagctggtgtacttggtgacggcctttgtgccctcggacacggcgtgcttggccagctccccgggcagcagcaggcgcacggccgtctggatctccctggaggtgatggtcgagcgcttgttgtaatgcgccaggcgggaagcctcgccagcgatgcgctcaaagatgtcattgacgaaggagttcatgatgcccatggccttcgatgagatgccggtgtcggggtggacttgcttcagcaccttgtacacgtagatagagtaactctctttgcggctgcgcttgcgcttcttgccgtcctttttctgggccttggttacggctttcttggagccctttttgggggcaggagcagatttagccgggtcgggcatggcggaggagagtgaaagagcactcaaataacaagaatgaggacaagctgggttatgccctatttatttacaagtctatatgcagatgagattgagaaattcttctgtctgattggaagttactcagatgacgttaatatcaatatagtccaatcaaaacacgtatattcagaaagctcatttgcattaagaggaagctgcaagcttagccaatggcccagcttctttttcgcgcccagcagctgctataaaatgcgcgtccctgtaggttcctttcactcactttctgacttaggccacaggtcgttttaccatgtctggacgtggcaagcagggcggcaaggctcgcgccaaggccaaaacccgctcctctagagctgggctccaatttcctgtaggacgagtgcaccgcctgctccgcaagggcaactacgctgagcgggtcggggccggcgcgccggtttacctggcggcggt

SEQ ID NO: 35628 - DNA, 2300 bp, Homo sapien
gagatgattttcaaatatgagaagcagcccaagggaagttggactgcgtgacttataagatccctttcaagatccctttccatccaaaaagtgtatggctctgtcaactacaatataggagaaatttggttagattttaaaaaaacttcctgaagataaaaaatggggtataatggaatatttaaataaaggatacaatgaagtaatcaactgtatcagtttcctagggctttcataaccaattgccatgtgcttgacggcttaaaacaatagaaagttattatctcacagttctggaagccagaagtctgaaatcaaggtactagcaaggccatgttctctctggagggtggtgggtgggtgggcagacgaggtgtggtggtggtgatgaacttgtttctgctttttttggtttctagtgactatgggcatgccctgctcgtccctgtcttgtggccacatcactctcagctctggcttcattttcatctctttcttttctgtgtgagcctcagtcaaatccctctttacctgtctcttacagggattcatgatggcatttagaattcactcagataatctagaataaatccctcctcccaagattcttaatcacatctttctccatataaggtaacatttgcagattccagtgattatcacgtagacatatcttttgggaagggccatcattcatggtactgcatcatctgtatcacttagggctatatagtccatcatcttccaaagaaaagagcataaaatttacttttgaaggatcagattttttaaattttagattcttaaggaaattagcaggaatccaactttattcctacttgtagtataattactatctatcatgagaatttgtaaactgtatacattttcctgtttaaaacaacaaacacatagattatatcatttttcagtacatacactgagttgaccacagggcaaaaattggtgaaaaaataaaatcttttttgcagatataagagatcgatatagttttttaaaaggtgcataagtattagcaccatatggatagtggaattattaggaagataataccgtctgtctctctgtgtataatttaaatatagacacaaaatacactgtcatatttatcgtattttacttttctaaattatttacattgagtaacaatcatattcccataaatatgtcacaggttttttctttaaacatcatttccagtaccaaaatgtgtcccacattatgctccaacaaaaagacacggatcatcagactgataaaaaagcaaggcccactatatgctgtctataagaaaggtgctttaaatataaggacattcgccgggcatggtggctcacgcctgtaatcccagcactttgggaggctgaggtgggtggatcacttgaggtctggagtttgagaccagcctggccaacatggggaaactccgtctctactaaaaatatgaaaattagcaggacacggtagcagcacacctgtaatcccagctacttggaaggctgaggcactagaatcgcttgaacccgggaggcggaggttgcagtgagccatgaaacgtgctactgcactccagcctgggtgacagagggagactctgtttcaaaaaatatataaaataaaataaaataaaatacatatgtgtgtgtgtatgtgtatataaatgtatatataatgacacacataagtaaatagtaaaaggttggaaaaggtagccacaataatattaatcaaaagaattggctatattattatatatagtcagagcaggcgcccgcgacccgcggggcggaggtgctggcccagccagagcagtccaacctcgccgcagagaccgtgcgggagccgggccgcccacacgtgggccagcctccagtgttgcaggagacgctttgaagttacagtgaaagggatttttttcttcctgaaaagaagggaagaaggctctattaagaggctctattcaataagaacggaaagccacctaaatatctttttgaaaacacagcctatggtattagttggattcctgaaagacgacaaagccttcctagagacgacaaggcttcttttgtacgcgaggcattggtggttcagtggtagaattctcgcctgccacgcgggaggcccgggttcgattcccggccaatgcaacgatgacgttttattcttgaaaactacgtattctatttcagaaggtggatattttccctatgccttttttgccttacccttacattttgactacatgataaagcaggcaggccagcgacatgctgttt

SEQ ID NO: 35629 - DNA, 2300 bp, Homo sapien
gataaagtaataaaataattaagtgtcccattaagattttgggggggatgaatacatgtttagctggtagagttggcatattagtccctccaggaaatttatgagactgaatagcctctactcaaagcatctcagagttcctgcagaactgttgtactgtctctgacacagctgtgcatccatgtgccaagcactctgctaggcaatttacactaaagatcacatttatactcacatcatacgcttactatgaccccctcttgttggagttgatgtttgcgggttaagaaggaaatcagatgttgagttttaacaggcatagtcatttccattagtaaccctaggaaatttaaagttctaaaaatcataagtaattcctttctgagcacctcagaccttggatcactatagttcctttcatccactcttctccatttctaaaggtgtaagtctagggtaggtgtgtgcgttaatacctcacatcatttatacttcacatcaagacaacttagaaaaacattacagtagtccttccttatctgtggttttgctttgcacaatttcagttacccacagtcaaccatggtctgcaaatattaaaaggaaaattacagaagtcaacaattcataagttttaaatacatgccattctgaatagcctgatgaagtcttgtgttgtcccacccagtcatgggaatcatccttctgtttagagcaggggtgtccaatcttttggcttccctgggccacattggaagaagaagaattgtcttgggtctcacataaaatacagcaacactaacaatagctgatgagtttttttttaatcatcagtgaatgtcatgatgttttaagaaagtttacaaatttgtgttaggccacgttcaaagccatcctgggctgcgttcaaagccatcctgggctgcatgcagcccgtgggcctcaggttggacaagcttgatttaaagcatccacctgcctgttagtcactgagtagccatctcggttatcagatcgtcagaacacagaggggtgagtacactagaataaggtgttttgaagagaaaaaaagagagggacaccacattcacataacatgtattacaataaatgggggtctggagctgttatacttgctgcattttattaattattgttcttaatctcttactgtgcctaatttataaattaaacgttatagttgtgtatgtattaaaaaacatagtatatatagggtttggtactacccacagtttcaggtttctatccactggtggtcttggaatgtatcccccatggataaagggggaaccactgtatcatcttcattttacaaatgagaattgtggagatcaaagggttagaagcattccaatataatgaatgtaactaattagagagggtagggatatgagaccagcctgtcaccttcaaatatcatattactaaggaatctatacaaattctatgagcttctagaacgaaaaggatatgtctccttaaattgtgtctgataacttactagatactgtctacatggcttttttgagggaaggggaataatgggaggtggctttaactaatgttaactgatttctacaatcagggaatctcgctggccttgaagagaaattagaatgaattcaaatgacaggaaactgtatctacatctacctcacagtagatatctaggtaggaagaatgagaaaaatacatttacaaacagtaaaatatcaaaggatacattatgtgaatttggaaactgaaaatatggcttaagatttttgaaattaggctgggcacagtggctcacgcctgtaatcccagcactttgggaggctgaggtgggcagatcacctgaggttggggtttgagaccaacctgaccaacgtggagaaaccccatcgctactaaaaatacaaaattagtcggggtggtggcacatgcctgtgatcccacctactggggaggctgaggcaggagaattgcttgaacctgggaggcggaggttgcggtgagccgagatggcgccattgcactccagcctgggcaaaagagtgaaactctgcctcaaaaaaaaaaaaaaaaaaaaaaaaaaagattcttgaaattcgattcaatttgctaatatgctgttacagatatataaacactttttaaatacttggatggataaatatttatatttttatcaatacttttttcacattattaattggatcagtctgtaattttatgtaaattgatagcaaaatgattatagctgacaaaatcaggaagtgtgttgttaacttcctgac

SEQ ID NO: 35630 - DNA, 2300 bp, Homo sapien
tatgccagagagtgggagacgccctatgtgtttctaataagtttttgtcatttcactgttagcttgagttgccttctccttttgctgttatatcattcccactggcacctggaaatccttccaaaatgttttcctggcctggggccatcacacagcccatctgcatggccaacctaactgctgagtgtttggtcttatgcccttgaatagccatgtaggaactccatggtggactgagccactactgggtaaagactggatctctgtacaaacttggatgaccggacaatgcatataaataggtaccctagattcctctaacaccacacatgcaaatgtgagtgattgagataggacattgaacaactacagacaaaatttaagtttttccctaaacatgtcccataggaggcaaccatcaaagtgaaaactgccctgaagagcaccaggttctggcaatggagatcatactggcaaatgtgggatggctttctttagctcatccttacagcaaggatgctctcgagttgcatagatctgttgggaacaacataatcactctaaagacattcaggtaatacctaaggtattctcctagtacctagatttcctcccaattgcccaatgccaacacaccattatccttaaggtcacagattgatttgtcacaaacagtcttgtaggccaggaatatactgaattgccccagatggcacccagtggctctctgctactaacctccagccctggcttcccctggggtggcttggatgactccagaatctctggcaccattcctgtatccctcaatgagtccatctggagaggtcagtggagtagacctgttttttcttggtgggattacttattgactatatttgtgcctccaggaggttcttctgatactgtgtagaagctggaagcccttcagagatttgtctccacagctttgaacaacaccaaacatggtatggaggccttgaacattgaaacagctgcagtgaaaaaagtggtctacaaaaccaaatggccctagagatgctgacatctgtgcaagggggaacctgtgccctttacaaaagtgaacattgtgtgtatattctagacaaagaagctgaagttaatcaatccgtccttcactcacgaaagcaattacagcttactgaccacatagggtatgcctggtggtctacacaaagtcatgttttccaggatggggtccttggtggaaagctctgctaggaagccttttggaaaatgtgattttagattttgtcaggtgcacttgtatttactgttagtgtaggttttgtttgcagtgtttcataaagccaggggaaagaaattgccgatgatcccaccctttctgaccagctcagggaacatataggaagagatgggcatgtgagattgtaagagccagtcaggaaaatggattgcaggatctctgactggaaatcacagagccttgactattctgtgactgaaaatcagagtgccttgacctctctgtgacctagccagctgcagattttttcccagcatgcttgaacccaaacttgggtcttgaacattcccaggcactgataaaggtatctaagttgtcactgaaaacagtgaaagaaactagctctggccctgagccaaattctttaaacccttatataaactccataccctgaccccctcactgcagacatatctaggtagaatgtcccttttctctcaccacccatggggaggattcctgcaacactatgtaagttcccttaataaatgctttggacagatcaccttggcacatagtgctcctttctttggaatcccaaccagccccaactaggacggttttgggcactcccttgtgtgaactcccctgccaccacttttgggggacaaaacagtacatatctaatagaatcatcttgttaaaaagcaagggaacaacaaatacaaaatttgtgatagtgtttcctcggatgagaggtagtatagagagggactagaaaaagagtagtattaaatctaagttgttgtcaatctacagttcttatagactaggtaatggattaaaaaatgttcacactttaaggccatgcatggaccaatgacagccagtggttttaattaataccattttgaatatctgagttccactggggtaaggggatgaatcaaacaaggcctcagaagaaaagttgtctgggaatgcaggaaggttttgcagaggagatgaagtttcagttgcaaccctgctgcgtgggcttcaatttcaccacctgagatttaaatagaggcag

SEQ ID NO: 35631 - DNA, 2300 bp, Homo sapien
cgagtagctgggagtacaagtgcattccacaacccccgactaattttttttttttttaatttttgtagagacgaggtcccaactatgttgcccaggctggtctcgaactcctgagttcaattaatcctcctgcctttgcctcccaaagcggggaattagaaaagtgagccaacacgcccggcccactagtgttaaaaaataaaaacaaaagcaataatctgacagatagagccagggagggctatgaagagacacttctcaggcttgtatgcctcataagaaaactatcacatatgactgcaaaacccatcttacaccaaaaatacctctgcaaggacatccgcccagcaactgtttgtctaacctcagactggtgtcatcctcgttaccgatctttgtagtcaagaataatgatttcaaaacaattaaataatcctccccattcttcctttaaaaacctttgtcttcctttacctccctgaatagaaacatagtttactctggcacgtctattcttattgcaatttcctattcccgaataaacttttttttttttttttgagatggatccttgctctgtcgcccaggctggagtgcagtggcgtgatctcagctcactgcaaccttcacctcctgggttcaagcgattcttctgtcttagcctcccaagtagctgggactacaggcgcccaccaccacacccagctaatttttatatttttagtacagacggggtttcaccatgttggccaggctggccttgaactccttgttaaatacagtgagttctaaatttctcttcaaagaatcagtatgtcagtatgttcaattctttgttctccattttaaactttaacttcctcattttcctcgtctccttgcctctagtttcagtaaacaaccttttccaccagttctaatcagtagttcacatctgttcccctggtgacctgctccgtcctgagtcacccctggtcacctgctctgacctgagtcacctttagtcacctgttccgtaaccgtccttcccactgaaactgctcaccctaccactccggctcatacccctgctctctttaaaatagccaatcggaattaacttagactgtgcggtccaaccctagccagtaggggaacgacacagcactagggactacctgcgtcagggataagaaccccttcccctcccttgttcaggtgtgctctcgccattgctccatccgtgagacgcacccttctatagaagtaaattgctttgctgagaaaatgtgtgctcgagtgtgtatctttttcttcttcttctttttctgagactgagtctcactctgtcacccaagctggagtgcagtggcgcggtctcggctcactgcaagctccgcctcccgggttcaagcgattctcctgcctcagcctcccgagcacctggaactacaggcgcgtgccaccacgcccggcaatttttttttttttttttttttttgtatttttagtagacacagggtgtcaccgcgtaaaccaggatagtctcgatctcctgacctcgtgatccgcccgtctcggcctcccaaagtgctgggactgcaggcgtgagccaccgcgcccggccaacgtcattttcttttcaggagtcccttctgttatttagcaagacacactactacaatggagaaaaaagatgccccctccttcaagccctgagatcttcaggactttggcgaaaagtctgcgcccgaagagacccaggaaggattcttggaattgtagtccaaaggcatcccgccttctgcgcagactcacaagtccctgtggacggaattcttgaagtgtagcgccgctcagtccttccaccggaagtgtccgatcggaatcagccctgtccgagaggtgagtccgggtttggggatccagatgtccagccccgtgtccccctccaaacatccagtccctctcatattgcctttgaaattagcagcctctgggtgaccagaccttggccctcagaggaatcccggagaaaggtagaaccagcttcggcgttgggaacgcaggcgcgcttacgcatttagtgagggtttggcggtctccatagttaccgccgccgcgcgtgacgtcatagtggagcgctgagggcttggtggcgtggggtgggggctgtcctactgatcctgaatttggggtcactggtaagaggagttgcccattccagccaggtggaacggggaggggtgccacatgtctcagatctgccattgtctgcgaaaagaaactgctgcgaggaccatccccaatcccctgcttcc

SEQ ID NO: 35632 - DNA, 2300 bp, Homo sapien
caataaaggatgagaaagattcagaaaggaaaggaacagagtagaggaagtaggaatgagcagcagactgatggtgagatcaacttgcagggtgtgatggctggagtgactaagaattctactgcctctgttaagaaattgctcaactctagtctgagttcttacaattcctaacacatacacatatgaatatataagtccttgtattatttttagttgtttggctgtttttttatcaactgattgatgttccatgaggttaaggatcatgcattattaattgttcttaaggcttcatatttatgattgaaaggaaaaattaggaaagtttcagatgacttctgttttggatgatctgtatttaagatgataataagacatctacttggaaaaatatttccaacagaaacaatgatatttcaataatggaaaagaatttggaatgggaagacagattttgacaagtgttgggaacaggcccccaaatctggccataaactggccccaaaactggccatgaacaaaatctctgcagcactgtgacatgctcatgatggccttgacgcccacgctggaaggttgtcagtttactggaatgagggcaaggaacacctggcccacccagggcagaaaacaatagcatgagcgatctgtgccttaaggacatgttcatgctgcagataactagccagagcccatccctttatttcggcccatccctttatttcccgtaaggaatactttcagtaaatcttatcactggcttgctgtcaataaataagtgggtaaatctctgttcaaggctctcagctctgaaggctgtgagacccctcatttcccactccacactctatatttctgtgtgtgtctttaattcctctagcgccactgggttagggtctccatgaccgagcttgtcttggcagacaagattcatgaaaagggtagttgaagatatgtaacagtattaattctccaagagtatgaaataaatatcactaggttcagactgaaccttggaaaacaaacaatttgagtataagtaagaacaaaatttatcaatgataaagaaaaaaaaggggggttagttccatggtatattaaccagagagtctcaatcccttatattttactgggccatttctttgatatttctggttatgtttcctagatgcgctaaccaagtagtgtcctaatgcttaatgagcatgatctcatttaccatagtaagatgggtgtaaagtaggcccatataatccgaatgaaatttcaattatgctgagcagctggttctatgacatgttatctcagctgacagtactatctccaggtgttttatcacttctcatctatttaaaaccgagtccccctaaagctggtagctttaaactaataaatattgattgagcatctagtgccttataatattgtgttaggaggacttacaaaaatgggtaagcagatgtgtgaagaaacgctaggagaacagagaggaacgagtaattaattatgatgagaaagttggaggttaaagagcagggctcctgatggatgaacatgtcttggtgggcatgttgcgggaggggaagacgggtgagagttttgttggtggagagggagacagtcaggggaaatccggtagagaccacaaagcagaacagagacttcaaggggcatgctggtaaaggctcccatagtaccttgtgtttctcaagggcagggggtcagtgttggtttaactgcatcctcggcacacaggaaatactatttaccgtgtcaataaatttcaggacaagcggggttgtccccaagtgtcctacaaaacggcggttactcttcccaagggaagcaggggattggggatggtcctcgcagcagtttcttttcgcagacaatggcagatctgagacatgtggcacccctccccgttccacctggctggaatgggcaactcctcttaccagtgaccccaaattcaggatcagtaggacagcccccaccccacgccaccaagccctcagcgctccactatgacgtcacgcgcggcggcggtaactatggagaccgccaaaccctcactaaatgcgtaagcgcgcctgcgttcccaacgccgaagctggttctacctttctccgggattcctctgagggccaaggtctggtcacccagaggctgctaatttcaaaggcaatatgagagggactggatgtttggagggggacacggggctggacatctggatccccaaacccggactcacctctcggacagggctgattccgatcggacacttccggtgg

SEQ ID NO: 35633 - DNA, 2300 bp, Homo sapien
cagtgtaatgaatgtgggaaagctttcaggcacagctcaaaacttgctaggcatcagagaatccacactggagagagatgctatgaatgtaatgaatgtgggaaaagctttgcagagagctcagatcttactagacatcggcgaattcacactggggaaagaccctttggttgcaaagaatgtgggagagcattcaacctgaactcacatcttatcaggcatcagagaattcacaccagagagaaaccctacgagtgtagtgaatgtgggaaaaccttccgagtgagctcacatcttattcgacactttagaattcacactggagaaaaaccctatgaatgcagtgagtgtggaagagccttcagtcagagctcaaaccttagtcaacaccagagaattcacatgagggaaaacctattaatgtaaggaacttaaatttgtaagtaaatgctgaggaaatggcacaatatgaaaaatattaaataaaaaataaatattgggcaagatggaagactgaaagaccagtttctggtgttcaatctgtgtgtatgtgctttctgtgagactggggatgtaccccttctttcattgactactaaagtcaaaccaaaagagctacatttaggggggctaatagggtagtctatggcagtgcaatgtagagaaatagagactgtctggggaaataatcatgattacagtgtgggaagaaaaggaagatttaggtaaagagactgataatcagtcctagtttattttcctagttagtttagcacaagaagaggtcagctaaacccaggagtgaaataggttgcacagtgcactgcagaacagtgttttcagagcatccctttaaaaactgaagaccacaaaactaagatgctcatgttaagttagagagtaatgtcaaatgaggacatatgtaatggtggcattcctatatgaggccaaaatctgtgtccagaggtcataccaggaagtaaaaaaccagaagaacaccccagggaagaggccagaatccagacatttaagtaagacagtaagagaatagaattgaattaaggaaaaattgggttaggagtgagaaaaggtgttcaaattgaactaaacctcagaagttggaggatagacacaggataaccaggcttttactggtttttggcacctttctggggtaagttgatagggactataaggagttctcctaacagaaactgacagtaacagaaactgacaggattctccggcccgtggcaattgtggaagattactgaggaagttagtactggaaataatggtcctgaaatgttatttcgttgttgctggctgctctctacaaaaaagactgagaagagagtatagagcgatagtatatgaaagagggtagggaggaatgatttaagtcttaaacattccacagtatgtaaggcttttacattataaaatgtaaacaggaccttgatgttagatgtatgataatctaatgtgaaatgtacaaaatctcccactaagaggctttataagaaatagcttagcatttattttcaatgactttaaaaatgtcctgacgggatctaagtaacacaatatttggattgttttttaaggtaatgttgagcccacagttttttacaggtagtgtgctagtatgtcctatctcattttgtaactattatttttcacattttatagatgagaaaattgagctgtagtgaagttaactatcttgctaaagatcacatagtaagtggtagaaccaggattttaacgcacattttattccagggccctagttcttaatgcttaaacttgattatgtcactgaaaatattcctatgggatataacatcagaaaagatagcgcttgtacaccacaactctaaagttggtggcgggggaaacggggagacctagcacccttctagaagattaatccaccaacatttcaaaatcttgtaaggagctgcgacccgctaggacgggagcctactgcgccctcaaaccccgcggcggctccctccccggagggggcgcgtgaggccaccacccagagcctcttcctagaggagccggaagcatcgggagccgcggtacccgcccatcttccggccaggatgtgtggtcctggtgagcgattgtcctgtggcgtccgggaccgagtttgtggcccagggttatgtgtgcacttcacacctctgacttttttcagggttcctattgatggttaggagcaggatttcggggatgaaggcggcagcagcaagaggaggctgcgactgcggaccccagattcgtccccc

SEQ ID NO: 35634 - DNA, 2300 bp, Homo sapien
ttggggtggggcaggaacaaatctcaatggtggaatgccatcttttgtggttcttcagttgctccaggtcatctggatgtatacgtggcggtcacaggggctatgatggcttagtatcatattgtcagaggcctgacaataaatgcatgcaggttaagtactttgtctatttttctattggcttgttcatatttttattttttggtaagataaaaggtctttgtatatcaggaaaatcagctgtgtcttttagatgtgtggcatattttacttttagtttatattttatttttacttttttcattcaaatatttcaattttacaaggccagtttcatttatcttttcctccatggccttttcagttttatgtctttaggggtttgtgttattcttaaaaaggcccttcccactccaactttccaacctgtctccctgcttctgcccttgcccaaccccttcacattcaagtctactgttaacatagcagccaaaataataatctcaatacccaagtttaatcatgttacttctctactcagaaatctcaaatgagccatgctgggtagctcacacctgtagctccagctactcaggaggctgaggcgagaagatcacttgagcccaggagtttcaggctgcagtaagctatgatcgcaccactcactgcactccagtctgggtgacagagtgagacccatctcctaaaacaaaggaaaaggaaagaaaagagaaaagaaaataaactgagtagcttatcattttatcattttagagtaaaaatacccttgcactcacccaaggctctcactatctctccacccaacgctcttttgctcactcagctccagaaaaacaagcacccttcctttgcccaaaatacttaaaacacactccactccaggcttttgcatttgttatccctctccctgaaacatctttatccctgatggcccattccctcagctccctcaatctttgctcaaatgtcaatttcctagtcaggtcctccatgaatatcctatttaaattgcatcacttcattctcaccccaaattccctatttcctttattttctccttagaactgatatccactctctatacactatgtatattttttggtttattgcctgcctccccagcacacacacacacacacacacacatacacacacacacaagattataaattccatgaaaggaagggcattgttttgctcaaaattagttccagcttccacaatagtgcctggcatagtagataaatcaatatttgtgtaagaaaggagaagagggagtaaaaaactaagagcatttttcacccatcaatttggcaaagatcaaaatattttataacactgtgttgacaagtataggtaaataagaatactgctagtagatcctatgattggtgatttggcattaacaaaagtacaaatttccctattctatgctgtagtaattccctttctagacatacagactatggatatatccttacacatgaaaaatgatgtgagttcacagtaagttattgcagcaatgtttgaaaaagaagaattggaaacaacctcatgaccaccaatggggtacttattaacaaattatagaacataatacacagttgaataccgtgcagttgtttaaaaaagagcaagatcaaggaaacacttatgtacagcctttaccaagaccacctggtaaaaagaaaaataagaaaggtacagaagtgctactatttgtgcagaggggaaaaagcgcggacaatctataacggtgtaatatatctacggaaggatatacaagtcacgaaaaatattgtcaaactagacgctgggggacatttactctttttaataaatgtatgtgaatgcattacttatccatattactcaataattaaaccgaaaaacgttttaaagaagtacaaataagacttgctcgcagatcccgcaatcccatcaatacgaggcgtaaaagccgggtcctccactggctagggccgaggaggcaagcactcaagctgccacagaggcgaagcttcctagagcggcccggaagtgcccggctgaagcggccgggcgccgattggtgtctttgagtctagtctttgttcggggctgtccaaaggacgctagctgttgcacctgttcctccctgcgcgtaaggtgagtgtctcccggctcccaggtggagaaaaggggacaagacgcagctgtggtcagcagcaacaccctccccacacctccctgtcgcgggcagagtgtaacactcctgtccctccctccgccccccaaca

SEQ ID NO: 35635 - DNA, 2300 bp, Homo sapien
tctcctttgaagtgttacttttctccattaatataaccaccatcctcagttctaattacttcacacctatgtgactgcaacagccttgagatagccttcctaactatacaagacgtggtccttaaatatcattatcattcttccaatcactgaccctgagtggttccttatctctaagtaaaatttaaacttctatgcttgccttttattttttgtatttttaaaaataaatgaaacatgataaagattaatattatataaaattcttaaaagctgacatctccaccctcaaatagtatttacctagaatgttgggagataattctttaatggcttctcaaattactcctagtcttatggtagatttttctttgaggttaggttttcaaggatgtttgtatctccttctagatcacagttgtttcctgaccaggataataaagataatggctcattctggggcaaggctgagcaaaggttgggcttcctaagcttggcattcctctgctaggttgcaaacccactgttccatcctagcaggggaatgccaagcttaggcccctctgtgggctttgggaacataagctttgggaacaagggaatataaagcttatgatgcctgtgttattaagtaataaagtcttctgtctctgacgcaggagtccagtgtcttctgttagtatccataaaactgtggcaagttaaattgttagcttgcaagtagggtaaaagtttcacaattttcaatatggggtaatcactgttaagtttggagtgcatccttttcttgtacaaataccccacaaattatatctatataaacaaattttttcaacaaaaatggaatatatattgttctgacactccttttgtcatttgaacggttgaaaggtattcctcaatagcatatgtcatatgtaattcttccgccattgatttacattgataaacaagtgttttcctttttttctaccactagcgtcctgtctgccttttattgccttccagaatgaccttctccctatcccatacccctggtcataattcccctgtacccccaagtcaaaggacttatctcattgctcactactcaatctaaacactcgtctattattctaataaccccctctcaagactttattattcgattttgcactgatcacattctgtcttatattacttgctatgttgcatttgctgtcaatagattaaagcttccatagttgaggtgtcggttctgagatctccttcccagttgcagtaagtggcagcccttgaaatatgcagatgtgccatacatttctgacaggaagagtggtttgcctttttttgtcaagtagctaatcaatctgattcatcctctccctgcaattctagtcttattcaataattccttctgcttaggtaggtcctcattcacccatgtacttatcaagcacccaccatgtgacagatgccaagtgaggtgaaagtgctgggatgagcacctctgtggatctcacaatgaccatccatcttttgcatccttcttggtttttcctttacccaagtcctgcacttcactctttacccgtgcttcagaaaagcggaagttggttaattaattccatttgtctaacacggatgagagtgacagcagacaaggggaaaggcagggaaattcccttagactgttcttacatgcactctcacacttaatagtcaaagccaccctatgaaatagacactacgttattagcctgagttacataaacgagtaaacagaggcttggagaagttaaaaataaattgccctcagtcctaactggagagtggtggagtcagaatttgaatccaggtttaaagaattctagtgccggcactctgcacctatttctctttggacactcatttcccctaaggatcagagaagctcaaagtaggccacttttcgtctccgtaagtccgcaaggtcctgcgagatcacagtgagcagggcaccagcaaatacagtctgcgaccgcgagacgtaaagggaagaacgctcctcggcacccctccccagtctatcctaaagtcaagaacgtccgagcccgcctttctccgggggcgggctgcaataaaacagcaaaatcctccattccccatcagcggtcgattgggggctctttcgaagcggcagctctgtaggaccgctcttctaccccaagatccctcggcttcggccccctaggtgccagggtctgcgggaccccacgctcaaagccgccggccggggtcgacaactgcagagagggtcgggataggaaattgcgggtagc

SEQ ID NO: 35636 - DNA, 2300 bp, Homo sapien
agtcaaatttatcagttttatctattacaatcagtgtctgtgtgtccagtttgagaaaactacctatggcatgacgctattttacttcctatgtgtacacaactttgtacatagtatgtgcagtcatagttgtgtgcacattgaatttgtacaactacatatgtgcacaacttcagacttaaaaaaaatttatttgtttatttatgttgagacagggtcttgctctattgcccaggctggagtgcaatggcaggatctcagctcactgcagcttctgcctcccaggctcatgcgattctcccgcctcagcctctggagtagctgggactacaggagcccactaccatgcctggctaatttttgtattttttgcagagatgggtttttgccatgttggccaggctggtctcaaactcctgagctcaggtgatcctcccgcggcttcacaaagtgctgggattacaggcatgagccaccgcgctcagccaaaaaagttacttttaaaatgtgaaaaaagaaactgaaagtagagttctagtctgtcaccagttacttccagttaccatcccaggtggaaagcaacagctgtgaaataaaaagcaaaaataattactttgaaggagtccagaagcactgtagcttcccagtgtttactattatttacttgttttcatgtgataattagatgacaaaacccttaaatcaaaacgactttgtcagtacgcaaaatattggggagttagtaattgggaagggatagaaatgttggtggtggctaccagcaggagcagataaagagggaaattaaggtgaaaattggaggagccctgagaactcaataataggtggttgggaaaggtgctgaaggaaataaatacatgagacttaaacaacaaaaaataacacttgccacaacctccacccctgaaatcctattagtctcaaaagttaaaaagctctaatgcaacaggtctgtaaagaatgaacacagggccagggtggtgtctcatgcctgtaatccgaggactttgggagactgaggcaggaggatcacttgagcccaggagttcaagaccagcctgggcaacatagtgagacccccgccccgccccgccaccccgtttctacaaattttcttttttaagctgagggtggtgcacacctgtagtcccagctacttggggggctaaggtgggaagactgcttgagcccagaaggttgagtctgccgtgagctatgatcacaccactacactctgcaatagagaccctgtctcaaaaaaaaaaaaaaaaggcaaaaaaagaaaaaaagactaacaaagaaagaatgaacatagatttgttccccatatcttgtggtattaaacctagggtctactcttcaagcttacatcataggtttagcattaaaacagctaagcagcaaagcagatgctgtaagcgatagaaattcattaagataggaaagagtgggaaatatgtaaagatccaaaaagaatatatatttaattacgatttttttgaatacttaataaaatatgctattcctaagtgccatgccatagggatttcacaaaactatgaactgtgattagcaggaattcctcatgaagtttgtactctatgtgagaggtctggatatgtttatgaatcgagaacagtaaagtacagggtatgtaacggagccaaacgcgaatccagttggaatcctaaggatccatgaagtgctccctcctccaacactttcccagcctcctattcacagctccagcctccccacgtccgatatctacccccaggggaccgttactattgacagcgagcgcgcggagctgcatgggcacacaaggcggaggggacaccaaggtccgttattccccagcacgttcactgccccagcgacagcgcaagcctgaggcacgcagacgcgggaggaacccgaggcacagcacacagcaggtgaggggcgtggtactccggtaccctcagtcggccgaccatagagcttgtagacctccaggactcctagagagcttccggaagtgcctttggggcaagatgcgtgctggccggtgttgtgcctccgcagatttagaagttagtggccggaggggcctggtccgagtacagctttcatcgcctttactccccgaccttccttcgagtctgtttatccgttgcagcctcccttccccacgacggggcgcctctgcaactcacagtgagtacggtcgggctctgggccggaggaaagtgggtgctttgtggctggtccaggccgcagctgaggactggcctgag

SEQ ID NO: 35637 - DNA, 2300 bp, Homo sapien
tattggtccagaaagaaaataagcactaaagactattgtgtgaaggttataattccaaaagtgcttgagaataggcttttgtatatgagattagtggttctctttgggagaaatttggcaatgtttggggacatttttggtcataccattggtgggcagctgggatgctattggcatctagtaggtagaggctggggatgctgctaagcatcatgtttgcacaggacagcacctcacccccccgcatcgccccgcccctgcccctgtccccgccccacaacaaagaatgatctggcccaaaatccttaatgctgaggttgtgagacttgatatatttaaggtaaataggagaaagagatacgaagtactggcaatacaattagaaaaattagctatgccaagccttaagagaatcctgtgtgtgtgcatattttgtggtttttaagactataaaagaaaaagaagacttaatgtttggcattcacagcaacatatgtcagggtgttgataaacaataaagttgatgatgttttaaggttgctttcagcatcagatctgccatcatccctatgccaagtgtttcagcatacaagtgttacagaagtacaagtctagttttagtcttccatatcttggttcattatagcatcaaaggtaaaatactgggggctgtctctttaacagaggggctataacatcaaagatttagccttaaggacaacatatgaccctcagtcccttggacagcctctaggcaggaattaccagcatgccaaggaaaccacaagccagaatattgtcagagtttgtcaagtaaaaccattccagttttatttgtttttaacgtagtttttaacatactgtgttaatcctatttaggaaggcaaatatgtaggaggaaatgtgatttcctaaattaaatcgttaaaaagcaggcctttagaagcactagcttgcttttgcagcaggggtacttaattcagcaggtttagaaaggttcaacccctgggtgcagtggcttatgcttataatcccagcactttggtaggccaaggcagaaggattgcttaaggccaggagttcaagagcagcctgagcaacagcaagactgtctctacaaaaaaaacttaaaaaataaaaaagttaatcgggtgtggtgggatgcatctgtagtcccagctactcaaaaggatatggtgggaggatcccttgagcccttgcagtgagctatgattatgccactgggcgacagaggtctcaaaagttcaacccaagttagaaaatcagtttaaatgtgtaatataccaaagaaataactgcttgctctgtcatatttaaatattcatagtttagaatgctaggtttagtgttccaatccattattctgtaaatggaggctcaaagaggccacttggttaggtttcctggggctttgcccatttcttttctcccctagttatgccctcaggtgtgacccttgtatattcttaattcatgctctgccataagatggattcaaactttgtgcctccacctgtaatgattcattttaggaattactccttttatcatctttatatccaaaccagtatatttactgactacagtgctttgagttaagttctttcataaataattgaatagccggagaaattttgcagtatcgcagtcatgttttgaaaatattgttcttggttcttgtctctaatctttgagaaagcacacaggatatagtgtgttggctttcagatcactaataattaagaccagagttctgtggccccgtgtgtcgctttaagggatcctgtagggcccacacgagaaatttcaccaactgcactatctttaaattccaacatacacgggtggtcctgccctggataaaactcaggaagcaaaatcaaccttcgagagaggtgaggtaggaagtctgagcattgccgacgggccggagcaaatcgctcccgggctagaccctgcctacaccgcggcggggacaggtggaggtttcaacccctgtttggcaacctcgggcgcagccaggccccgcccagaaatttccgggacacgccccggaagtactgagagggacttccgccccgaggcgaggcctcggagctggttgctgctcacaggcagagaaacgctggtatgcatttgggtgtcgcttgggtggatgttgcacagctgcaacccctcagacctcgtctctccgcgcctgcctgggtggaatgtgtgcaggaactccaggagaggcaacccatcctgggacggtggggattgtatccaaatgcagtctt

SEQ ID NO: 35638 - DNA, 2300 bp, Homo sapien
aaaagtgataccagaaaaaacttaaaaactgagttcccagccctgacagaatgagagctcagacacgactcattataccctcctcttttgtgtggtttagacacaactgaccagcattaaagttaaagtagagatcataagactgatagaataggctctttgtggcaataagataccaaattataagcaggatctaagtccatgccaaggaaggtttaagtcacgcttcctttcatttaaagaagaaactatgttttaactgccacaaggttttcctttttctctagcagctaaacaagcactgccccgagataagaaatattcaaacaatttgcagctccactagatgctgacaaactgtacccctgttccactaactgtaactatagctttgactgaacgtgagactgattttagtaactttctcctgataagaccaaccatggactcattctagcccttttacagagattgtgcacttctgtgctctcatgtcctaaagtgaccatttgacgtatagagcctagttgtaatacatgcaaatgttaagtctctacttcaaagtgaacatgtaacatgcacgtttgttcaatgtgcatgtgtcaggaccccttcctgaatattcatagctccttcagtaacctgttgaatatgtatgtttggtcaactcattcagcataaagcttctacctcaacccctcctccttcaaagtgcctgtctctggatgtggccagaggaaggcttcccagcctgtagtctggccaccttgcaggctgtaacccttaagaagaaataaagtcttttctctctttttctaaatttgtatcttgtgatattttccttaagttaaaaatacataaacctttgggagcagatgtgtttccaaattcaggtttttgttttttttttattttagaaagataatgtgcatacactgtacattatgtaacttccagcagagtttcagagcatatcaaacacctcaatatttctgctttgagatttatgattagtcactttaaatgagttaaataaaggctatgaagaagttcaggttttcccctcagatagattgtagtgccaaatttatggaggaaagatttggagtttttagaattttatggattttagaactgtgattaagggatcctggacatgtactagtctattttctgtgttttttgcatatttaaacatcttcaaaataaaaatttgttaaatagaaatatacaacttattcctaccactagtcacctaatttcatccactagaaacagccaaaggtattgatttctttttttttcttctagacaggatctctctctgtcgctgaggctgaagtgctgtcaccaaggctggagtgcagtggcacgatctcagctcactgaaacctccgcctgtcagactcaagagattctcccacctcaggcccccaggtagctggggaccacaggcatgtgccaccatgcctgaagaatttttgtatttttagtagagacggggttttaccatgttgcccaggctggtctcaaactcctgaactcaagtgatctgcctgcctcctcatcccaaagtgctaggattccaggtgtcagccaccatgcccggccttcatttcttatacagcctttcagagatattttaggtatgtagaagcaaatatttatatataattttgccctgggattttacagaaatagtagaaaattttcctatagccatacatgtagagctgcagctctgttttgacagctgcatactatttcattatgcaccagtcatttattgataagcaattaagctattaatatttcctatcactttccatttataaacaatgctgagcttcagacacgtattatcttacatatgtgtgagtctgtctctaggataaattcctagaagtagaattcccgtgtcaaagaatatgcacatttaaaaaatgtatagacttcgggccggggcgcgggaaggtgcgggtcgtcggcggagagaagccagcagctcgagagacgcagggccaggaggacaggaccgtcccgcggtcacagcccggtccttcttccgctccccccgccccccccacgggccaccttccggtccgttctccccgcccggtcgccgcccgccagcccttcgtcccccagccgcccaacctcctaagcgctgaaggaattatttttgggagtcatgaccatagctgcctgcttcccccaaccctcgacgacgaaaaggacttcggcccccggccgggcggctccgggggaaaaaagagagagcgaccgccgccccgcgctca

SEQ ID NO: 35639 - DNA, 2300 bp, Homo sapien
tccttccttccttccttcttgcttgctttgtctttctttctttctttctgtcttctttctttttgttttatttcatcttaatttttttagcttatggcataacccacagccgagttagtatcccaatatgcctgcttctagattcaggtaatccttaacctttttggttgattttgcagtcagtatttcttgtctttgagttggtgtggcattttcaatattcagtacggattcccagttatatgttaaaaataatcccttctgtcccaggatactcatcaaagtactgctatagtggaatcttcccggaaacagacaaatgaaagccagtctctctcagggctaaccattgtgaagtccaacgtgctgcccacttgactctgggctggagcctgcctgagccctatagttgacccacttagcaagcacatataaaccagtgagagaccctaaccaactgccagtgagacatttaagaagtttcatacaaatattaaattgcatttacttgtcacagatggtcatacaaaatggaaaagaataacatatttaaacagtctattcaagtccaagagaaattgagcatttactctcatttcatagtttgttaggaaagtttgtaatgagggatttgcaagtgaacatggtatggtggaaaaagtgatgaggatttttgagcaaattttctgcatgttagtgctcttattgattatatacttattggatatttgaaagaaaaagaagtaaagcataaagcttgggtttatttaatgccctcagaaggctaggttgaggaaaataataaagaaattttccgagctactaccgttttggagttaaaacagatcatggagcctccattaacacacaagatactttcttactgctttaataaaataaatgataagattctgttaaaacaaacagaatatagtttaatctacgtgacaccatcattctggttggcatagtaaaactgatgaatgactaacagtacctacaattacgctcttttgtaccaataaaatttatttaaggctgggcatggtggctcatgcctgtaccagcactttgccaggcggaggtgggaggatcacttgaggtcaggagttagagaccagcctggccaacaaagcgagaccctggtctctacccccctcccccaaaaaaaatgctgggcatggtggtatgtgactgtagtcccagctactcaggaggctgaggcaggattgcttgagccaggagttgcagtctgcagtgagctatgatggtgccactgcactccagcctgggtgacaaatttatttaattggttttggtttgattttgtattattattactaaaactccagaaaacttttacagcaaaaaaaaaaaacaacaaaaaacaaaaacaagaaagaaagaaaaggaaaggaggatgggagaaaggcaggaagggagggaggaaggtaggaaaagaggaagggagggaggaaagaaggcaagcacgcaggcagatgcctaaataaagaatacataggggcctggacaaataaattgctttatggactgttatgcacccatacaataagttagacttacatgatgagtaaagctttttaggatacatgaagtgaaaacgttaaaataagcgggggagaaaaggctaaatataaaataatgccattgtgtgtgtgagagaggatcacaatgatatacaaattccaggctaacggtgacagtggctgcctcggggagtgggactaaggaggggtaggtggggtttgacattttactttattaattttggtattgtctgagggtttttaaaccataaataatgtattaattttaaaaatgcttttaaaaatcatcattttcaatagttaacggtctatgcttcatcaacgttttccgtttaaaacctgtgtgcggcccacacacgtatgacattctgattatgtgattcactgctgaaaaagaactggacgccaggaaattgggggttgagtccgaagcaaggtgaacgccggacatcgagacatggaatcctagaccggcccggaagtgcctctgctccgtccgccttcgaggagaggtcggcatctttgttccctgcccggccattgttcgtgccgcgcttctagcaacgccgggccggtaaccccctctccctccttgcgcgttccgggtctcgtgagttggctgtggggaccgggaatggaggcgggtcagggagggtggggctggaaaaggggtgtggaaagtgaacctcagccgctgggaagtgggagccggaggagggggcggcggtcagt

SEQ ID NO: 35640 - DNA, 2300 bp, Homo sapien
gtgactcagaaggtaataccccttttctagaaatttctgcataatctggtgcttaatttgcatataattaaatgtaggtataaatgtgactgcagaactgcttttgagctgctagtctgagcacactgcctagggggtagccctgctctgtaaggagcagtacctctgctgctgctgtacactgacacttcaataaaagttgctgcctaataccactggcttgcccttgaactcttccctgggcgaagcaaagcatccttttgagctaagccctaattttggggctcacttgtcctgcatcattctgttctatagaatgtcccacatgttggatttggctgattgattttttaaagtgtcatttaattccttaactctcaaactcacctgcatgttggaatcacctaggaaagttggccaggcgtggtggctcacacctgtaatcccagcactttgggaggctgaggtgggcagatcacttgaggccaggagtttgagaccagcatggtgacgcatgtctgtaatcccagctactcgggtggctgaggcactagaatcacttgaacccaggaagtggaggtttcagtgagccaagattgcgccactgcactccagccctgggtgacacagcaagactctgtcgcaaaacaaacaaaaacaaccaaaaaatgttattaatgcctgagtcccatcctgtgacattctgatttaattgatcttggttgcagcctaggtatcaggatgttttaaaagctccccagtgattctgtgtgacacagagtgtgaaaactgctaacttaacttatttctgtaaatatttggatctagaaaagtacttagattcaagttcacttataaggatacttcatgggcagtgccccctaccttctgtggtagctcatcaagagaaagatattttgtagtatttttcatttgcaacagtctttgggacttctcattttcttaagttatgttatttcttaatccttggaatgtagaggcataggcaaagaaagaaaaactcaagaaagtactgacatgatattttttcccctcataaactactgaacttgcattttgtagcttctccattccactgggcagaaaggggcttactgaagtgtccagtcaaataacttacagtcaattatggcttaaaatcgagtcccatctagttcaaagaattctcagggctttcttctattataggataggcctagtttatcacatgccaggcactgttctaagcactttacacaagagtgctcacaacattatctaatccctagtaatgcctacaacatccctatctactattactttccctatttacagattggaaaagtcgggcacagggagggtaagccaggattacacaggtaacctggctacctgcgtatctagccactgtgcttgactgtgattgggggctgggaagaaacaggaaggaagaaagcagaagagaatggggtccctgaagccagagactagagagtttctggaggtggagagcagcataagcctgattgccagagaagcagccatggaatgtgcaaagtggtgagtgggggagtgggacagtgtgttgaggattagtgggaggtgagggctacagtcagggtcgggaggagtagtctggccttaaggaggaggaaaaaaagtgacagattaagggggtgagtggggaaggaccaagggcagccactgctcgctccaggcaagtgcctggtgatgtgttctgctgctttgatgtttctgagagagactaaaggtccccctgccagggttcttggggctctggggaacccctgctttccagctcaattttagtgtcaattttatgccagctgcttaagcaagctttacataggaaagaaatatgagccgcagcggcatccttccaggatttaaaggctcagtcctatttcttatgatccaaggtctgtcatcctttccttctctatcccttaactgccttcccttgcgtggaggtaaggacagggtagctaatgggttaattcggagacaaccaccgagagaagcttcctagagcgcccaggaagtggccttagttcccatcgagacttcctgtgccccagcctcaacttccctcctatgtctggagagtgatcactttcactcccaaagacatcctttggtgatacttactgtgggattcagagtggggtgcagaggacgaccctgcaaaggcacggactataagagagatctgtgcagctgcgcctcagggggtgtcctgggcccctgggcatgacaggagggggaccacttgcagttct

SEQ ID NO: 35641 - DNA, 2300 bp, Homo sapien
ggaatgagatcatgttctttgcaggcacatggatgaagctagaagccattatcctcagcaaactaacacaggaagagaaaaccaaacactgcatgttctcataagtgggagtttaacaatgagaacacatggacacagcgagtggaacaacacacacaagggcctgtggggggtggaggatgggagggagagcagcaggacaaatagctaatgcatgtggggcttaaaacctagatgatgggttgataggtgcagcaaagcaccatggcgtgtgtatacctatgtaacaaacctgcatgttctacacatgtatcccagaacttataataaaaattaaaaaaaaacagttatctcttccttggaataattgaacaaattgttgattatgctttatcatttaaaataaatgtatattttgtcttaaaaaaagtatgtaataatatcctcaattttgcctcttggcccacaaagcctaaaatatttactattggccttttgcagaaaaggattgccagcccctagtctaggtcataacttttctaaagatcaaaaatatattctaaatttcattttcctgtgtcgctacctgaaagaagtatttcatcaaccagctttgtaattcaagtctacatcagatactaaatggcttaaatttacaattatccaagtaagacatatccatttcattggcctatcaagtagtttataactccaaaagaaaattttctttacttacacaaactctatagtactcaccctatccatatgatattttcactatacatgtgaccattcacatataatactccctgctgtttaccagttcctaaattcatataatttatgtatggaaccaattcttatccccttcaatcaaagtactaaaattctacttagagcaaatgatatgatttggtcttattcaatttaatttcccccattttgttgtttagagttctagcatcaggaaggcatcattcttaagttttgacctggctgtcaaacaactgagcagatcaacttaattagagagaaccaagatgatgttaatgcctatttacattttaagatgagagataaatgatcttgcataaaacgtttatcatttctgagagtgagatctaatgtgtatcgagaaagtggtttccaaactacaaagtttctgaagaagtctccctagatagaaagacatctgtctacaagatcgagtgggatgcttctgtgtgtttctagggtggaaaagtctgtgaatttaataattaaaatcatgactctgggccgggcatggtggctcacacctgtaattccagcactttgtaaggctgaggtgggaggatcgcttgaacccaggagtttgagaccagactcagaaacaaagtgacaacggtctctacaaataattattaaaaaaatcaacctggcgtggtggtgggcacctgcagtcccagctcctcgggaggatctcttgaacctaggaagtcaagtcggccctgagccatgatcgtgccactgcaccccaacctgggcgacagagtgagatcctgtctccaaaaaaaaaaaaaaaaagtacgactttggccttcacctagcttagagggtgagctcaaactgattccaaaagaagttttggttcttgcttccagtggtaacaaggggggttgggaagtgattaattaaacatatttcctccacgaagagggtggacaagttccttttttaggaaggaaaaaaggaggagcgttggtagtagggatcttccacagaggggtaaagttaaggaggtggaaatgaaagggaagaacaaagggtgagaagcaaaatggtaaaagcgaaatcgaaaaagagaagtgggtgttccaacagtagaggggatcattgacgcaaattcgtccttttatgttcccacacggctcaagttggggaatataagtcctaaaaacaggcgcaccctaatcctacctacttcccacaagaagccttcacgcagccaaggcccgccccacatagcacacgcgcggattcgttttccgtttggtaactgacaggaagcggaagccgtgcgtgggaggccgattctagtgcgcctgcgtggccgcgaatcaccagccagcctctgggtctgtagcaaccgcccagcgttgaggcgcggctcatgcccccagtatcccggtccagctattccgaggacatcgtgggctctcggagaaggcgacgcagctcctcggggagcccaccatccccgcagagcagatgttcctcttgggatggctgttcccgctctcactcccgcggccgtgagg

SEQ ID NO: 35642 - DNA, 2300 bp, Homo sapien
gaagcagagagaagagcaggaagcatcattaccagaagataagaactgtaaatcttatgctggagcatggtgacatgactcataatgcgatagcatctctactgataatatggaaaagaaagttcttatcttgaatatcgtatgaatggacctggcagaaacatgatcactatagtttacaaaaataaggataatcctggaaaatgaaaacctcaagtttgaaaattgatttgtattttagtattttgtctctcctggtgataacagtgttttgagttattctcaccttatctacccctacccctcccaaaaggtacaaacagactgtttaaatgaaaaatgcacaccttgaaaatttaaaaaaactcttctttgtctagctactttaaaggttttgattttcatgggatatccagtgcaatggcaataatctcagccttgacaataaaagtgacagatttaagaaactagtcatagtagggaattttagagggggagtaaataggatatagtatttactttctatttaaattaaattttctttatgtttatcccttatataatttttgaaaaggtccttttctagatattaaaaaataagatatatgagttttcctctcaagaaagaatattgacttctaattagtaacacatattgactagatttgttggccttatgaaaagttttaaagtaaacatatttaatttttactttaaaaatatgctttcaaagatacattcagacacttaagaagaaaagataactgcttgtgataatgaaactggttgttttttttctgttatgataatttcaatgcttgaaacactgaataaattacacgtcagtacaatgttttgtatatttaatgatatttcaaagcttctgtcaactgatcagttaaacacaaaagtttgttcagattttttaaaggtttttttttctttcttccaacttttgttttaggttcagtgggtacatgtgcaggtatgttacatgaataaagtgcatactgctggggtttggtgtacaaatgattttgtcaccaaagtggtagcatagtaccttataggtaacttttcaatcttcaccttcctctcaccctccaccctcaagaagtccttgtgtctgttgttcccatttgtgttcatgtttactgaatgtttagcacccacttataagtaagaacatgcagtatttggttttctgttcctgtgttaattggcttaggataaatggcctccagctgcatccatgttgctgcaaaggacatgatctcattcttttagctgcatgatattccatggtgttatgtaccacattttctttttccagtccaccactgatgggcatctaggttgattccatgtttctgctattgtgaaaagtgctgtgatgaacatacacatgcatggtctttatggtagaacagtatattcctctgggtatatacccaataatggaattgctgggtcaaatgagagctctgttttaagttccttaagaaatttccaaattgctttccacagtggcagaactaatttacattcccactagcaatgtataagcattcaaagagtttatcttattcaaaaactataaaaacccagtttgtgatactgtgggcaagagagactatttctgttctctgttgtagaatttattttgataaagtgatatctgttgcttttattccccctgaaacttacattgattgcaaagtgttgttgatttattttctctcacagtaatagccctaatttcttcttaccttaaacctttcaatccaaacgtatgtccattgtttagtttaattttcgaaatactttgacaattatttttgccattgtgtttgatgaatttctaaattgcgaaaaatggcgaagtatgtgtgttttatttatgtgagcaaagtgaaaatgttggctgtttgtgataacactcaacggagctggcctgtttttacatgaataaaataaacatccactttaaaatgagaaaacaaaaacaaaaacagaaacaaaaaaaaaaccccaacaatcttagctcacaacgaaatgaccctcccagccgtcctcagcaggcagcacccatgttagtctccttctgcgatgcctaagcggcagcaccatcgagccaaggtcctccagcgttcctagagcggagaagaaagcgctccgaagagctagagctgacactcggcgatgagctaagacgctgtttcagagcgtttgggtcctctgaggccccttgaccaggtgagcggaccctggagctgggccccgggctggggcggaactgc

SEQ ID NO: 35643 - DNA, 2300 bp, Homo sapien
tctatgtgagtaaggtatatatgaaacaaatgaatttcatgtttagacttgggcctcatccctaagatatttcataatgtatgtatatattccaaaatccgaaattggaaacacttctggccccaagcatttcagataagggatactcaacttgtagttgaaatcatacagtatgtagcttttcagacaggattctttcactttgtaatatgcttttaaattttctcaatatcttttcatgccttgatagctcatttcttttttttttcttttttttttttgacataaggtctcactctgttggccaggctggagtgctgtggtacgatcttggctcactacaacctttgcttcctgggtttaagcaattctccagcctcagccttctgagtagctgggaccacaggcgcacaccaccacggccggctaattttttgtatttttagtagagatggggtttcactgtgttgcccaggctagtctccagctcctgagctcaaagtgatccacctgcctcagcctcccaaagtgctgggatcacaggcttgagccaccgtgtctggccagcttatttctttttagcactgaataatattccattgtctgcatataccacagcaaaagaaatatctgttaaaggactgttatccaaaatacagaaagaactcttaaaactcagaaataaggaaacaacccgattcaaacatgagccaaagaccttgacagacacctcattaaagaagatatacagatggaaaataagcatatgaaaagatgctccacaccatatcccatcagggaaattgcaaattaaaacaactgtgagatgccactacacatctattagaatgaccaaaatccagaacactgacacatcaaattctggtatggatgtggaacaacaggagctctcattcattgctggtgggaatgcaaaatgatacagccactttggatgacagttaggtagtttcgtacaaaattaaacatactcttaccatgtgatacagcaatcgccctccttagtgtttacccaaaggagctgaaaaccagtgtctacacagaagtttgcacacagatgtttatagcggctttattcataattgccaaaactcagtaggtaaatgaataaataatgggtctgttttttaaagagttttttatatttttactattgaacatcttttcacatgttaatttgtcacttatcttgtgtgtagtaatgttcatatcctttactaatttttctactaaagtctccttttactcttaaacagaagtgcccttaaaaatcaaatagggaacttgcatatcagcattttaaatgcacgtgtcctttggctgaacagttctaatatgtggcatttatcctagaaatatattcttaaaagaatgtaaaggtattgaatggtgttccctctagcattgcttttaaagaaaaaatataacctaagtatgcatcaataggatagttaagtaaattatggaacactcatacagtattacttagctgttaaagaataagctgatctgtgaagatctccaagttgtcttaaccgaaaagagctaaggtgcaaaattacattatgataccataagtgttttaaaatgtataaatacttattcactaaacaaaatgttcattaagtgctactgtgtggcaggtagtgtcctagataaatatgaacaaaatacaatggttaactctaaagaggggacacttttcgttttatggtccttttgcaacttgacttttttattgtacatatattatgtatacttaaagaaaataatttgtacagcttactataatggtctttttattgatctgtctctcctaccagccagtgatgaccccgaagacagacatttaccactgtgttggttttcaatcgaaatgatgtacataaatttggggcgtgcttgcaccgtccgaatgggcctggggtccggcggcggagagtgacctgggcggggcaggaggtggcagcgggggtcctcccggctcaccagagagacgagcggccgtgctcctagagaggcagggaacccgccagactccgccactccgctgcgggcgcggcgcagggagaagcttttgtacccgcccagctgctggaggcgccggcagcgcccgccagacccgccagcccagcggcccgggctctggggaaaccggcgctcccgacaggggagcaccgggcctctgagctccctcgggagcctttcacgaggtcagctacgtctttgttgtgcgcgttcctgaacttttggtccattaaccaacaattagacacgcc

SEQ ID NO: 35644 - DNA, 2300 bp, Homo sapien
cagctacgtctttgttgtgcgcgttcctgaacttttggtccattaaccaacaattagacacgccggtattcagtgcctggcgcggtgctagatgctgggtgtaatctcagaaaaatacattcaggggcgcgcctgagggtgctggctgctggcatctcaggtgctttacgtgcattcgtgaagaagcccatcagtatttcttgaataccaggtacgtgccgggcatgtagagtctatgcagagataaactcctgtcctcaagaacccgggtggggatggggttggtgatctgtaatacgagatggagatgagggttgggtgcagttttctatgggaataccccatctcaacctgtgtggcttacttttcctgtctatatgttagggttaggggttgccagggaaggttttacaatagaacatttacgctgggccttgggaatttacccttagaagggcggtcctgactgtatagagtgggtggaaaaaaattgagtacttagcatggcagtgacataagaaatttgggaagaccatggctttcttgaaagcaggaaccaagtcttttattccagagttaactttatgcctggaaaataatgagatgctccacaaatgttgattgagtgacaaacaaatcagcaaaacccagtaaagattagatcctggggagtttgaatttacttcaacgagtttaatgaaaactttgtgtgtgtttatgtgtgtgtgaggtatgttgaatatggtcacaactgtgctttagggaatattaatccagtgaccatagaagcggggagttgggcaggaataccgtaacagaacattattgtaacagtgaatgaaaataatagtaaaattataagaaggaaagaatggctgcaagaggcgtttttaagaattgactcactgattgtgtatagaggctgtttaaaagactgaatgcgtggaagatgatggtgatgccagtagaaatggagaaataccgagtgaacgcagctttgagggactctgatttcagtttgagatctgttgaaattatagtgcagtagaggcccacagctgctggcatttcaagatgtgggtttggagtgcaaaaagcaagctggtgccaaagatttgagtcttcttggaacagagatatattgaaagtgtgactaaggagatcacaaaggaaaaaatgaaaagagggaataaaagaacttgatgcatgtctactgtttttcagttatgtattgttgcatcaaaaataaaactctaaacttagtggctgaaaacaagctcagcttattgttcctcaggattatgcgggttgactaggcggttctactggtctcacctggagttactaatagagctgcattcaggtggtgaattatttgagcactaggcctggctgggctttaacttgggcattttggttctcatccacatgacctctgtatagctagcttgggcttccttacagcatggcagtcttatggcagtgagccaagagctacagcagcactctctcttacaatgtcatttctgctgtattccactggtcaaagcaagtcataggccagaacagattcaagggaaggaaaaagagactccaccccttgaatgacaacagtggcaaaatctcatcacaaaaggtatttgagaatgggagactttggaaacattctgttacacctacatttaaagtggaatattcaatgagagttacacagatatagaagacctttgagactgtattatttgtccatgaaggcagccatctgcctcctcaatgggtaaattatcccctctccccagctgaagtgcaagctactcgagctttcttattgctaacacttcttccctcatgtcctacatcccttacctttggactcaggccctttagtactagttcaaaatatacttctgattcatttcactgataatagaagcaagcaggctcagcttttgagcattacctacagtggggacaaaaatgtaagtaggttacatacagttttgaagctcttataatttgcatgttgctgataaattcttatgcctcagatctctatttctgaatatagaccccaagctaagtgaagctttagcctctaagctcaacatgtatgaagctttgccaggccctgctcctgaaaatgaagatggccttgtgaaagtgaaggaggaagatcccacctgggagcaggtgtgcaactcacaggagggcagctcccacactcaggagatttgccgcctgcgctttcggcacttctgctaccaggaggctcacggaccccaggaagctctggcccaact

SEQ ID NO: 35645 - DNA, 2300 bp, Homo sapien
ttttgtattttgggtagagatggggtttcaccacgttgcccaggctggtcttgaactcctgagctcatgcaatctgcctgcctcagcctcccaatgtgctaggattataggcgtgaaccaccacgcctggcctattttccattctaaatctccatttttgttttttttctttttccttctttatttatttatttatttaattttggagacagggtctcagtctgtcactcaagctagagtgcagtggcacgatcatggctactgcagctggtgattatccctgctcagcctccccagtagctgagactaatagcatgagtaactgtgcctggataatattttttattttttgcagagacagagtctcactatgtcgcccaggcttgtcttgaactcctggactcaagagatcctcccatctcggcctctcaaagtgttgggattacaggcgtgagctattacacctgacttaagtctccattttcatatctatgtttgtacttgtaattttgtattccttttctcaaataaggtctcttgaattgtataagctgggtctctttctgtctgtattccttgttacattataaaccccatgaggatgaggaccttgtgtccttcattattattatatccagcaagcccttggcacaaagatcgcattcaatgggaatctatataattaatgaatgagttgtaaaaaatcaattcaacctcttaacatgtattatctgtcttctctatttctattgctactgccttgattcaggccctcactctctctaccctggattcttgtagtagtctcctagctggtctccctgcctgtagtctcatttccttacagtccatccccacatggctgccaagataacatttctagatgtaaatttgatcagactgctcaaattccttggttagggatccaaaaaaagtaagagctggtgcccctgccacatataccactctccagtcatgctgatcagcccagttctttggatgtaccaaaggatttcaccccagttctgcttttgtacatttgattccctctcccagaaatttatttcctttgctccttttccagtgtacactggcagattcctgctgagtcttgttttgccccattagttttcctctctcttccacgccacgaattcaaactaatacatacatttatttcctacatacgtacttagcatgttccagaggctattctcatcgatttacaagcacttattttattttacttcatttcacatgcacgtctgttttacgcagttacttgtttacacgctcttcttctagactttgggattccagaagacagaggtttgagtgtaaaacacaaaataacaaaaccacaacaaaaacaactctgtattctcgtccccaccattaccatctctcctttgtgatgtcaaagagaccagaggaagtggacagactcggggaagaataggtaagtattagagacagaaaaagtatgaagtcccttctgtgaggactaacaatagtgatgccattttacaaccttgatgactgtgttctcaagaaacaaagcaaatgtcaaccccgtccatagcttcaacagagcataacagctctaaccgcaacagagcctaacggccctaaccacatctgtccccagttggaaagtgtccaaacagttccaactagccagcacttccccaacccctccccaacagaaactttattataaaagcctcagcttgtaagcgatcaggatctcagccagattcctaactggaactcttcgcaggcttttcctgtaaataaacctgtttggccgtggaattgcctcctgttactcgctctctacgtttatatcttcctaacaccttccggctctaatgttttgggtctcgatgaccatctaactcctaaatgctgggggccgctccccatagaaatgcctcgccggatttctccgcctcgcacccagtgggactgggatttttggccccggggtttgcaataagggagtcaccaagcagcagccacctctggaattcctagaaaggaaagagttgcctggcttcagccagtgggctcagaacggctgacgcatttccggcctttgcggttgatcggtcattggggtgctgcagccccgccacctgttccgtagcttgccggtgccccgaaggtgagtcttggccccttgtcgcgacccgccaggttcccagaagatttcaggtctgtgccttggagtaggcggggagggaacgtctgcgcaggcgtgacccccgcccctacacattcactggcctgaagccccc

SEQ ID NO: 35646 - DNA, 2300 bp, Homo sapien
atatttcaaaattgcttttttagatgagtgtaccaatttatagtcccagcaactgtgtatgacagtctcaaaattttcacattcttatcagcaaatgttattactcaggtgttggtataaaatgatttaaaatttgcctttatttaattgctaatgattaactgtatatgctatgtttattggtcattcgagattcctctctgggaattgcctgtgcatattttttgccattttttttctgtatgattgttggcttttttctctcttattcatttgtagatgtttattatatattcagtggactgatcctttgttgactatatgtgttgcaaatatcttctcccaaccttttaatttaattgtctttaccattagtttctagtatcttttgatatagttttaatttttaatgaggtcaaatttatttattgttttccttatagtttgtatgtttatgcagtttaaaagaaatcttgttttacttgagctcataaaaaaatgattctatagaagcaaacttgtgaatagaaaaaagagcaattattctaaattttcttttaaaagtctgaaagttagctgactggaattgattttttgtgcaacatataaagtagaaacccaattttatttcatttttccatttagatatccaaatattacagtactatttgtcaagtagctcctttattcctcactgatttgtaatgcaatttccaccatatatcaagcatccacacatacatgtttgttgctcagtcctcagttctgtttcattggtctatttgtctgtagttgtgccaatactatattgtcttagctgctataattttataataaattatatagggcaagtttctgcagctccttcatttgttttaaaaatgtctcggattcgtgactctttcattattccatatacatttaaaatcaactagtcaagttccactgagcacaattggaatcttgatttgctttgtactggatttgtgtatcaatttaggaaggaatgatatctttatgatattgagttctcatatatataggtgtatatacatgtctcatatacaggtgtatacacatgtcttatatacataggtgtatatacatgtcttatacataggtgtatatacatgtctcatatacataggtgtatatacatgtctcatatacataggtgtatatacatgtctcatatacataggtgtatatacatgtctcatatacataggtgtatatacatgtctcatatacataggtgtatatacatgtctcatatacataggtgtatatacatgtctcatatacataggtgtatatatatgtctcatatataggtgtatatatatgtctcatatatataggtgtatatatatgtctcatatatataggtgtatatatatgtctcatatatataggtgtatatatatgtctcatatatataggtatatatttcaactacttatccctaatgaataaagttactaatgtttccattcaggtatcttttgtaagtatttgcttctgtgatagatgtcttttaaaaattctatttttataattttgatggagaatgtgattgtgaacatgaattttaaaaagtccagccaacttgctaaactctcttattaatcatcataatttgagtgttagattatcttggattttttatgtaaaccacgcagcatgttccttaaaatttatgtatttagaattcatattctaattaggcaatgcaatcaactctaaaattaaaagtacatttaaaacatgcaccctaacactttccttctcactcttgtccccgttttcactcagtttctgaccgttcacctctcgtaggtaaccaccattattaattttccgatttttccagggcttctttgtgccacacacgcacacataatttagattctttttactctcttctattcgcaaatatagcaaattatgaaaataattctgcaccttgcctttctcccttagttatagctggaaaaataaaaatttaaaagcctctttaatagcaaaaggggaggggacacaaggtgccgagctagcaaacgacagagtctgtcagggaggtggctagagaggcccggaagtggcttctgtgccccgccctgcgggtggtttgctagtttcaagcactttgtgagtatggggtgaatcggcgtcggccttccactgtggggttaaatctcatcccgcggctctcctcctgtcggtcctgcagttcttttgtccccgggtagaggtgcgtttgcaggagtatgtgtgtgtgtgtgtgtgtgtgtgtgttt

SEQ ID NO: 35647 - DNA, 2300 bp, Homo sapien
gtgcaagtcattcgggaaaaggacattgctgggcaactaggtcccgccggagcgttccagctcaaagattacctgctgcagtcaggcagaaatgtaaagtctttcctgtttgattgggaactgacccaggtgccaggcttggggggacaccggacaaccaaaggcaatatgtggactcggcaagccactggtccctaaacctgaataagtttccgggcagagctgcatttattgacggttatgaaagctggtcagtgaaagtgaaacctgtatctttggacctcggcatcggccgcttagctccctgcttatgcactgtggatgtctctcccatgcctgaggacaggctgtgggtggatgttttgcacggcttggcagctgtgccgtctatcatggatttgataggccacttgacaacagaactgggatggtgccactgtgtggtggacttggccaatgcattcctcttaatcgacattgctccagagagccaggaacactttgccttcgtgggagggtgacaatggactttcacagtattgctgcagggatatatgcatagccccaacatatgtcatgatcttattaatgatgttatattaacctctgattctcttgcagatttagaagcagcaacgcagcctcttgcctggaattgggatgatgcggctgaaaccaccttcctggcagccaaacaggctattcagcaggcacaagccctatgggtagctgatcggggcacccatttaaacttgatgtgcatgtgaccagatagttttgactggggcttatggcatcacacagagctctttagaatgccagtagacttttggtcccaactttggaagggagctgagctccagtattcctcgacagagaagcagttactaactgcatatgctgccctttagactcgtgacagcctggcaggatgggctacagtcgtcgcgcgcatgacttacccaatagcagggtgggtatgctcatgggtaacaacccacacactgggatggcacagacatccacttttgtaaagtggggtgcttaagcctacttggaacagcaaagtatgctaactcaagtcccttagaagcacaattacaggaagtcttaggacctacagtcctaatgcaagataaggttatgggacctgaggcacccctagatcctgagccttcaccttttaaggaagggcattcccgcattcccaatggggcatggtacacagataggtctagccagggtgctactgctacctggactgctgttgcagcccagcctagtaccaacaccctatggtttgataccaggtgtggacaaagtagctaataaactgaactcagggcaatgtaaatggtgatcaccaagaaggtgacacgtaatctgcactgatagctgggcagtttatcaaggcttaaccttgtggctaactacctagaagttacagaagtggctagtcaccgacccatgtagggccaggccatgtggccagatctatgagagaaaggatgacttcctccaaccaggtatggggacaaacagtaacctgttgttgcccgccccaacaccctaaaggtagggaagcaaaaaccctggattaatatataaagcaacattggggtaacatcaccatgtagtgattgctcactataacctgaaattattgctccctgtattactgtggcccaagtgcccagagcttatgtgtcaggcttatgtgtcaagcctctatgtatacattgggcctgtgtgcccagagcctatgtgtcagacttatgtgtcaagcctgtgtgtatcagccctgggtgcccaaagtttatatgtcaggcctgtgtgccaaacctatatattgggcctgtgtacccaaaaacctatgtctccctcggccaagggggtggagtgtaaggtaaatggatgtgctttggtcaagaataggccgaggcagatatgcaggccagcgtgactcagcgagtttggaacgcaggcgcaccactccacttgttatataacctgtttgtgtaagctcatacttggcttacagccactattgtctgtaaatggtataattgccctgctgacactgtacataggacttgtgcccagagagagagagaaaaactgctgaccctgtaagagagaactggccatcttgcagacagacagaggtgagccaggaattaacaagcatgccaaggagtacagctgtaagtgtgggagcggcaggagccacagagccgtttgctgagaagggctgcggtcggaggaggcagccgagacagaggcagacagtgtgagagctg

SEQ ID NO: 35648 - DNA, 2300 bp, Homo sapien
atgatttaaagtgtacaagagaagttgagcctggtgccgcactactgcagtcccagctactcaggaggaagaggcaggaggatcacctgagcccaggagttcaaggatgcagtaagctatgattgtgcctctgtactccagcctaggcaacagtgcagagactccatctcttaaaaaaaacatacaggaggatgtgtgtaggttataggaaaatactatatgccattttatgtaagacttgagcatccacaaattttggtatcattggggatcccggaatgaatcccccacagatagtgaaggatggctgtaccaggtcttatctgtggtcaaggtactgtagtaaggggaagaagaaagaaaagacagaaggccctggaccaaaagaaatagaactgaattaaaccttggctgcctgctagtgagaccctcaattatatctgaagtgaggcttgcccaaaaaactggcataacattcacattaaaattcagctgaaagaaggatttctgcaggctcttcggatctttgggctgaaggcccttcagtttctctcagaaacatcaaggcagccgaaaacatcaccaagcccttcccctggagagagcataggctgcccctggtctttgccacctcctcaatctgccactttctttcttccccttcaagactgaacttcttgaaagaaagtccttagtccctgattctagtcctcacctcccactaagccttccacacactgtaggctgcaactgccaagaccactaagatttcgcatgcagaaggaaccaaaggtgcttccctcaattcccattttccatggcctcttctcaggcaactgggctgaggatactgtccacttccaaaaactcacttgtccttacttcaaggatcttgctttctcctgctttcctccttcctggttcttctcagctcccatcataatctggttaagtgttctgaagccaggtttcctgaggtcgtcaaaatcctggctttactacctactagctctgtgcctccctctccttatctgtaatagggatagtgatagcagatagggccattgtaagcattaagtaagtgagtgtataaaactcttagaacagtgcctggtgtgtggttgtaaggaacatggctgtgctgcagcgaagcaggcataggccgaggtaaacatcctgcatgactcagcaggattggagcgcacgcacacaattccgtgcattatataatcacagttatgtagccataatctggggaggctcatcacctggctctaagatactactgtttgtgaggtgtataaatgtggcactgacactgtgaaagagctgctgagtaaagccatgtcccatctacctgctgtctctcgagtgttcttccagctccctgccccccatccacccactccccttggacctcagctggggctctaacctgacatttggcatagtgagcaagatgaggtgagtgggtcttcagcccccaggctcccggagcggctatgcagccacagcatgagctgtggcacccagtggcagccgtgctgcaaggatgggctctggtggaaacatgggcggcagtggacaggccctccacgagtgtggagaaggtgctgaagcacctggaaatgcacaggaccgagaaggagtgtgcctttgccaacagagtcagatgggcatttgtgactgtgctgctggaagggcatgcccagtccctgctggacgcagtgcagggaggaggacgaacctccattacaggctcacccagtggtctgccagaaaatagagcatgaacagccactgggccccaagggtgggcctagagaccccctaccatagtgaagcacacttcttatagtgcttgtaccccccactgagttgtgggagttaggcaagcagtgccagcagcatttgggggagactccctgcctgaattctgtctctccgggacaaaggagctgatccatttcctgctccccctctgagatggaaaagctggcttctttaattacagtgtggtctgatgccggtgaaataccagaaactgtcagtagatggcagttgtatatagacttagtgcaagtcattcgggaaaaggacattgctgggcaactaggtcccgccggagcgttccagctcaaagattacctgctgcagtcaggcagaaatgtaaagtctttcctgtttgattgggaactgacccaggtgccaggcttggggggacaccggacaaccaaaggcaatatgtggactcggcaagccactggtccctaaacctgaataagtttccgggcagagct

SEQ ID NO: 35649 - DNA, 2300 bp, Homo sapien
cctaggatttcgaacttaacatggccaagctgtgctcataaatttcttctcaaaatgctacttgtcatttagtgtcccctgtcttggtggagggaccaccatcctctgacgataccaggctttttttttttttttttttggttctcttatcccccacataatcaatgatgaagccctgatccatttttcctcctgagaatttctcaatttcatcccctcatatttggcattttaaaaatcaggcctctcctgatctcatttaatcttgtgtgtgtgtcacttcatatttttgtcaaagtatctttgagatggatttctagaagtggtattgcaggaacaaagggtaaacttacatatataattttgctgtatagtattatctttcatacctatgggttgtaccattttgcattcccactagaatgttaagagtttctccttcctcatgagtagagcatgctgtcaaacttttgtaccattgccaatctgatgactaacggtgcctcagtcagcatagtttttaatttgtatgttcatattttgagtgaagttgaacatatttacagatgtttgagggctgctagcatttcttattctgtcaactatttatttcttttggccattttctctattgggttattggttattctcaacttttaggagctctttaggtatttggaaaactagcccttgcctgtgatatgttgcaagcctttttctttccttatttttttttgacaagcaatacattttattttcatgtagccagatttattatttttatgggttttagattttgagtcatatggttagataatgtttccctattcccacgtgttagaattattattcatgttttcttctaatacatgtataggtggattttttatatttagatctcagatccatttagaatttatctctattgtgatgtgtggtgggaaatacaaatccagttttacctttgccaaacggttatcatcccagcacaacttctaagttcttcatttccctgttgatatgtggtgtcaccttcatcatttactcaatatccttacatacctggatccatttctggtctattctttctctctgttaatacactaaaattatatgggtatgttccagtatctgataaggttgaccctcaccatttttctttttcatgggtttcctggctattcttatttccccacatgaattttataatcagtttatctaattccagaacaatatttgttgatatttttgttggaatactacagttgcatacgtatttagggaggactgacctctttgagtctttccaagaacctcatatcgctttctgtttgtttaaatgtatacttggccttttaggaatgttttaaagctttccccatagaagttttgttcatttcttgttaagtttattcctagtttcacttttttgctgctcttgtaaatatggtcttctcttccattatatctcgtaactcgttatcattgattattcacatatatgaaggtcgttgattttagtgtgttaactttatatcttgctattttactaaattatcctttttttatagtttttccattgaaccgggttttctgacatataatcatacatcagcacataaaagagaacatcaaaagaatcgtggatggcgaaagagccggcagaaaccagccggctggcccttgagaagtctgtgtggaagaagtcccttcgccaccgctaagcgcggatttgggaaggtcccccggagaacatccctttgaggcatctctaacctcagagacacagaatcccaaagtgaatggagacgcaagggatttccctgtcttaagatcagttctacaagcctcgaccacccatcgggtcgggggaagtgtggacaatggctgggtaaagaagaggagaagataaacccgttccatttaccagcgggcctgaaagccatcaaccttcctctcacgtagacgcgcggaaacactaccgagttgaaagcccctttcgctcccttcctagagcggccgcggaagtgcgccccgcgcgggctggttcttagaccccccgtggccgcttccggcctttgtgggtcacttttgatgggttccgggtcccaaaagggttcgaggcctcttgccttcgctccgtaggagggagttctcttctggccctgggggccgcaggtgagcgatgttgtgctctgtacgctgcgagcaggtgggcgggagattgctgtattccagctgctgggcccctcaggccctggccggtgcagagtggaccccggtcctcccaaacccaggcg

SEQ ID NO: 35650 - DNA, 2300 bp, Homo sapien
acaaatgtgcaacggtgaaaaatgtaaaagaattctgtggagttgtttttgaacagaaagtatcttataaaatcctccatatatatattatatatgtatatggaggattttatatctgtatataatatatattatgtacataatatatagtatataatatattatatatgttatatataatacacatatatataatataaaatcctccgtatataatatataatatataggataatatgtaatatgtattatatataatatataatatatgatatataggataatatataatacgtattatatataatatattatatatataacatattcatatattctagctcttgtacactgaaggagcctagaggcaataatatgtcctagtagtgagaggtgaagctggctgggcttccggttagggtggggacatggagaacttttctgtctagctaaaggattgtaaacacaccaatcagcactgtgtctagctgaagatttgtaaatgcaccaatcagcactctgtgtctagctgaagatttgtaaatgcaccaatcagcactctgtaaaaatgcaccaatcagcactctgtgtctagctaaaggtttgtaaacacaccaagcggcactctgtaaagatggaccaatcagcactctgtaaaatgggccaatcagcaggatgtgggcggggctgaataagggaataaaagctggctaccacccccgccccagtcagcagtgacaacctgctagcattgatttttgtgctgtgggatctttgttctttcccttttcacaataaaaccttaccacttttcagtttttgggtctgcactacttttaagcattgtaatgctcactacgatggtctgcagcttcagtccttaagtcagcgagaccacgaacccaccagaaggaagaagcaactgcaggcacgccacccttaggagttgtaacactcactgcaaaggtttacgacctcactcctgaagtcaagtgagaccacgaacccaccggaaggaagaaactctggacgcatctgaacagcagaaggaacaaagtccagacacaccatctttaagaactgtaatgctcaccgtgagtatccgcggcttcattcttgaagtcagagcaggaacccactggaaggagccaattctggacacagtagactggcaggaaccaatgccagacacagtagcaatgaggttattcattgcccgaaatccagatcttggtttctatataccatttttcactgatgtactgtagcttcatgaagcaatggtgattctaggtttagggtaggaatagtataaaatgggactgaaatatcttttgtgagaaagtgaagtgcacaaaaactgttgggaacttatcaaaggacatagaaacctgtttgtggccgggtgcggtggctcacttctgtaatcccagccctttcggaggccgagggagcggatcacttgagggacaggagttcaagaccagcctcactaaggcatagtggtgtgttcttgtaatcccagatactcaggaggccgagacaggaggatcacttgaacccggaatgcggaggttgcagtgagctgagatcgcatccactgcactccagcctggagactttgtcaaaaaaagaaaagagagggagcagtgtgaaagggctccaactgaccaaattttaaataatttgagcatcaacataataataacagtaattatttgtaaaggaatccatgagttcatcgtgataaaatgagacggcagggaaaagaaagggtattctttgcaggaaatggcaactaataaatgtagaaatgtgcttcagtttcctcacctgttaaatggagataattgtacctaactcacagggttgttatgcggggtaatgaattaatacgtgttaaaacactatgttggccgttattatattgccgcgtggaagacaatgtgtcacctagtatctcacttaagactacagacgggattcagagtgacgaccacagaggtgtggaaacctccggccttcctagaaggaacacagccggaaccgctgtttcgcggagagcgggccgcggtgacgcatttccggcctttgtagtttatcattctttgggctgcggttgtcaaggattcagagcagatgtgatctgcgctaggtggcatctcctctcacggatgcctcggtgagcttcggagtcgggctaccgctgaggggcttcggaagggccagtctgtgcactgcgacctggactgggtgtggggatttggcggcagggtcttcttggccagagatgggccggg

SEQ ID NO: 35651 - DNA, 2300 bp, Homo sapien
gaaaacacaatttttaaattgcccaaagaaattaaagaattgactatacaatgatctaataagaaaatatcaaaatactttttaatttagaaaattaatactgtgctagaaaatagagatagaaatcagcatcaaaatataatcagaaaagtataaaatgttatacttaatgtcaaatgcttctaaaaatatctttgctcaaagagaaaatcaaaactaaaattacaggccaggtataatagaatgtcaataagacaacatatatcattactgtggaatgctacaaaagcaggtcagaggggaacatttgtaacttaagtgcattttttaagtaaatgagaaagactttaaatgactgaaatgctggtgagtatttctcttcagaagcaagtaaaagaccaacaaaacataccaaatgaaagcagaagaaaggaatcaacagagaaaatctgtttacatgctaggagagctaagaaagttttttttgtaaataaaactgaaatacaaatctgtggaatgtctaagggaaaatataaacttagaattcaaaattagtgaagaagacacatttacaaatagagatgagatgtgtatctcaaataaaaagcatttttttacaactttctacctctgtatctgataatccctgataatctaagcatagtgaatgagataggatttaggacaatataaattaccaatattgatgtgataataataaataacattgattgaaggcttgcatggcccaggcatcatactagaattttaaaagcagtaagtcatttaatattcagtatcattatctctcaacaaataagcaactgagaatcagaggcactatatgacacactcaaatgacacatcctcacagaataataaccacggtaatagatgaagaggctgtcaaaagtctctttccatttctaagccccatgaaaaggccccattctcttaggccaagtgctgtcaaattgtcaaggatcaggtaactcttctgggttgaaaagtttcagggcataagaagtggaaaactgcctaatccattcattaaggttaccaaaacctgacataaatagaacccaaagtaaaaacaaaacaaatcaaatgagaacaatcaaattcatacatccaaagatcaacatatcaaataaaatgttaataagtgtacggaccagccccacagggtcagtgggtctctccctgtgtgcagcgacgagaaagtgtagaaataaagacgcaagacagataaaagaaaagacagctgggcccggaggaccactaccaccaatgcgcggagaccggtagtggccccgaatgtctggctgcgctgttacttattggatacaaggcagaaggggcagggtaaagaatgtgagtcatctccaatgataggtaaggtcacgtgggtcacgtgtccactggacagggggcccttccctgcctggcagctgaggcaaagagggagaggagacagagagaaagacagcttacgccattatttctgcatatcagggactattagtactttcactaatttacttctgctatctagaaggcagagccaggtgtacaggatggaacatgaaggcggactaggagtgtgaccactgaagcacagcatcacagggagacggttaggcctccggataactgcgggcgagcctgactaatgtcaggccctccacaagaagtggaagagcagagtcttctctaaactcccccggggagagggagactcccttttccggtctgctaagcagccggtgttttttcttgacactgaggcttctgctagaccaccgtccgctcggcaacgggcgtcttcccagacgctggcgttaccgctagaccaaggagcccttctgctggccctgtccgggcataacagaaggctcgcactcttgtcttctggtcacacctcactatgttccctcaactcctatctctgtaaggcctggtttttcctaggctatgattatagagcgaggattattataatattggaataaaaagtaattgctacaaactaatgattaatgattttcatatataatcatatctaagatctatatttggtataactattcttgttttatattttattatactggaacagctcgtgtcctctgtctcttgcctcggtgcctgggtggcttgccgcccacaaataagtagaatctggctagtgtgtgtaagaataacaaattcaacagaaccaaacaaaattcactccaataattccattttattttaagtatcaaaactcattatttaacaaataccacatagtggtttca

SEQ ID NO: 35652 - DNA, 2300 bp, Homo sapien
ggcagaaacttcttcacttggcttctttctatcctataaactttaatgtatttggtggaagacacaaaaggtatgctgatcaaatgtgtagatcattgatagatgataaatatagctagtctgatagatgatagaattcagatttaaaagatcaattgcttgggtggatagacaataataggcaccagcattgcaggggcaattcatataaactttgatgtttatttgaccttaagttaaaagtgaaccaataaaaattaaaaactaaaataagtgaaccaataatgtttcaaagatactagagaaaataatgccatcttggactctactgattagtatctaaagagtatgctcttgattgatgaaatcagacctgaaataatgtttctatctgtggacagaataggttttaaaatgtaaattaataaatcaagccaaattctaaggaggagggtgaggatgtgaactggctcctaatatatattaaggcgtggtcaagctcaccagaaccctgatttgtgactcaagtctcagaaagttacctcagaagtcttgtttgataaagctatatccatcattttgaataaaaatatgtaatttgtatatcataaaatatctcaggaatgatcccaaagtacttgccaagatttgatctagagtcaaccccagataggtggactctggtgatgaagacagttctatctaccagaatcagaacatttctggagggaaggttacatcagggaaatctggccgatgtcaaatcagaaaggaccttgagtgcttcatgggagaatttcaaactaaaagtgtaagaatttaggaggaattggggcactttaacataagtgatatcaacaaacctgacctttagaaaagtcatagaggcagagtgtgaaggaaacagggactggagaagatcctggaagtgaggagatagctaagggatgaaagcaaaattcctggaaggagataacagggaactaaggctccaaagaaggatgggtgaagggcaattgcagccccatgataccttcaggtgcaccagggacatgaaatgttccttgtttcctcctgttccatgtgtgctcctgtaccttcacttctcattgctggaggcaaggacccaaggtactcaaaagtctatcaagaatgtgggaacaccaaaacctatgaagttggggttttaggccatttgacctactgatgaggtccataatgaaatgtctccttacctctcaagggctcattactacaaggtgagcaaatgtaaattgtcccagatagtaaagatttcatcacagtaattatgatccaaatggaaccagagcaagagctctggagtaggacgcagaagttgccttcatttcactgttacccaccttgtgactttttatatgttatctctctctctgagcttcagttttctcatacatgaaactatgtgaatacagttctagttgtttaccattgtcaggccatgtggtaagtgctttatagttattatcacatttaattgttacagcagccctacaaggtagataatattattattctgatttcacagatgagaaaactggggacagacacattaactttgatttcagattcaaggagctagtcagtggcactgacaggtattgaattcaatggtctttatagcctcgtagtcaaagtttcagccatttttttgagctaaaagcaggagaagggtaaagaacttgggaatgtgtgtaggtctgttccataagaggcaagcatctgacctgctgccttaaggagctgcatagctggatcaggtatcagtgatcaggacatagattataggcttttgaaaagagttcagaaatctgagataactaaaagcttgtctttcaagagagttcataagaactcaaccccacccagactttagtttcaagaggcagagaatgccttttgtgtgaagctggcagaggcaacgcaggtggagcaggctcgatggtgaggggtttacaactgaagaggaagggggtgtgtgtagggagtggaggtgggtgtgtatgaatgccactctgcgattggagggtgcttcttcaaattggtccctgccaggggctcaaaaggggctgaaatcctggggacctcagagtcgtctaaaactcctagccatgttccagcagttccaggcctcctgtcttgtcctgtttttcctggttggctttgctcagcagaccctaaagcctcaaaataggaaggtgagcatggggcaggggatccgagctgattccagcacgtgatgaccaacctggctgccagag

SEQ ID NO: 35653 - DNA, 2300 bp, Homo sapien
tctgttcctttgccactccttctctctaaaaggtaggaaaatgccagtggattggggacaaaaaaatttttttaattaatgtgagagaatccctgcacagcctaatgacgacaaatgccataaatttaagagtataattcaaccctttgaaactcaggtccaaatagggggaaaaaatgagtaactaattttttttaattttaaagagctaataatctaatgaggaatatataaattgttcaagaatacaaataatatgcatattaaacatattaaatacacttatgatagtgaggggaaggaaagtggagtttgggaagcaaaggatataaataataaataaaacaagagaggggacttgcaaggacaaatgattgtgaacttaggagcatgattaattaaatattagtgctaggggtccaaaaattaaaactgtatggtagacaaaagggaagaatgtcttggtccatctcctgtgaagtcagcagtgattaactatgttatttatgtgagaaacccagaaattcccggggctccaggcctgcattcatcaattcatatagtctaaaattttagccaagactactgagaggtcattggaaactgttgctgaatgaatggggcttgtataccagttgaaaggcaaagcaactttatttttagagggacttgtgtctcatttccatgattcttcttgggctctgggcttccaggctattaagagtagtacttgccactatctattcacaatagcaaagacatggaatcaacctaaatgcccaccaataatagactagataaaatatggtacatatgcaccatggaatactatgcagtcataaaaaaaaacaagatcatgtcctttgcagggacatggatggagctagagggcattatccttagcaaactaatgaaggaacagaaaaccaaataccacatgttctcacttataagtggaggataaatgatgagagcacctggacacatagaggggaacaacacacactggggcctattagagggtggagggtggaaggagggaggggatcaggaaaaataactactgggcactaggcttaatacctgggtgatgaaataatttgtagaacaaacccctatgacacaagtttacctatataacacacctgcacatgtacccctgaacttaaaataaaagttaaaaaaaatagaaaaaaaagaggaatgcttgcaatttttgtaaatatattattttttaaaagttatttacttttttaaagcactgcattcagaatgtcagattattgtccagaaagttggcaacattagtattcgccattcccccacccatcgtgtaagagactcctataccagacggagcccaggctgggaatcaccattccttttaacttttgccaatctgataagtgtggaatgtgtcttttcgtatttatacttctttgattattggtgagagagaacactgtatcctaccacagatgccatttgattttctgcctcatgcccatttttttctgttggtctggtagttttttcttactgatatataagcacttgaaatcatttctaaggatttgtattaatttgctgtccttcgcatacattgtgactatttcccctcctcgagccagtttcctcctaactctttttgagagatcctagatggccggcccattctttgatttatttttaagctcaaataatattagaaataacatttgaaatgtctagaccaacccttttgcagtgactttactgggaggttgcatcagcatctagacacttccatacattgaggaaaaacagacagccgtgtttaaggacctcagagggcttgctatcacccatttataattttcccagaacttatgagtcccaggtcctcattgcagtggtaagcgctgagtgctcacgggggtgtgtgtgggacaggatgtggtttgagttctgtgatcctcaccccgacctcatgcgtcgggaatccttgcagccctgtgactggcctgtgggggcttgggctaagtccctgccaagataccaaaagactgcagaggtgggcaaagacctcaggcccccagactagcaatctacaaacactagtcatgactacacagttaagggtcgtccatctgcttccccttctcctagcctgctttgtgcaaacaagtcccaagcaggagaagatgaaggtgagtgagcttcagagagggcatggtagttactcttctgtcctacttctagaccctgccctccactccttcttgtaagactccaactcctgctttcttcttctttgccag

SEQ ID NO: 35654 - DNA, 2300 bp, Homo sapien
tttttctccttgaatcttcttcattcctatggatgggtattccttgcgttgaatatgactagggaagaaagggtctccatatgactagggaagaaagggtctccataccttcttcaggtggaggtcccctggagacctctctggccacatcagtctctgcttcagagctgggtctgaggctgggacagcgatgggctttagagtaggtggggactggggtttggaggagaagctgagtggacttgtctcagacacagctcagcaacaaccccttgaagaggaggaaaaaacgaatgtggaagttttaaggatggataaaatcagagagttatcagagaaacataaaacatgaaaaaaaaaatcagagccctaaaacaactggatttggagtcaggcatcttggattctggcctcagttctatgcccaattcatggctcgttaccttattgataagacacatgtgtctggcagcagaaggggcagtttaggaaaggataataatgaatgcgataacttggaggcagaaaataatcatgaagttaggtaaaggcaaactttcatttacataatgggttaccacttttgactttggacaaattaacctctgttatctcattgtaaatttatgggtaacagtaactaccttatgggtgggtgaataacaattattatgcatataatacattctacaaaatgcagttctaataacatctccccatccctcgcctctaaaattaactagataacatcctgggtgaacttctattttgagaattgatatggtttttatgttacctgtggtgcttaattgagtgtggagactctgggctgcagaatttgcttaataaaagctgcgtctagagataattgagacacgttatatggacttcaataaatttgaaacagcagtcaatatcagaagtaaactggactaaaggaagtcttcaaattgagagtctctctaagcttttgcatactggtacccaacatgactgtgagtgattgtcattgcagtagcaaaagaaaaaaaaaaggcaaattcttgcaaatgtttaacttgaaactaggtaacatggagatagaaacagatacttttacacaatattctctttatagatccctcaattttgctggtgcatgtatatatgtataaatttagggaaaggtgtaaaaacctgcatagaaaaatatctttttcctcaagagtaagaagtgagtagctacaacctagtatgctggtgataaaatcagtgggataacaggactagaaaaaagttgtgttttgttttgctttgttttgcattactccttctctgaatggggggcagatgatgttcaaccaaaatccttactagactactgcatttccaggaagtctagtttaatcctagtttgtctggacattccttatcaaataatgcccttctctcttttctccagccagttcctttccacctttttctcaccggatggtttggacatagagcttccttttcatattcctgtcatatatattctgtattccatgagcaatttgtggcagcttccccagtataagaaaagggatcagcatgtgctggtgagcactgtggcatcggtacacttggggtactgcatgaacactgtaagggtagagacagaggaggagtaagatgagacctgccttgtagaggaatttaataaaagaacatgcaatgagaatttcaggcagggctaatttatattaagtggaacttaacaaatgttgcatggaagtctgctcaaatattaatatgttcatgagatttgagaaggaatgggataggtggaatggaatatgaaagtggatattagacacctagagcacaatgggctgatgagctgggtgatgctgcccaacagatttcagggactcacttgcagatggactttagggttctccatctcctttcttgagagctaccaaaagctgggatttcagagtattggcttacatgaccaccatgttagtaagagagtgacaggagaaatttattcaaggtggggataatattagattctagaatgttaaacatggaagcccacttggagttctagtaagaatctagataaatatcttcattttactcatggggaaactgaaggccagggatgggaattgcccaggttcacaaaggaatttaacaatggagctggcttctgattcccagggcagtgttctttctactctacctgctgatgagtggagtaagaggtcagaagacctggggaaagataagcaactaagatatcctaaaaatagttcagcaatttaaaaccc

SEQ ID NO: 35655 - DNA, 2300 bp, Homo sapien
acttgcaaaaccctctgcttgctccttttctggaatacaaaaaactttagcaaaaaatacacaaagatgggagggaacaatgtaaataagtgcttccaagacagccagaggaaggatgtgggggcaaatgggaattatgtacagtactgtatgtattcaggacttgctgtgctcagctacatcagatactctgaattcagctactcccacctggtggccccaaacatcaacttgctgggaaaactcatacatgagcttacacaatttcagcattatactgactcatttctggcatactgacctcattttaaaagattttgcattccagaaacatgcgtttttaacagatcagactgtatacataaagggttcacattctgaaagagttcagataaatgtatgaatagtatcactaaaaaatataagaatgtctggcaatatccacaatgttctaaaattactgtcaaagaaggcaaatatactcctttagaaacaactccactgtaatggcaaaaagcttttaaaattcttctaaaaataattttgagctcaaaacattttacataccaactctagatactgaaaagaaccaaggaaatcatgcaattagtattttcattgtacagatgaagacattaatgtcccagagaaggtgtaatatgcccaaggttacacagctaattagtaacagagcctagatagcttcaaaagacagtaattttttaaaaaaaatttactattgtatatttctttaatctcatagtcactacataaaatatattttctactggtaaaaaatagatcaagcttttccatttggttaaatcatttaattatttgtatcatacacaaaaactgttatctcatatgcacgcatctattcatctacaccagtgatcaaataagaaataatgccccaaaccagggtttccaaccaccagcgcgaaattactcccattactccattctggatccatgcacccaaattctccacagaagatggcacctccaatttctcacctgctgtctaggttcatcaagctccctctccaaatcttccagcaaagtcaccacctcttctccactctcaggattatgctcccgcacccaagactggagctcctcaggcaggatggtcaggaactgctccagcaccaacaattccaggatctgctccttggtatgtatctctgggttcagccactgacggcaaagttcccgcagttgactcagagcctccctgggcccaggtgtctcctgatagcagaactgcctgaagcgctgacgagagagttccctggtataagacaaattcctacgtagggctgattcctgatcccaagtgtggtcttcttctttaacctttactttgataatctccccttgttcttctggagcctggccagccaaggctgggaagaccctagagactgcttccatcccgagcttagacagctcaggcaaaggttctctccagttggggtctaggcaaatgggtgattttacttgagctccttttttgttcttggtcaggaaagtttttgatataagaaaacactcaacacaggacaactacagactcagtttaaaaggacttgtttacgtgacaacacagggcagttactcgggcaattccattgaaagtgaagccatcctctgaaaagaccagaaatagtgagcacagagcgactcactaaagcttcagggtcacaaattgagcggcaagatacttgcgagacagaaaaccgaggttatgacggatactttggccctaaataaagcctgggtgtatgagcctaggcaaggaaacgaagatcggagcagcctgggcgagggcggagagggagaggggctcacaagctgcctggggaagaggcccgattgtcgccgcgcacatgcacccttccctcggccgcagctcccacctctgaggagctcagaccctgtggaacccagactagtgggtcgagggaaacactctacagctcaggtggaggttccgcagacacacccgcagctgtgcccgtaggttccggccgggcccggtgagccacgctcacttccggtccgctctaggattccaggtggtgccgtcttctcactggttgtgcaaacacctacggtaccagtaattctggggaggcaagtactctggaaacgacggagaattaactccggaattacctagttatctggcatcacggtgaaaagagttccacagtgtgagtagtgctggagtagatgctgctggtctgtgttttcctgtcaccgtgataaaccatcgctggcactcagacccg

SEQ ID NO: 35656 - DNA, 2300 bp, Homo sapien
tcgaactcggattgctggattcaaagtccagagtgctaaccattacaccatgggaccaaccacaagggtacagtaggtaagtatagtcgtggttaaatacctccttgataataaactttctagttccgatccgaaagagttaggtcaggcttcagtgagactcacgctgacaggaaagctgacgctttgctgctgaagaaggagtaactgtcaaaataaaattcagggagatctcttcactctttcctgcgcttttgttgggagcataaattagcttccagaaatcaaccggggcagatttgtgaggtctgaaacttaacaatttagaaagtcctctttaagaaaaagaacagctgttatcaacataaaattatgggtactctaaggcctgtatgatgtatctgaggataagctggagtagggagaggaagctgtcttaactaattttcactatactagcatacttttgcaaatcttacaaaatatgtttcatacagagcaacctcttcccaaggccttggaaagcacagcgcaaggaaaggatcttaacacactttagcgagactcacgataaacatccctctggggtgcagatcttttagcaatatctatcaaaatagtctcttctacagccactaaaaagaatgggatagacatgtaacacatgttggcttggcagtttctgggggaggatttaagtttaaaacaaaccaaaaaagcccagtaacttggtgaattgtagtctagtatgatttaagttttgcaaattataatgagttataattgtgactcagttatatttgtacataataatattgtactcaattttgtatgtacattttaaaaataggttggaggtacatacaacaaactcggcatcaatttttctgaggaatggaactgaggatgaagaaacttcacttcttgccacgttgactttttaaatatttgactttttttataagtgtctatcactgttgtagtaattaacaaatgcaaatctacaaaacaaaacaaacaaaacagtaaggctcgtcagtaaaggacttagaagtcatgcttactccatgttaactgcctactgtgctcagcatggcagagatcactgccttgcagaatgagaaaaaggtagtagaatccctgattgcaaaggatagttagggggggaaacaaaagataagttcagcacgttaaaagtgactgggaaaatgatcttttcagggttggatgacacaggcacacagacaaaaattttatacagaattttactcaagaccattcacggactctaagcgtaagatttcttttttatttagagatttctaaaagagatgttctgattattcaaagactctctactcagaaatgccaaaatgtgagaaatcaacatgaggaccacagcagaaggaaacagagaatggagaagggaaccaggcagcaattcaacaaatattccttgggcatctctgcgctaccagaggtatggaggaacccagtgactgcttgaaaagaatgttctggttactccactccagtgattcgctaggcgctgatcagccgtccagattttgttagatttctgggaccagtttcccacagttgtttagtcacggctctgtgctccgtgactaaacaactgaggctcattctcggtggtcttggttttctaatccgtaaaatggaaacaatggactaactcttacatttctttttaagtctgatttagggtgaaagggaaaggtgaaagtggcccgaaattaacgaggaaaggcgggggacgatcctacagattcgctgacgtggtagtccttagggatgctcctctccattttgtttcaggtcgctgcggtgagcaccacgggtctgagtgccagcgatggtttatcacggtgacaggaaaacacagaccagcagcatctactccagcactactcacactgtggaactcttttcaccgtgatgccagataactaggtaattccggagttaattctccgtcgtttccagagtacttgcctccccagaattactggtaccgtaggtgtttgcacaaccagtgagaagacggcaccacctggaatcctagagcggaccggaagtgagcgtggctcaccgggcccggccggaacctacgggcacagctgcgggtgtgtctgcggaacctccacctgagctgtagagtgtttccctcgacccactagtctgggttccacagggtctgagctcctcagaggtgggagctgcggccgagggaagggtgcatgtgcgcggcgacaatcgggcctcttccccaggcagct

SEQ ID NO: 35657 - DNA, 2300 bp, Homo sapien
tacaactgctatttcacaaacatttattccttgatataacctgccaccactagaattgcagtcactgattcaccaaaaataaatcaatcatgtcgtttttgctgatcttaacttgaggtgcagctcatatttttttcaatatttagtgttagaagtgtttggagtccttatttagaaatttggtgtttttgtgatcagacatttgccaagaaaattaactcttaaatcaattagtctagtctatggtagaattagttttattttgcttaaagtaatagtttccaaaaaccaactgacaataagtgaggacttcctatatttttatgcttaggtttgatgaagtggatagtcccatagcagtataattggataaaagggggtatgatctaatggttataaactggggtgaacttagcaaagcctgtttattcaggttctctttggcatctctgtgtcttcgtttatttcctccaagtacattttctcccctctgaattgacggtcttatcacctactttaattggaagatcaggtagctttcatggcccgcttcacggaacaagggcccagagaaaaacgtttctgcttctgctgttttctcaaatgccgaggtgtcgtattttgggagtagtgtgacctgaacccagtcaaaagacgtccgagtctttctaatctctgggtcatagggtcgcctttggcctatgcattgtacgtatacagtatggcatttcgcatgtctgtccacttctaggcgcacagtccaactggctttgactggtcaggaaggccaggcctggatctggggttggtactataggttagatgttttcaggttttgaaggagaaacaggtcccttaaggatgagagcgaatcagaagaagacagacaaaaaaggatttaggatttgttccagaagctcatttctggattgactgtcgtaccaaggtttggcgaacggcggcaagcgcttgccagtttgtcgaagagtggagaggtcagttgtgccaaggagtggagaggtctaagaactctccaggagcacggagggtttatgcagtcataaatcgccttgcttctgcatactttttattccgtggaggattccgcccgggcgatggcgccataaatgcaggtgcgtcctggctcttttctcttcccagtgcgcatctcggcgactctcaccacccgagtctcagagcccgcgaaacgtagcgtgccaggttctccatcccgaggctgggcgcgggaacctgcaggggcagtaactacgaccgggacaagccgatctgcaattcccctcctgttttctctgccccttggacttaaattcccacggcggcgtttagggctttcgttttatctttctgcgttatgctcgcggtttcctggcaacctttccaagcagaatcaccccatcacagacctttctctggggggcggccaggcaggacggctcccttataaaccccgataggtggttgtcgagcggccgtccgagagggtgacctgcagcgggagatcccaggcccagcacgggactttcgatataacattcagttttccttctctcagcgcagtcaggaaacaatatccagtatagcgaattcaaaattaagttcgacaaaatatgcttcttggcacgaccgataatagtaacaggtcatagaaatattttggcccacgttgagcgttggggggtgtagctcagtggtagagcgcgtgcttagcatgcacgaggccccgggttcaatccccggcacctccagcttcatttttctcccgccttttctcctagatgtgccttgtttgcaaaatcatgtctatcatgtccacgactcgcctcaattttttttcttttgtttttgtggcactttcattctctctcaattcttcaaattcacatggaaaccaaggaaaacaagctccgttttgctttcaatattgatgcatttctgctctaaggctttgacaccaccctgggtggctgtgtcaagagatgaaagacaaaatgaaagaggccgcggaagcacagactggcagaattccaaaacccgaaaaacaagcaaggcaccaaattaacaagcccaatcacattggttacatttcccagtattatcgaagatcaagcaagaaagaaaaagacagaaaacaaatgcgaaaccacaggtaattttttacaatttattttagatcctttcttttttgagctgttccttggtcaagggacagacccagaaaataggaaaactgtcccacggatttccccaccactctcttcccatcgcaatctcttttcttt

SEQ ID NO: 35658 - DNA, 2300 bp, Homo sapien
gagtcttgctctgttgcccaggctggagtgcagtggcctgatctcggctccctgcaacctctgtctcccaggctcaagtgattctccagcctcagtctccagagtagttgggattacaggtgtgcaccactgtgcccatcgagtttttgtatttttggtagagacggggtttcaccatgttggtcaggctggtcttgaactcctgggcttaagcgatccacccgcctcagcctcccaaagtgatgggattacaggcatgagccaccacaccctgcctgttctacctttctttacccccaggtcacctgcctccagaggtaataaagggttggtaagataaacacaatcaattctgaaaaacaaagccaaactcaaggcttgcatcccccaagtaaaggagaagatgaagggcagctttatctacctatccatatctctcatatttctgcactgtattgcaatgcttattagtcctttttggagtaaatgagaatagacatatcctttaattcttacaaatttcattgttgacccaatctcaaaccaagaccagactgtggtgtggcctggcccaagtactctacatttttctggaaatgggctaaagctatttgggactggaatttgaatgactgggtactcagagtatggttgagaaggtagatgtgggtttggggctggcaagtccacttaatccctcagacttcttgtcccatggggaagaggaccagagtggaactctctaaagtgatgatgtgggctgctttgcctacggagtagccattctttattcctttattttcttaataatcttactttcactttgaaaaaataaaaataaagtgatggtctggaagcagaagcccgccttgctcagatagcaagacaatattgagaaaatctcaaagaaaactaggaaacaccaagtaagggataagaaagcaacttaaaaatgctggaggtctactggatgataagacaatgagtattgtgggactccaagaccctgggtcaccgcaggattcttagtttctctatacttcagaaaggagcaagcaatttttagttgctactcaatacaacaaccctacgtagtgggcattttaataccattttaatggataaacaatcttatggttcaaaaagtaaaagatgtaacgaaatctacttcttactgcggtacaattatcatccccatttcacacgaggagaaactgaggtaaatgaatggtaaaccaacttgcttgggcacaagtgagaggtagcagaactgggcttgttattgacacacagaaatgttaccatctgataattaaacctttctttttctaaacaaaactgcaagtgcctacaaatggggctgtttaataaaaggcctcacttatcaggtgggctcagtcggtgaccctcctcatcctccagcctcttggggaggccaggtgtttgcgctccccagcacctatacaaagccagctttcattttttcgtttcttttttttttttttttttttttttgagacagagtctccctctgtcccgcaggctggagtgcagtggcgatctcgggtcactgcaacctccgcctcctgggttcaagggattctgctgcctcagcctcctgagtagctgagactacaggcgcctgccaccacgcccggccaatttttctattggtagtagagatggggttttaccatgttggccaggatagtcttgatctcctgacctcgtgatccacctgccttggcctcccaaatgctgggattacaggcgcgagccactgcgcgcggccaaagccagctttcttttgcaggggctgagacctggcaccaagaggaaacccaacaaaagacgaggggcccgggcccggcagccgctgaagtttgtaggcccggagcgtgtggcaccatctgctcttgcgaccagtgccctaggatagagcttcagcgcgaccagtccaaaggagagtggcggagcctcctcggcctttccaagaggaaacagctcaggcccccaggccacgaaaccttgtcactcgctggaagcgcgagccaagccccgcccccgcgagccgcctcttccgctcgcgctggggtggggtttacgctgccgccggcatccgctcggacgcggccacgttgtcttgcgcgctttgcccgcctggccctgggactctgaccctcggctaccctttcctgccccactagcgtggccgcgagcctcggtgagccggccgtattcccgctctcgcttagggggcacaggcgcaggcatcggcccggccactccaagccttcggt

SEQ ID NO: 35659 - DNA, 2300 bp, Homo sapien
accaaaacagaagccgtagattattttataacctaatattagagataatgtagcatcggccaggtgcggtggctcatggctgtaatcccagcactttgggaggccaaggtgggcagatcacttgaggccaggagtttaagaccagtcagccaacatggcgaaactctatctctactaaaatataaaaattagctgggcatgctgatgcatgcctatagtcccagctacttgggaaaccgaggcaggagactcacttgaacccgggaggtggcgatttcagtgagccaagatcgcgccactgcactccagcctgggcaacagagcaagactctgtctcaaaaaacaaaacaaacaaacaaacaaacaaacaaaacatagcatcacttttaccagatcattcagtcacacaaaccaaccctggtacaatgtggaagggggctacacaaggatgtgaatgctggacagtagggcccagctagccattttataggatggctatcacattttgtaaggtggttaccattgatggcacctaaggcacaactgctttttctgaaaattggcaattatgttgaaaattaaacagtctttctttcctgtacaaactacatttcaggataaccaaatagccctaaattgctaaattgatgaaggaaagtttttctttatagaggagttctaactaataaatgtgaaaaaattattgaattagaaaaattacaattttacaaactctaatgaaatggggtggctgaatctatcagattaaaagccagtgggaaagtttacatggaaggattcagctatcaagtattaaacccactggtcaatcttagcatcaaaaacattatatgcttcctgatgtgtggcaaaaagtacatagcaccacctaaggattcttactaacaaagttaaacctaactctaatcaaacctttagaggtaacatcaagttttacaggaaatatgaggctagagaaactaataaaatggggacacaaatagacaaagccagcatgtagaacattcaggacaaatgtcccaatttgttcaattagttgactatatgaggggaagacgaagaggaggatggaaggaggaactagttcagatgtgaattttaaaagaattaagacacatgcccaaattaaatactggaactttagatcttgaatgaaatagaaaacaaatgtaagaagcatatgtatatatttagggaaatataatatggacttggtattagatgataaccaggaattattttgttaaatgggataatggtattgtgattctgtaggaaaatatcctttttaaaataaatgcataatgaagttgaaagtaagatatttggggtttgctttaaaacgtttcagcaagaaaaaatggagatggatgaaacaagtgtggcagaattttatgtatttttaaatgtaaatgatgggtatatatgggttaattatactcttctttcgacttctgcataggcttaaaatagtctttacttttgaaaaagacattcaattatttgtgttcttagttaatatttaaaagtaactttttcatatatttgtcacaaaacttctgtccattcctatctagaggttcctctacatgggaaaaaaggagcaaaagggtaatatttctgcaacccctttgcacaggccataaacgcacgcaaactcctagaaggctgagccgcgaggaggagggcggagagtttaagggaacgcctagaccagagagttgacgcctttcctagaaaatcaccggaaatgataattggcggactaggaagtggagcttctgtatatttctgtttctcatttcttggggagagtaccggcgggaaggtctgtgccttgggccgtcgtgggtcggaatttgcagctgagaggagaggagtccggtgccgccgtcgcccccctcacctaaatacccgggcccctggggttgcaggcaggggcgggtctttggggccagatttgaggagggagtcggctgcggtttcctccctcgaagccattccccaaaatgagcatttcccgcccatttgccctacctcctcccaggggctcgtgacccattttttttttttttttttgagaccggagtcttgctcttgtcgcctcctgacccattctttttattcttctctacagcatccattcatatattcattcagtcagctaatttttaatccagcacatactattgcaagcgctgttttaggcgttgagaatacaactgtgaacaagacgacaaaaattcctgccctcatggagcctaagagcctagatttta

SEQ ID NO: 35660 - DNA, 2300 bp, Homo sapien
gcattaattattgatgcccctgctcagacattatggaactttaatggggtgtgacagcttgaaatatctttcagagaattatttttctttctatccaatttgattaatggcaaaactcagaatcaaatcataatttttgaaaagctaatgctaaagaaatcacaaaatgattttctcaaaacggctatttcaaccaccatctccggttagtctcacaaatgtatccacttttgaatcatggccacagttggaagtaatttcttaataacattcaaaaaaacatatttgaaatggcataacaaacaaaaaaagcacaactttttgtactacatctatataaagagagagaagaagcaccagtttgatatttatctgggttttgtttgtttttgagacaggatcttgctccagcacccagggtggagtgcagtggtgcaatcatagctcaccgcaacctcaaactcctgggctcaagtgatcctcccgcctcagcctcctgagtagctgggactataggagtacgccaccacacctggctaatggctgttattttttaaccaaatgttttatattagctttttgaccactttattgaagtatgactgacatacaaaagcagtacagatttaatgtatacaacttgatgagtttgaaggtgagtatatacctgtgaaaccatcaacacaatctatcccatatatacatccatcacctccaacagtttcctcccaccttctttattgtgttgtgtatgtgtgtgcgtgtgatgagaacacttaacataagatctaccctcctagcaaaattttaagtatacaatatagtatttcttaaatgtagtgtaaagtggctgacaagttttaaggagatggatgacatgatttcatcaaatgttgtaacaatgtaaaggcataagactggatgcaaggactggatgcaagactattgccagaatccagaaaagaaatcatagtgatttgaattagggttgtggtggtagggattttttaaagtgataggataattagcatatatatttgcatccaaatttaccagttttggtgataaggcgttaagaatgagagagacaaggcgtccaagggtaaacaccagatgtcctacataacaaactaggagatcaaaggtgcttagtcactaagatatgaaaaaagaagaacaatctttcctcactcttttttaaggtttatttttaattaagcaacaattgtatatgtttatggggtgcaatataatgttttaatatatgtttataatgtgtaatgattaaatcaggctaattaacaaacccatcacctaacatacttattttttgtggtgaaaacacttaaaatctactcttagtaattttgaaataaacaatgcattattgtttattgtagtcaccattctgtgagatcactaaaactggttccttttttctaactgaaacttagtacccttgatcaacatctccccttttcccatccatctcctgcccccactctctacctctatgagttcaacttttttggattccatatataaatgaaatcatgcaatatttgtctttcagcttacttcagttagcatgatgtccccaggttcatcctccaggttatcacatcttttcctcatcctaccattagcccagtacttaaattttataggtgaatttactgatcaaataaaagaatatgttcattttatcaagctaactagcttataaagaatcatagggtcattttagaaccagcatctatttcaaactttcaaatctacacgttagataattcagacctcaagtttaaaagtgaactccccaaggtcacctggattttttttaaaaaatctaatattaaactcattgccataaaagaatctatgacaaatagcagatttcttggctgtaatttttacttttatccattaaattttttcaattagtaacataaattatctctctttgtttagttctaattttatcaaattatttagatagttcatgttgacaaattgtttcttcctcttttccttttcttcttcctctccctcctccttctcctcctctacctcttcttccttcttcttccttctccttatccttgtatcatcatctacctcctcctcctccttttctcactctaggatttagacattgaaggactatggaccaaagcaattatagttctttacatggttttattctgcttggcttctctaaccatccaaaaatggagatgatcctgtcaggagttgtcgccatcttctacttaattacattggtgggtaacacagccatc

SEQ ID NO: 35661 - DNA, 2300 bp, Homo sapien
tctgttttctcatatacaagacaagctgagataatgatatagtattactattaatgacttattagtgattagtattaatgatactgctattgatatcaagctcacattcattaaatgcttagtatgcttgggacagggtcctaagttcagatgtgtatacattgtctcacttgagcttcacaatactctctttttatcaagtcagagattgttttttaatgtagcacaagaatgttcattcattgcccaggatcacacaatccagtaataaaaccctggcagattctggctccagaggcactgtacctaacagctaacctttaacagtgattttttttaatgctactaagtaggaagacaatgtgatactttcttcttgtttttatttgtgtttcttcaataatgaaaaagttataatcttttatactttcactgtcattttatgttgttttcttccccaaactgcttatttatgtccattgctcatttttttccattggacttttgatctttttctatttattatgtaataattatttatattttaatataataaccattttttccataaacattgtatatttttctatcttgccatttatgttttatctttctgtgtagtctttttctgatataaaaaattgtattaatgagtaaaaattgtatatatttatagtgtacaacatgatgttttgatatatgtgtacattataaagtggctaaatcaagttatctaatgtatgtattaccttacatatttatcattttgtaaatttacatggacattcaaaaaagcctaatctcatattctcttctatttttcaaccaaaggtgtattactgttatttgccaaaaaataatgtgtatctatagctaaaaaaaatcatatataatggaagaagttaaaaatctcaaggtcatctctgttcattttcatttattcattccattatcaaattatactttatatatcagtgtttttactctggaaaagttatcttattctgtggtaaattgtgtcaatacttattttctcttctctcttcagtctatctttctatttttatgcttgcaaattcaaatggtgtaaaccacctcgatgacatttcatttaaacatgcaaagtagactgaagaaacttaggtgcacttaggtaatataactaaataactgatgacttttacagactgaagaaaatcaacttgaatatatgacttttggtttgtttctattttaatttatgaccacttttgtgctgtatgcagtcattcttattgtactatctgtgtatttagggggaaatacggtataaaagaaagaatgatctttaaatcctaggtgttagtcttgacctcaccaataatgagtgtgcaaattatttattcttactgaatcacagaagcaataaaatgcaaaccatgactgtgaggggtttgatgagaattacaaagaatgtatttcacacactgagcagtttctggcacatgttaagtaaagcaacaattatgttatcagttttgctattttaattaaggtatttgcagatggggagatgacatctgtggtcattactatatatcacaagtagccataattttattactaatacccacggtagttctttgtggaaatggacctacatgcatggcatttaggagacagacacaactcaaaaaaacacgtaaagatgttactaaaagaagcaaaatttctttagatcaattgcagatttagattcaactcttataccctctatattactcagcattttcaggccaaatttaaaataattggagtaaaagtaatatttctttctaaactgtttattaagataggttaggaggtaagaagaggagagaacataaaatgcattgagaactcacaattttccatgtgttatgcatatgttacatactttatgtcatttaaatgtaatgattttctttaaagtaatttaaacactactgaaaacacaggaactacttttaagcttaaacataaccatattatactttacaagggctttatccacttgactgtaaattgtatttgatgctgagctattcattaaatttaattcagctccagtaagagtattcaataaacaaacattgattgctttcctatcttacatttttttaggagtgcgaaataagtgagtcatcatgaattgggaaaatgagagctccccaaaagagtttatactacttggcttctcagatagggcttggctacaaatgcccctttttgtggtcctgttaatatcatacacaatcaccatatttggcaatgtgtccatc

SEQ ID NO: 35662 - DNA, 2300 bp, Homo sapien
tgaatttataaaacatgagcgattaagagacccctaaaagaggcaatcacaggtggccccacaatgatttctttcttcctgtgccatagccaattgggaggtataagaaaaataactgactgtggaaggaatgaaatagagggcatgtggcaaagctggaagaggcaaagaattcagagaaaatggggtatttaaatggtgggttgctatgcctgacacaataactatataacaaaaataagtatcatttttttctatgaaagattgaaaactcactggagaaaaagcatcacctaggagtcataactatttgtaagatatattttatttttaacaaaaaaagtaacatgagattcactgggcacaatgtattaaatgatgaacagccacttaatgattcattaaatattcagaactctctaacttggagaataaatatgtactaattatagctcatgctcagaatttatatactatctaaattattgtcctggagaaaaatacatcatgtagaaaccttcttcaggccctgtggttcagcttcttgaacgctgtgatagacacacctgcaactctaagaactacactcaggttctcctccattttcctgcccctcccacttttccttccttctctgttctctcactgaatttttatcttcctttcctttctgtaaagtttgaatcttttcaaattcagttgtagtcacacatcctttagaaagcattctatcactgttctccccagatttttagcttagttcgtatcatgaatacccatatattgatgagcaagtgtctgtgtcttctctacttgtattcaatttttcagtttagaaatacattttgagtccaagtaaacaaatcacaagataagattcttatctaattgaagctaaacattttttctttaggcgaacattttgaaatgactaaattcaatattttccacatatcttttcatccatatgtaagattattgtgattgcaatgattacgttttccacaatcacatttaagaaaataacctgaaaatgctgaaaagaaaactaaagttccttatttattaacaaagaaagattttgtgttttatggaaattatcttccttagctaggttaggaatttccttcaattaccatttacctagatgtcaccctaaaatgaatgagaacttgatagttatttttctataataaggcaaacatctaaataaaatataaaattaaaaaattattttgtatttttgtgactttttattatggtaaaatttcaaacttagagaagagttgcaaaaaagtagtacaaaagactaacatttacccttttaccagattgagtattagtttacattttcccccaaagctttgttatatcatctatcaactatctatctatttatctatctatctatctatctatctatctatctatctatctacctatctatctctttttctgggctagttgagagtaagttggagatgacacgttcctttatgccaaatactttattcagtgttttttgtctaaggaaaaggatgttactttacataagtccagcacagtacccaaatcagcaaacttaatatgggcacaatattattatctaatccatagtccacactgagatttcttaaattgtctcaataattttgttaatagctagtttttgaaaaaatccaggattgtacactgagaaatcacatctcactagtctcttttcatctggaccagttcctcaccctttgtttttctacttaaacttgatacttttctgaattgtataggcaagctatttctctcaatttgagtttttctcatgtgtcttcattattagaattagtcttcattattagaatttttaacacaaatatcactgaagtgacagcatgtcctgttcagagcatcatcacagcaggctcatgatgttggtttgtgcaaatacagttgatcttaagatcaataaaatcactggttatggtggtgtctgacaggtttttctactacaaactttactgtttttcagtttgaaattaactagaaagttgtgaggagatattttagactattttagatatttgtacatattctgttccccatcaaatttttatccactagtttttgcaatcatttatgtttttcttaacaccgtcaccccttctatatttgttaattagggatctactgtaaggaatagctttatcttcaccattcatttatttattcttttactttttatatcagtatgagctttataattcttcttttgttaaattcattactactaatggttaaattgt

SEQ ID NO: 35663 - DNA, 2300 bp, Homo sapien
aaatatgatggttgtggggtgatggatatgttaactagcttaatataatcattctataatgtatatatacatcaaaacattacagtgtactccataaatatatacaattattactagtcaatgaaaaattaagaaaacaaaccagatatagtataaaggaatggatgtgacacaaattggcataatgtctcttaataataattggggaaggaagagacactcagccatccattttccctatagtatttgatttaaaaaaagagagaagatattttattctacaactcataaaagctacatttgatagggtcttcatttccctcttttccaccaagaagaaaattgaagctgagacttttctctacatgagttctgggggtttttttgtcccttatttcctatcccttttatcaactccggaggaatgctgaaagatgggtcatataacagatagttatcagattccaccttttaattactgtaataaggaactcaggcagctgcattcggaaagaaaattaggtcggcatcagcaaaagtatccacagcatttgagttcaagtatcttatggcatattacctttcatcttagggagatttaaaaaaatccttggaattttcccatgatttctcaaaaggttaatgctcattccattaccaacaatatggaaaaatgtacagtatctttgtaccagtctggagcatttgcacagatttggcccaagttcaatgttcctagctctccagctgtaactcaaccagttaggcaactccttacatctttttcaagagtcaagattacaatacttgagttattaaaagtttttcaaaacactgaaggtgagtcgggtgtagatattagttttttgagacagagtcttgctctgtcacccaggctggagggcaatggcatgatctcagctcactgcaacctccacctcctgggttcaagcgattctcctgcctcagcctccagagtagctggtattacaggtgcccactaccatgcctgcctggctaatttttgtattttttagtagagatggtgtttcaccacgttggtcaggctggtctcaaactcctgacctcaggtgttccacctgcctcggcctcccaaaatgctgagattacaggcatgagccaccacgcctggcctcttttgccaaatttatcagagagtataagaggaagagttggctgtggcaggaggggagcagaagggggatggcaaaactatgtaggaatattgaaatgctgggttcctgtattttattgcaaaaactatatcataaaagagtgtttatctttctcatgcaagattggtaatgtgcaagagaaaataagcaactgaaaatcaagctatcaaagcatatttgaatttcttcattttaaaaaaataactacaaggtgaattttctggattttatacaatgttcacgtatctttctactaatattagttaatgtctgttcagaagctccattaaaaattgtggaaaacccagaaaatacaaattataaattgtgactcagaatttaaagtatagttcagttattggcctaaagcatatacagttttgtagaaaccatgtttaagtcttcttgtccttgtctaacaaacttgttatacattctttcaacttcgcataccacattcagacctctcttcactgttgtgcatccaaacactctccatttctctcttaccaacctatgtttttgttagactctgtaatctttatgtcttccagtaatatagtctcatttacctttggaagcattctatcaccgatcactctattttgctgtattaatcagctttgtgtatattgtgaatttttataagttggtgtgtgcgtgcatattctctttaaactttgatttgtgcattattttatttgtctagaaataaactgctagcataaatagcatttgattctttctataatcatattcaattatttcttttcagttaatattttaaagtgactatctaattgctttttaatatgggaaattcctatctataagtaagatcagtaagactgctgttattcctttctctgtaattgcaaaattggaaatagcctgaaaatataaaaataatttgactttttaaagtaaaaaatcatttttcataaatattgtgttcctgattatggactatcttagtcttcattaatccaaatgttaattcagggatgtatataaagaactcagtaacttgagaagctattgcttgtatctgtagctggataaatatctcaatgaagcatataaagggaactgtataaaaattct

SEQ ID NO: 35664 - DNA, 2300 bp, Homo sapien
attaatttacatttccattaacactgtgccagttcccttttttccacatttttgccttaaaatacatttgttgaataaaatgagtagaagggttaattcctcctcagaagtggaaggaaatgttaaaaaagatgaaaggggagatagagatttggaatagggaaaaagattgatttgagaatacaattttggagttcttctgtagatggaatgaaaattgtcccagtgaatttattcagttgtggtaatgtgaaatactatattatgtgaattttttcaacttatcctctcccttcattaaaaatatccacagtagttcacgaggaaagaagacagcaattacaacaaaagcacaattaagccacctctcaaacttgacattgaaatgcatatttgtctataggtgagggcaatcgataaagtatatagtttgaatgaatatacaacaattatcttcatttttaagtttttattttgttttatttatctaagtttttataatttgcttcaaacatcaaactgcagattaatttttctcacttgaattaggccctgagcattttaaattaggggattctccctacaactgttttaattttattaaacatttttattaaccaacttaaactaagctctagaagagtatcttttaataacacaaacatgaacatttaaattaatctatagctggtccaggaaataaaaaactacactagaaattgattgttcaaataaacatattcaaataaaaaccaggtatttagaaacaattggatttaaccatcaaaacactgcaggcatagcacattgccattaacagtcagaaatagaagtcataacaatttgtaaccagttaaaataattcagttgtatgaacgtaggttatattcaaaacaagagaagtgttttttaagggcattctgttgtcataagttaatggaaattaaatttttagccactcaactgaaagtatattagctttgggagtgataaacctaccttttttttacctgctagctgcgtgacatcttccagacgtttatcttgctgaggcttggtgctctcatccagagaatgggaatgataaatattacttatcttaaaggatttatgtaaagactaaatgagatgctgtgtaggaagtgctcagagattatcagcatccttctatatgaagcacttaacaataatttgttgaaacagacactaattcctgcaccagccaaatagctcttgaattttccagattgatgatctatagcaataggtttctaattcattaggataagtctcttggaaagtttataaaaattcagataacctaaccccaaattcagggaatctaattcaatatgcttcttgttgaaatttatcatatcaaaaatgaacaaataaaacaatataaatattcattaataagggtgggatatataaaaactttgctatattcatacaaatacttgaatacaactcaaagatcatgttttagcataaaatgtattgccacggaaaattaaggaaaaatcagattaaaataggtacttttgatcctctattcaacatttctatatggaaaatggatcagaagaacatataccaaatcattaatagagattttctctggtgactactaaagatttttaatgttttaaattttcttttctatatttttcccaaatattctaaaacaaatacattaattttaatcggaaaagaatataaaacaaaatttatattaacgttgaagtatgaaaaaggagagcagggatggcttcaaagaagcaaatgaataccagagattcttctagaaatcgcattctacagcacaagttcacacatccccaagaaaatgccggtgagcatgacccagccattattaacagagaactctaggacatatggtgtccatttgtattctaatttaaaacttccagtgttgtatatttaaaaagatttgatctgcaggtgaaacattggatgtatttatatctgtgttgcatggtaggtaggagctatggtttgcaaaagaatgctgcttctctggtttgacataaatggtgattacttttatttgtaaccgttttttcccttatttttcaggtcatgctattgcagcatatgattcatttttataatctggtcttctctttgcccaattcctgaaaggaaaccaggcgacatcatggaaagaaagaatcaaacagctataactgaattcatcatcttgggattctccaacctaaatgaattgcagtttttactattcaccatcttctttctgacttatttctgtactttgg

SEQ ID NO: 35665 - DNA, 2300 bp, Homo sapien
tatttgtgtaagttattatttcttccttaattatttggtagaattcaccagtaaaatctggacttggtgtttcctttctggaaaaattttgaataagaactacactttcctatataaatatcaaactattgaaattgtctttcttctactgtcaattttggtaagttacttttggtttaagtaattttaaaattttatttaaattgccaaattcttgggcatgaagtcgttcataacgaccttttacaatgtttgacgttgatagtatctgtagtgatactagcttaaaatttgtattctctctctcttttaacaattttactgagttgataactttcattaatcttttcaaatgactaaattttgactttgttgacttttctttattgaacttttgttttctatttcaattattcttgttattattttagctatttcccttctactttgtttaggtttgagttgttggattatttgttcattcattcatgcattcattcatttagctgtttgaaatgaaagtttaggttattggtttttcaatatttctttttttctaacatatgcatttaaggctgacaatttccctctatttatttctttagctatatgccaaaagttttgatatatctcatcttcatcattgttcatttcaatttttttctaattttatttgaattttttctttatgaattatttgtgtgtattacataatatgaagcaattggtgagtttctagatgcatttttcttattgttttttaattccagtgtggtcaagggacattctttgaatagctcaaccttttgaaaccttttgaagccttttggtaatactcaactcatgcttgattttgtaaatatgtacaagatatacttgaaaataatgtgaattattttttggttgggttcagtgttctttatatgttaatcaaatttgtaaattatgttgttcagatgtttatatccttactgactttttggctgattcttctgtcaggtatagagagaaacttgttaaatcttctcattgtgattgtggttttaactatgtctttatttctgtctatttttagagttattttatggagaacttacactggagaacttatgatattgtggaccaattattagcagaagaatcttagtaggcatgggtgggaggagtatcctagttagcctttccaattcctcagtgcaagggctccctcttctgttgataaggtggtgattattattattgttattattattattattattaattacttacaaatgacaagcttcctttgttcttcatatatttactatacctcttctctccatcaccttcagtgcttagactgtgcctttttctatcccctgccccacagaaattctcactccctgggaggtactccccttttggattgaaaaattgggggtgttttcgaagttcttctactaatgggacctctaactatttcaagtttttcccaactacatccactgcctcattgctatgacacagtcttgtgactaatgatgctaattttgctgtttttttctcctctactcatacaacatttggtttgtgggtgtttatgtttcttactttcactgaaagtttgggttgtcagaagacatgtgttactctcttgtggcttttatgtatcttagaagaagtgatgaaatccccactgagctacatctgaatttttgccagaacctagaatcataagttgaaaaactattccctgtttgtatgtttaaaatttttgtaatacataattctaatgccatacatgaggttatgattatgtccatcaaatcttgcacttcctagttttgaaaacaaatgccctttatctatatctgatttgttcataatataatgcttttattagtctagtgccattttaacagctcagaatttatcaggtatattagtcttcctcaattttgttgtacataaatttagttttactgttcgtaactattcttcacactgttgctcacccctaggttcctccaaatagtaaacttgctttatttaatcctcacagtgtaaaattaaaaattcagaaaaattaattctgttattgttaaatttgcttcccagagcaatggagaatgtcactacaatgaatgagtttcttctacttggcctgactggtgttcaggagctgcagcctttcttctttgggattttcttaatcatttacctgataaacttgattggaaatggatctatattggtgatggttgttttggaaccacaactccactcccctatgtatttttttctgggaaacctttctt

SEQ ID NO: 35666 - DNA, 2300 bp, Homo sapien
tattcgctaaagcaaatctgaaatccctaaatattgaaattgcagtgaaagaaatattttcgtacagagaagttggctaaacaacattctttaaacgttaggaaaatgttgttttattatttattattttttaaattttctttttaccaaatagatttttgatacaattttattttatgggtcagagaaccaaaaataatattttatctatcatttgtacttttaaaagacatggtaaaagttttgaaaaatatgcaacatacatggctatcaaataaagctactttaaattgtttggaggcagtccttcatggaggtgtggtaaaggttagataatctctcaaaatttcctctagctgtaaagccaaatatcctatgggctccctagagatgtttcctagttcattattttttttaactttagtcacaccaaatccttttcttctctcatcagcaatttttcaacctcgaattattccccatttataggaaacactctaatgtctgcatctttcttctgatttcctattggttcttattcttttctaagtgcctgccatttctatggatttcccacacattcttgcttcttttctcctaatatgcaaaagttaatccactacatttgtacaagaaaggaacaaacaggaagctatttcacaaaattatgtctgcttttgtcagtgcacctatagaagataatcccaagtactttgcaaataatgttagaaaaaaccttcaaaatatatttctgcctttcagtaaacagtataaatttagtcaaatattaaacctcattataattatcttacttataatccctcatgtgttttaacagttactgaaaaaattctattatttcaattctgcaaaagaaagaaaaatgaatacatttctttcatagaaaatggaaattttatctgatggaaagaaggggcaaatagagaaaacacattttacaaatgaaaaaggctagaaatgtgtggcaactttggagagaactggtatgaagccaacagacctctgggttgatggaggagaacctgactgtcagtgtcacattgatgaaactagaagaaaagagaaaattcacttggatacaatgtttcttcacatctaaaaagtgagcttatttcaggcaaaataaaaataagacttaagaaaatgcatcacaagagaagacagaactttcagtggtctaaattcttagatactttagaagaagacactattgggtaaaatgaaggaagaattgttgagtctattggaagagtttttcttattcagagattcaggggtgtgaaaaaggaaaaagtctcagtgcaactggaaactaaaggaacaataacatttgtcatcaagtaagtaatttgggatttactttgaaaaaatttaaaggcttaggtagaagaaactaagcacattatctgatatagcagtgataaaacttcaaatatacctcaggctaatatttgattgatgtattattttttcctttcccagtagagctccatgacattgccagagatgtgggttagaaagagatcagtaagagaacatctccagcctcatctacgttctaagatgagaacaaaataattactactattttaaagaggtttttatatctctttaaagactttgtgattataatgagttcatttttatcttcctctctttttttttttttttttttttttttgagacggagtctcgctctgtcgcccaggctggagtgcagtggcgggatctcggctcactgcaagctccgcctcccgggttcacgccattctcctgcctcagcctcccatcttcctctcttaagtcaaaaaatttcaggagccattttcctgggtcaagagatatccaagtggtggtgcacttaaaaactgccccctattaatgctgacttgggataggaaaggaaagttgtaacagaatacggatgtattcttctcaaccagagaagatgtaagttagcaacatgttctaaatccccagaagaaagaaatacgttaatgataaacttaattttaaaaagtggttaagtcatagtccataatatgcatgaatccttaatattgaagagaccaacagctaagcttctatacaacttctgaggtttggaagaagtacaacagtactctccttccaagtatctttggcttggtgagaaaattctgagccggaaggattctgattgcgattagtgttccatagattattttgtcttttgtctgaagtgatgctgaatacaacctcagtcaccgaatttctcctcttgggagtgacagacattc

SEQ ID NO: 35667 - DNA, 2300 bp, Homo sapien
tctgtttctgagatatttcacttaaaataatagcctccagctccaatgatactcttgatttccaggggaggtagtggtcatgagctatttattattagaggtattcttgcctgatttacatgctcacctctctcctggcaggaatcctatagaaagactccaagcctcagaatgagtttggaccagataaaataatctagagttaaagatggcccacatagggagtgccagattcactcacaaggaaatgcagatgggatcaaagggtaagagaatagctttagagacgggagttggagggcaataacagaacctgtggaattttgtagtctatgaagaacagcattcttctctgatcaattcatatgggtttaggttaaggaagacatggtgttaaacattaagtattcattgagaatatatctttttgtaagacttcggtacagtagcacttataaaaatttaaatcctgtgctaaatgaacttttagtcttttggaaaagagaaagtgcataccataagataattaatgatgaactcaaggcagcatgtatttgcacatcaggtatcagatgagtggggccatcccttctttcactcttgttaccttggatgtagcttccataatactatttaaatttaggttgaaacatgccactgtactgtttaaaagccttcagctgtgccttgctgcctatagaatgaagctctagttccttcttgtgacaagcaagggtccccagactctgatcctggcccctttctctccctgtcttcccccattcttcacctcaatcctaattctccttcagaatcgaggggattgtttgagctacccttggctacttaccccctgctacctctttctcctcctcacatccaatgttgtttcttgcctcagtgtgtactcatggttttccttttacctaaaatgccctcacctccattctttccattttccactgcaatcactcatcagttcagcatcacttcctcctagtactatttctttcaggttgaattcattaactgtcttttggcgtattgcaattttctgttgatatgtccatctgtcacacaagagtgtaaactccttaagagtatggaccagttttgtttggcccactatcctcagaaacagatgtaatatcttctatacactagatccttagtacatgattgggagagaaataaagggctctattagtcaagggggattcttggtagagataagttcttaagctgggtcttcgaggatttaacgttagcaatgagcagaggtatggaaaatgggattccattcaaaaggcagatttggtcttaggcaaaactacaaaacagtgtgccgtgaaggctcccagcactgtggtccctgaggcatccagtttttcacctcttaggaaactgatgttctagactatttgtattaaagataacttacattttttgtgataataaatataatgtatatttattaatcccatattctagaaagtaacactgttagtattatgtatttatatttatttatatgatatctgctttttttctctacctttctcaactgtttctaatcattccctgtattctctctcattgtcttcagttaataaacacatattgctttgaatagcatatgaaaaccttccagcaggtatgacagagccattttcagatatttagaagtgtcatgctcaattacaactctttgcttttgcatatgctttcctgccagggatgccctgcctggtctggtttcctgtcttttgcctggccaactctttttttttttttttttttttttttttttgagatggagtttcgttctattgcccaggctggggtgcagtggcgcgatatcggcttactgcaagctccgcctcctgagttcacgccattcttctgcctcggcatcccgagtagctgggactacaggcgcccgccaccacgcccggctaattttttttgtatttttagtagagacggagtttcactgtgttagtcaggatggtctcgatctcctgacctcgtgatccacccgcctcagcctcccaaagtgctgggattacaggcgtgagccaccaagcccggcctcctggccaactcttaattggccctcaaaacttagcctacttgcttctatcttcagaaagccttccccgaccttgatcccacaccttctgccccacaaccccaggctgggtttggtccttctctgctcccatggcacctacttccttccctattaccatttaccacattttcactaccaactcctgaatgacttgatgaaactacta

SEQ ID NO: 35668 - DNA, 2300 bp, Homo sapien
ataaatcatgctgctataaagacacatgcacatgtatgtttattgtggcactattcacaatagcaaagacttggaaccaacacaaatgtccaacaatgatagactggattaagaaaatgtggcacatacacaccatggaatactatgcagccattctgcatctttctaatgacaagaatattctccagcataaccacaatactattattacacccaagggaattaacattgaaccaataatataaaacccatattcaactttcccacttgttccaaatcttttttatagttgtttttattttgttttgttgatgacgtaggatccagtcaaaaatcatgaatgacattttattgccatggcttttggtcttcttcaatctggaacgatgtcatctcccatctttgctttgtctttaaagacatggatattttttaagagtttgtgtcagttgtctatagaatatgccacaatatggatttgtctgactgttttcttatactccaattaaacatttttagcaataatactacataggttacactaagagtggacaaatagcaatccaaattattctactccattctgttccctgtaacattaatggcatcatcttcagccataacagggctacactctgggagtagatgactgatgagctgagagaaaacagattcctgaggaattctggatcagagcagccatatttccctgaactacaaatctttagacatttaagtgagagataaattttcattctctttgagccattggcatttccattactttcagccaaatctaataaataaatgaaatgataaaatataaaggagtcagaagaaaactaagtacgaaatccagtttatgtaaaccctgaacttctagttatataaattaataagtaaatttattacttaaacccgttggagttggggcttgttataatggttggtatgtcttgaaaacattctatttgacacacagcttttatcacatctatgaaaatgtataaaaacacagaagaaacaaatcaaataatagataccaatgataaaaatgcaaagaaagatttgtataataaatgaaaaagaaatcaaagcaagaaaaattagtgacaattgtataagaaaatgacatttagcacctcaattaggtcaaaacatgtttatttctcttttatattattagttacctgtagaatcaataaaacctgcaagggaccctataaatagttatcaaataaattgattactggattatatcaatatacataagaagggtaaaattgcattattactttttgtagatgtactagaacatctacagtgatgggaaaaaatcatgagaaaaaagaagaaaattaaaatggttgaaccagagatatgggagaactaagagaaaccaatagctctggatatattctttgaaatgttcttaacaggtcattctgtatttcttgcaatctaagaaacagattcaaaataacagattaattggttttgtgaagcattctccccattggaaagccaagaatgcttggagactcagatcctcagagagcttaaagagagacaacaaacctaagagaggcttcctcaagagggatccactatgtagataaaaaagaagataagcaagtcacaaatgccatctgccttcactggttatttctccaaatagaaaatagaaagacacctttgagataatatcttctggaaaacactgaaagagcccccagaggagaatgaaccaagggctcttcaactgcaaaaggatatcagtgtgtggacttgtatttctaatacacaaccttgaatatggctggaatattgaatttgtgtatatattcaagtgtatctttgggtgtttatagttttatgttcagtgtatttagacttttactgttatctgtaataatgccaatagaatacatgatttgcaactttagataaatctggcatctgggaatattaggctattcttctgtgcctgtattttgaaatataatttgacagtgtgtgaatttgtggagtttatgtgtgtagtttggggattttcatgtttacaatgtaagaggactaagtttgaaagtctgtaagatgcagaaataagcaattaaggaagttcttgtcatcttttgcctgagcatgttttaaaactagagaaatgctcacccctctaaatagttgaactgtttaatgctataggagcttaaaaagagaggatctttctcattttttttctcctccttgaacactgtgaaatttatggtaaaatgacagaaaaagaagaaagactaagt

SEQ ID NO: 35669 - DNA, 2300 bp, Homo sapien
ggctcacgcctgtaatcccagcactttgggaggccgaggtgggcggatcacgaggtcaggagatcgagaccatggtgaaaccccgtctctactaaaaatacaaaaaattagctgggcgtggtggcgggcgcctgtagtcccagctattcgggaggttgaggcaggagaatggcgtgaacccggaaggcagagttttcagtgagccgagatcgcgccactgcactccagcctgggcaacagagcaagactccgtctcaaaaaaaaaaaaattaaattaaaaagctataaaagctataatgagatatcacctgatatccactagaatgtctatcacatgaccctgaaattccacaaataggttttgaccaaagagaaatgaaaatacacatacacaaaagacttgtacatgaaagtttatagcagattgattcacaacagcaaaaactggaaaccaccccacactgtttctctattacagcataaaaagttatcccaaaacttaatggcttcaaacaacaaatatttattatctcacagtttctatgggccagcaattcagaagcagctaaatagtagctggtgattctagcttaggatctttcttttaactttttaaaaactttttgtgaatacatagtagatgtatctattttaggatctttcttgacattgtagtcaagaagtcagctgattgtatttctaagatttggatgaagctgaaggattcacttacaagatgtcccagtcacatgttgcacgtttttagtagggagccttagtttctccccatatgtgtgtttccattcactgctaggatggcttcctccaaagtaaacaatccacaaagaagaagtcacaatgttactgtgacatagtctttgatgtcacatcccatcgtttctaccagattctatttgttaaaactgagtcactcagtacagctcccatgcaaaggtaagggaagtaggctctactttgtgaaggggatataagaaaattgggggccatattttaaaacaaccacaaacctgaatgttcatcaacaagtgaatggatgaaaaaattgtgatatatttaggcaagagaatactactcactgatatttttaaaaaagaattggactattgatacacaaaacaacagggatgattctccaaactgtggtacagagcataacacaccaaacacaaagagtatgtgctgaatgaatcttttatgtgaagttctggaaaaagcaaaacaaaatgatagaaatcagagcagtggttgcctagagcatggggagaattattgtaaatgggcatgatgaaatttctggagtgatggaaatgttctatatcttcagtagggtaatggttgtctggatgtatacatttgttcacattcagtgaattgtccattaaaatatgtgcacttcattatgtaaattataccttaattttaaaaagagaaaggaaataaaccaaagtcaggggggattgaatgagcacattcgaggcttgagaggaaggctggaaatatgggacactcagaaggtgtggatcaggagagaatagtgcccttttactccccagtgacacggagaagcagtggtgacctttttatatgccaaagggaactcagttgctggcacacttcctttgaatcttcacattccttcttaaccattagtagctgtggccaattagctgtctataggttatggggcacctagtcttggcagaattaatgagctacttctctctatgggatgggagtcttgggattcctccccccatcatctcactatgcctttttttctgcctttaatgtcactaaaagagaggttaacttactggattgaggaaaagaagtcgttagcaagagttccatagtaaagcgctaactctagctcatgtgtctggcagagcaatggtggaatgtggttagcgcatagcttcttcagccagcccacctgggttaaaatttggtctttggtgcttactagctatactttccagaacaagatattcaacctctacatgtcttcaattattgatctgtaagggaaggtaataatagtacccaccttttgaagttataaggagccgtaaatatgaagcgcttttttgagtgcccatggaagtaagcactagcaatcaatactcttaactgaaatccaagttccaataatcatcaagagtataacattcctctttagtttgcttttagttctcattgtgagatcacaagtggaggctccaaccagtccagaagttcctttctatggggaagctgtggcagcaaggccgtgaagagag

SEQ ID NO: 35670 - DNA, 2300 bp, Homo sapien
catccataaactgcagcatttcttacattcttactctcttggcaacttgtctcactgtatgttttttcttaatctcttcagtttatatcttcctttgaccctctgcactctcctattttctatctttaataacatgccttttccttaccctgtttcttctggtccttttctctgacaccaataataggcaagcactactttccctacatcccattaactccacacagaagcacattaatttattcttttttggtcctcaaagagccagtcatgtactaactgctacaaagttatgagacaaattctgccctacagttcaataataataaccacttatagttttgacagttactatctgttgatgtcctatatactaacactgtgctaaataatttcctggaatatctgcttcttaaaagaaccctgctagacagttaatatctctgcagaagaacaaacagtctcaaagaggttaagtaacttgcccagggttaccctgccaatgagtgtcagtgccaggattgtagaccctgtttgattcagaactgtcttaagaacatgtggaaattgatgggctgtaggggaataaacttgtgacttacttgcaattaagtcagactctcttcacggccttgctgccacagcttccccatagaaaggaacttctggactggttggagcctccacttgtgatctcacaatgagaactaaaagcaaactaaagaggaatgttatactcttgatgattattggaacttggatttcagttaagagtattgattgctagtgcttacttccatgggcactcaaaaaagcgcttcatatttacggctccttataacttcaaaaggtgggtactattattaccttcccttacagatcaataattgaagacatgtagaggttgaatatcttgttctggaaagtatagctagtaagcaccaaagaccaaattttaacccaggtgggctggctgaagaagctatgcgctaaccacattccaccattgctctgccagacacatgagctagagttagcgctttactatggaactcttgctaacgacttcttttcctcaatccagtaagttaacctctcttttagtgacattaaaggcagaaaaaaaggcatagtgagatgatggggggaggaatcccaagactcccatcccatagagagaagtagctcattaattctgccaagactaggtgccccataacctatagacagctaattggccacagctactaatggttaagaaggaatgtgaagattcaaaggaagtgtgccagcaactgagttccctttggcatataaaaaggtcaccactgcttctccgtgtcactggggagtaaaagggcactattctctcctgatccacaccttctgagtgtcccatatttccagccttcctctcaagcctcgaatgtgctcattcaatcccccctgactttggtttatttcctttctctttttaaaattaaggtataatttacataatgaagtgcacatattttaatggacaattcactgaatgtgaacaaatgtatacatccagacaaccattaccctactgaagatatagaacatttccatcactccagaaatttcatcatgcccatttacaataattctccccatgctctaggcaaccactgctctgatttctatcattttgttttgctttttccagaacttcacataaaagattcattcagcacatactctttgtgtttggtgtgttatgctctgtaccacagtttggagaatcatccctgttgttttgtgtatcaatagtccaattcttttttaaaaatatcagtgagtagtattctcttgcctaaatatatcacaattttttcatccattcacttgttgatgaacattcaggtttgtggttgttttaaaatatggcccccaattttcttatatccccttcacaaagtagagcctacttcccttacctttgcatgggagctgtactgagtgactcagttttaacaaatagaatctggtagaaacgatgggatgtgacatcaaagactatgtcacagtaacattgtgacttcttctttgtggattgtttactttggaggaagccatcctagcagtgaatggaaacacacatatggggagaaactaaggctccctactaaaaacgtgcaacatgtgactgggacatcttgtaagtgaatccttcagcttcatccaaatcttagaaatacaatcagctgacttcttgactacaatgtcaagaaagatcctaaaatagatacatctactatgtattcacaaaaagt

SEQ ID NO: 35671 - DNA, 2300 bp, Homo sapien
attatgtaaattataccttaattttaaaaagagaaaggaaataaaccaaagtcaggggggattgaatgagcacattcgaggcttgagaggaaggctggaaatatgggacactcagaaggtgtggatcaggagagaatagtgcccttttactccccagtgacacggagaagcagtggtgacctttttatatgccaaagggaactcagttgctggcacacttcctttgaatcttcacattccttcttaaccattagtagctgtggccaattagctgtctataggttatggggcacctagtcttggcagaattaatgagctacttctctctatgggatgggagtcttgggattcctccccccatcatctcactatgcctttttttctgcctttaatgtcactaaaagagaggttaacttactggattgaggaaaagaagtcgttagcaagagttccatagtaaagcgctaactctagctcatgtgtctggcagagcaatggtggaatgtggttagcgcatagcttcttcagccagcccacctgggttaaaatttggtctttggtgcttactagctatactttccagaacaagatattcaacctctacatgtcttcaattattgatctgtaagggaaggtaataatagtacccaccttttgaagttataaggagccgtaaatatgaagcgcttttttgagtgcccatggaagtaagcactagcaatcaatactcttaactgaaatccaagttccaataatcatcaagagtataacattcctctttagtttgcttttagttctcattgtgagatcacaagtggaggctccaaccagtccagaagttcctttctatggggaagctgtggcagcaaggccgtgaagagagtctgacttaattgcaagtaagtcacaagtttattcccctacagcccatcaatttccacatgttcttaagacagttctgaatcaaacagggtctacaatcctggcactgacactcattggcagggtaaccctgggcaagttacttaacctctttgagactgtttgttcttctgcagagatattaactgtctagcagggttcttttaagaagcagatattccaggaaattatttagcacagtgttagtatataggacatcaacagatagtaactgtcaaaactataagtggttattattattgaactgtagggcagaatttgtctcataactttgtagcagttagtacatgactggctctttgaggaccaaaaaagaataaattaatgtgcttctgtgtggagttaatgggatgtagggaaagtagtgcttgcctattattggtgtcagagaaaaggaccagaagaaacagggtaaggaaaaggcatgttattaaagatagaaaataggagagtgcagagggtcaaaggaagatataaactgaagagattaagaaaaaacatacagtgagacaagttgccaagagagtaagaatgtaagaaatgctgcagtttatggatgaataaaactctggacaattgctgagacacaaaagatatgaggctgcaaagtttaaaaaggaacgatacatttaaaataatcagaatagtgtttacttcttcagtgggagagaaggagatgtgatcagggaggagaacacagaagacttctaagataccagtaatatttgatctgttcttaaatcaggaggagattcaggtacaccatgtgtttattattccataaaatccatagatgtgttttatatactttttgtttatatgatttttaaaaaattaagggaacaaatcttatcctcaaggagagacgtaatgatggaggaaggaatatagaaggagacaaaaaggagggagtcttgatgaaaagggagatgggaggcagcttttaacaccagacagggtcctgtgatgcagaggtgattgtgccatcccataaagtcccagggcactgtctgccaatgagaccaccaacttgcttgccctaaatggccacatcccctaaacggccctcctgccattgtctgtgctcagaaaaccctcagtttctgcctcttacctgccagggtggtgccgcatcccacccccatcattgagcttgcctcatgtgtctcagcacagtcttttacagcaaaaatgcatgtcacctcctcctaaaggctttccgtggcccacccacccagattcctcctttattgtgcagactctttcctaacccacacctcatcttaatttatttgccttcaattctgggcggcggtgttggggagggtctcaattttcccatgtatttcccagtgttt

SEQ ID NO: 35672 - DNA, 2300 bp, Homo sapien
taataattattcattagaaacaagatataatagtactacttgttaatcataatataatcataaataattaataatcacatacaactattaatcacattatattattaatatattgttattaatatgccactaatagcatattcatatcatataaataatattaatatagtataccaaatatattaatatatactgttaatatgctaatatattcacatgtaatcaataatacattaatatcttaatattgaaagcatatcaacattaaaatgtactgataaactattttactaatattgtataaatattattaatgatacattattaataaactgaataatgttaatatcaattaatattaatgaccaaagacccaccaacatgggtcgtgttggcatcaagactgtgacgaaggtggcctaggtcatcgtagaaaagtactacatgtgcctgggcaatgacttccacacaaacaagtgtgtgtgaggagatccccattatcctcagcaagaagctccacaacaggagagcaggctgcgtcacgcatctgacgaaccagattcagagaggtccagtgagaggtatctccatcaagctacaggaggaggagaaagaaaggagggacaattatgtccccaaggtctcagccctggatcaggagatcatcgaagtagatcctgacactaaggaaatgctgaagcttttggactttggcagcctgtccaacctgcaggtcactcggcctacagttgggatgaatttcaaaatgcctcgtggagctgtttgactctttctccaatgctgtaatatacagcagtcactggattttattttcaataaacctgggacaacagcaataaataaatacataaatattaataaactaatgtcaatattaattatcaatatccttgatagcataattgagaatatgttatattaatataattaatatattaacataaatatataatgtgaatatattaacatcaatattaataacatgttaatatagcaatgttatattaatataatttattaatatataaatatttacatagtattaatatgctagtctctctatattaatatatttacatagcattaaaatactattctctatattaatatttatattaatattcttaggcctcttttgtatttgttgcaccctaagtctgttcatttccttctcctcagctgacatttggagcatagcagtcgatgatgcccacacagacactgcctgagactcacgcccctggagaaacgcagatttccttattttccaggtcaagtcctgccagccatagaaaggacttctttggtgccaactgctgtgaaatgcctgccttggaaatctcagtgctcccttgtacctgtctgagcccagggaaatgccatactgtggcactgctgcatcctgtatggctacccaaggatgcccaggactgggtttgaaagagatgagacatggccaggtgccgtggctcacgcttgtaatcccagcactttgggaggtcaaggcaggtggatcacaaggtcaggagtttgagaccagcctggccaatatggtgaaaccccatctctactaaaaatacaaaaaaattagccgggcatggtggtgggtgcctgtagttccagctagtcaggaggccgaggcaggagaatcgcttgaacctggaaggtggaggttccagtgagctgagatcgcgccactgcactccagcctgggtgacagagtgagactccaactcaaaaaaaaaaaaaaaaaagagatgagacactagtgtctcatgagtagaacctggaccagacacaaatctccattcccaatgtttagtgcctcattagtgcccaacaacaagatattgggtctatgtgggtaggcctggggcatcctgtacaacaggagatgtgttaggggagggagaacagatcacaaattcatggagagctatttgcagagcagatactcccatccactctgatatgtagttaatgttcagctgttcctaaaaagcacacccaacaatgggtgttctattccagcctaggaaaatgtagaggcaaggggtctgaggccagaggacaccactagatggaccactgctcctgactgtgatgttgtggcccactcaggtcccagcaccccatggtctgggggaaaatttgctggttcagccagagggctggatggacagtgtttgctgagtcacagatatctctctcatgtagcctttgtctccacagtggtgaccaggaggcacagaacccaaacctggtatctcagctctgtg

SEQ ID NO: 35673 - DNA, 2300 bp, Homo sapien
gcatgactcagctttcagcttaattttttccatttggcatagtgaattggagtcctgagttttattttcctttcccacctcaaaccccacaagctttgcgttgttgcagattgtccctctcagaatattttacaagatggtgaagtgcctaatgaacatttcttttgtcataaagtgagtttggatcctgaagaagccatcatcttaatcaggctttgggatcaaagttccccttcacccgaaccctgaacagcacagcagacagggaaggacttactgagatggctgctcccactctccagcccccactttcctgaccattcctggcaggaagagctgctgagcagactccatgggctgcccacacagggtctggacctagctgtcttcctgtgcccagcagcctgtgagccatcccagtcccctatgtgcagtggtcagcacccacaagccagccttcatagggattcagttcatgggtgttgccctgagcctggcacagtggcctccccagcttagcatctgcagttcgggtcagggtgttcttaacggccctcacctatgccttttctggccacacatgagtttggatgaagcaggagtctcttccatagctccttttcatctgagatgtccatgactggctcaagtgaaccacagtgtcaggagaggggcacggaagctgcaccctaaattccccgggacctgtggcaggccttcctggtgacctctgccttctcaggtgacttctgccctcctgggtgacattagttctcccctctcaagtgatctgtgccctcctaggttacctcagctctcccaggtgacctctgcctttccagatgacttcagtcttttcaggtgacctcagccctcctaagtgacattagtcctccctggttatctctgccctccctggtgaactcaggtcttccaggggacctctgctttcccagatgatctctgccttctcaggtgacattagttctcctaggggatattaactctcccaagtgacctcttcccttccaagtgacctgtttcctcaggtgacctcagctctgccaggggacttctgcctttccaggtaacctctgccctcttggtgacatagtgtgctcaggtgacattagccctctcaggtgacctcaaccctccaaggtgacgtcagccttggtgaagtctttccatgatgactttggcttttgccagaggtaggctactgcgggggcataagccatatcatgccatgagccactatcctgctcatgttccagaatgaggagacatctgggtgctggcccagctgctggccaatgagaggcttgccaagcatggtactctccaaggtgacctctgccctctcaggtgacacagtcctcccatgtgacattagctcacagtggacagctacccacgaggcatcacacagccaggacaggggacggccacactggctgggtaattgtgacttacagacaaggcaccttctgtcccctgctcattttgagcctccagggtatcccctgctgagagtcccacaggagcctgtgactggccagggacccgacaccccaagtcagatgcctcttgtccccatcagcaaatgggatcacagctgccctgtgaccaccttctgcatcctggtgtcacaaccttctggccctgaccttatgcaggggactcttacaaccctgctggtccttccacctcccagctggccaccctcccaaccaccctccctgcccatggctagaccaagcccagatgacagcttctctctgtcctgtgtcccctgccctgaccccacatccaggagaaggccacacaccctccagcacccctggtcaccccaccagctcccacctgtcctcactgcttcaaaggcaggcctgcccttctggagccatggccctggaagccactaagcagtgcctccagccaggccccaggggcattcccacccctcctctcctggccgagaccacatgatggggtcactggatgggacagtgaaaggccttggggtctggaagcaaccaccactgcccaactgccactgcccaaccgctgctgcccaactgccactgcccaactgccactgcccagcctgatggctccacatctcaggagtaggctctgattccttggggccccaggagcctctcaggagtctacatcccaagatgttctaacttccagagtctccaagcccatcaagagcaagttttgctaaaagtgttctgagagcttatgaagcacatggtgagtggtcagtccctcagctcttccccagaggc

SEQ ID NO: 35674 - DNA, 2300 bp, Homo sapien
cctattcaagatggagttgctctggttcaaacacctctgacactttagttggttttctgaatttgtcagaggggtaaatgatgtagtttggatgtttgtactctccagatctcatgttgaaatgtgacccccagtgttggaaatgggcccactgggagatgtttgggttgtggtggcagatccctcatgaatggcctggggctgtcatcattgtaataaatgagttctcactccattagctcacaagagagctggttgtttaaaagagcctggcatttttcccactgtctcttacctccctctcttgccatgtgacacgcctgctctccttcaccttccaccatgagtaaaagcttcttgaggcctcaccagaagcagatgctggtgccatacttcttgtatagttggaggaactatgaatcaattaaactttttttccttataaattacccagcctcaagtattcctttatagtatgcaaaagagactaaaacagcaaatgaaaagagatctgtctctgaaagaacttattgtgacatagagagagacagaaaaaagtcagattgacactgggtaagaagcaaggaggtcaggtcccaagatgaagtcctgcctgtggtcagcaaaggggcaccaaggtgtctgggacagtcctggccctggctttgggcagggagggaatttcccataggaagggaagagtaaagagagagagagaggtcagagtccaggtttgttgttcatatgttttcttgaaagggcactatttcccagaatccaggtcatctctgggtagggaatcccctgaattagttttttctgagagtatattagatttgccctcacagtaaccccatgctggaaatacccaactccagtagcacttttctccctgccttttcccactgaaataacataataatataggaagaatacaaggactatagaaatacagattagtgtttgaacccttgcttaccagctactactaatatgattgtggatgaggtagcttcttacttattaacggggatactaatagaggtggttccttacaatgattccatttatgattttttatttaatagtgataccaaagcaatacatactcagtagaaacctacttcaagttcccataaaatcatctgcttttcactttcagtacagtatttaataacttaaatgagatatttcacacttcagtagtaaatacactttttgttagataattttgtccaactgtatgctaatgtaagtgttctgagcatgtttaaggcaggttaggttaagctatgatgtttggtgggttaggtgtattaaatgcatttctgattttggatattttcagtgtacaatgggtttacagggatgtaaccccatcataagtgaaggagcacctgtacttacttcattaaaatgctgaaacagtaaataaggtaacatttaataatatgttgtgcagttcttgaaatttaagtactcaccaaatattacttttcctttttttgttatttacttacttttcattcatttattaattcatttgtgcatttagtaaacatttataaattatttcctgtgcctgacagcatgctggaacagtgctaaagatacaagttaattaagacacaatcacgacccccaagattcctactcttttctaaagattacagacaagcagacgatgctattgttgaagaaacatgctctgagaggcatttgaaggaagtgtagaggatagaagatggacacataacccaggatggggaggaaaagagttagggaaggctttttgacgaagatactgtttacaccgtgtgttcttataaattcatggtggtggggatagagttggaggaaaaggcatgctcagtggcgtggagatggcagagagattggggtgttcaaggatatgccgggaattcaaggaacgagaattcccatagacacagacacagctagacatagagatctgcagcttaggtttgggctgtgggtatagatccaggtggcttcaacagacaaagatctttcctgagaaaagggaaaagttttcaacacagaaagaccatcccatgtttggaatgaggtttgcaaatagattgcttgaggagagaagtatgtgatcagaaagcattctttgtctattaactcctgcccagcaaaagtgaaagaaaattcatgggagcatgcaagaacaaagagcacagcaaagctggacaaacacagcaatccaggcaggggatttccaactcaactctggtatataagctgcatgcaaagtcctttttctgtctctg

SEQ ID NO: 35675 - DNA, 2300 bp, Homo sapien
tcttgattcactgtctttgcggtaagaggtgtagattcagggcttccacttcaatctgtagctcgtactccacagactaaagaactatgtggggattctgccaatggccaagcatgtgcattccagttacagatttagagactgcagaaatgactactgggtagatccatggacctagtacatgccatttattagctgatctcataggctccctttctaatggaagagaagcataacgattcagttatatgaagattggctaaatgttctaagtactctccaaacccagagctttataattctctgttactacagtgtgctccatctcagaataactaaatagaaaaggaggaagctgagaactttaaaaactgaggtcctgaatagatgaatcataagcctgagaggactatcaggatgcccgggactcactggaggtgggagtagagacactgtcctttttcttcctgttgacagaaagaagcaatgagtgacctcttttacctaccacagtgatgactattgttggcatatttcctatagatattcccctgccccttttaccataatttgtggctaatgaattgtctgtgggctatggaccctagagtctcagcagaattaatgagctctttccctccgtgggatccctctaccaccataccatgtcaacatttctacctccaatgccactaaaacagaggcacacctctgcctagactgagggggaaaattgttggcaaagaactcaatggcaaagaactcgatggcaaagaactcgatggcaaagaactcaatggcaaagttctgaccttggcttcatcctccctgcagagatttggtgggctttggttggtgcaaaccctctacagttagcagatttgggttcaaacatcagctctggtgcttactaactatactgccttgggaaagttatttatatttctttgtttcaacttcttcatattggaaggaagagaataatatgtagagttgtgaaggataatcagcagtgtagagtaaatgtttaataaacaacttggttggtggcagatggggagagccctaatttgtagtgtttgccaattttcatagtgtaaatattcctgccatggctgtctcaagccactgatggtttaataactgtctcacaaaattcctaaaaatttactaatcaagagataatctgagccagctccagctcatcacacacatgtgtgcttagaaaagtgccagatggtcagcattagcaatccctattgtgaccagagatgcagttgcccattcaaggatgcccattcctttttatttttttgtttcttcctgatgtacaagtggaggctgggcaccagttaagagctctgtcatggggaattgctggtaccagaagagatttttatttgattgaaggtaagcagaacctttgctctttggctgtgagatatcagtttccgcctatcctcaacactggaggaccagatttggagttaaacttactctaaaatcctagtcctagcacttattgactaggtaaccttctacaagtctcttgtcccgtctgtgactgttcactttttggtaaaattgggataattttatctctttgtagggtcactgtgagaaccagatgttcagggagttgtttatcaccatgctttgatggtagctactaacagcaagggtagctcatggtcactagactatcataaacccctttcaaaggacctcccaactccttccccagctcctaacacaatgctggcactttggggctcaagaaatgaataaatgcgtagaccaatgcatgaatatttcagaaggaaaaggagtaggagaaaaataatgagagtggaaaagacagagaacaaagagggaaagggaaacagtcactaagaaaggtgtaatctaaagagattcagcgatatagcagagaaaggaaaggaatgaaatgccaagataatgacaaagttagaaatgtagaaaattaattaggatgacacatgatggataaataagaaacaattggctattgtttaaggttacatgcaaagaattttatattacaaagaaaacaaaggagggggcggcagccaatgagcatgaggtttcttttgggagtaatgaaatattctggaagtaaatggtgttggttgcacaacttgtgaatatactttaaaccactaaattacacacttcaaaagggcgaattttatggtacgttaaatacatctcaaaaaatgaaagcgaaggcataattaaaaatttagaggccaggcacagtgactcatgcctgtaatccc

SEQ ID NO: 35676 - DNA, 2300 bp, Homo sapien
actgttaggttggaatgtggctggcagctgggccaggagaaagggttaagtgagagtgaatacaacccctaaggcgtgggtaggggagactggtgtatttggagagggaataggcggtggttagtactatttttaatggtgcattgctggggtaactggggattagaggcagggggtgggcagagggcgggaaatggaaactccatttgggtttcccagatgtcctggtgtcttgatatatttgaaccagctacttcaagcccagagctgtctctttgtctgtctctgtcaggaaaacggttgcttaaactatggaggaggagggaaaacctcatgtaattgtcatctgccaaaatgtgctttttatttttatatgtatttttaaaaattttcctatttttatgtaatttagaggtagacgtgcagttgtgttacatgaatatattgcatagtggtgaagtccgggcgtttagtgtgcctgtcacccgaacagtgcaccttgtacctaataggtagtattacatccctcaaaatatactttttaaagagagaaagcaagcagttattctttgtgtacttggtctaaatgataggacataggagagaaactgaaggtggacaaaaggaaggacctactgataaaagaaagcctccttgagaatgaaggggaggctcaaccattgaagatggctgccgtctgccctgcccagcagatatccagtcattcccagcactgctggagttttgcccttttttttttttttttacaattcgaatttaggacaatgttctggattgctataaatgctgcatggcctaaattattctttaaaaaaaaaactaagcaaattgaaattagttttttttggtgaactctgacaaatttgaacttccccctaataataactggaaaacatatttgggaatattaccctgccaggattaaaatttcagattagctttccttctttttttgtttgtcttaagaataggtgtccacactagatacttcaaggcctttttagctttatgattccataattgtcatttaaaactttgatttgggttataagaaaccttataacattttttaatgatccccttctttctcctcccattttcctttgctgtaagaaagacagaaaaacttaaagaacaaacaaaaacaaagactacaactttggggacatgcctcagcatttcccaacctatggatagaccattcactccatcttctcatctcatttctggttgcttcctaacggccccagtggcactgagcattctgcctgcagtaacctctgtccagtgcagttagggcctcatgtccccagccaatgactgaatgtccatcagcaatctagttctttgcccttttctcctatcccgtcttcattcctttgtcctccttcccttctcttttcccttcccctcttcctcccctgtgccatgcaggagggtcccccccagctgaccagaccctggtcatcaagacattccgcttcctgtcacagaaactctttatctccgtctcagttctctccagcctgggcattgtcctagctgttgtctgtctgtcctttaacatctacaactcacatgtccggtaagtttctcttctgacgttttccttgtctgcctctctgagatactgatcatgttcctggacaggatgagaataaaacctgtgtaactcccatggccatgtatcatggagtttttcattctgacttgttgagaatgaaaacagggaaaccagatataacccccactcctactccaaagtagctaacgggaggaaaaaagaaaagaagagaaaaaaacaacctttggggccaggtctcacagtcttggactctacataaatagcctgtattctagtgggggcctgtgcttgggaagccctctgcaactccatcttcagccccatgactgcattgctctgcctctcaaggctccactgtcttctccaatcctgtcttcctttagcccctggccctgaaattagggtcatgccattgcgtggtatttggagagctcagcctccctggagaagaggggtaattctctctccctctcaccctctccacctctgccctagttatatccagaactcacagcccaacctgaacaacctgactgctgtgggctgctcactggctttagctgctgtcttccccctggggctcgatggttaccacattgggaggaaccagtttcctttcgtctgccaggtgaggaggtggtgggcaaattccttacaggatgtgactctcccacccgtctcaggagcaccttcc

SEQ ID NO: 35677 - DNA, 2300 bp, Homo sapien
attttccctttctctaaacttagaaatttccatgcatcaccctcttctagaattcatccctcaccattccttatataattgatttattgtaaagactcagaaataaatcaaacattctactaagaaaaattgagaaggggagctctgggggtggaaacatattagggtaaaagacttaaaattggaggcagcattatcagaagatgaagaacaactcagggatggggtgggaagaagacaggtccttttctgtacttcctagacaacctccattattccctaagggaatcagtgttgtgtctgtctacttttttttttttttttttgccacgtaattttacaaactctcccttttctaggcacccgaactctctgccatcttctctcctgggatgcagtcatcccatttgtatgcctcatacttcctctaccctggtagattctttcaagatccttgggctttactttcctcacataactcagttattctgcttctagtttaccattttattctggaaattgagagtcccatccaggggtggacttatgacactactgaaacttagacttcaaggttcctcacctacagggccctcttcctgtgctctaataatatagagggctcgatggatatgtgttcatatggtaacaggcttttgtaaaaattgcagaaataagattttaacagcaattgcttaaagccaattgtatgtgtaattttttttcttaaagactcccaattttgtaatattcaggcaccacagaaccaagatctgccccaaacttagctattggcattcccgtctcaaattctgttgtcctatgaaaaatcgaagaagaaaataagtcctgacccccttacccccagacccaccttgttcttatccccaggcaccctcccctcagaaacgcaggcttctgctctccccggtcttcagcatggacaggtgtgggagggggctggggatcaggccagggaagctgggcgccagtggtaactcttctctgatccccgtctttcctgctgccagtgaatcgaacgccacactcaggtgagatgagaaacccttaccgcgcgcactgcaatgccctccccttcactctgcaccctccacccccctgaaattctgcccttaggctacggggcgtcgtcctttcgcaccttccccaacccaccccagtttgcggccacccccttccctccctacctgtttcctgcctccagtcccggttttccacgaggctgcggtctctccttgtccctgcttggctacacttccctgggctccacctcctcccagactgagcctcgccggtgtcaggcagagcccagcagagggcggcagggtgctgggagaccctgagctcccaccacgttttcccctgtggggttccttgcgaccttcgctggaaccttttccagcctgctgcctcctaggatttcacctaatggactttctcagcctgtcccacccatcccaaccctggccaggcctctcgcgctcttccccacatcttttccttccgtgtaccccttccctcgtcttttctcaattccatgtcctgtctccctttcttaggcttctgtctacccagccccaggctcccttccacgaccccaccactccctcaaaccagcctcccttccgtacccaactcgttccctccaaaaccgtttcctctcccccacatcctcagtgcttcactgtatcgactcatactcccacttcagacctcaggcgccagccccgtttctctcccgtcccactcgcatccttcccttcctaccctggttcctccgtgcttcagcctcccgcggctccctccgcccaccccgccctcctggcacgccccgtccccatttctcctcccctcgggtccccttaagtgagatccctcccttcctctttcgttcctttcctcctcgaggttgcatcccccctcccctccccgcccctccgactgtcgctcccacctcggcgctcgcttccctccccgcccccttcctgcctccccagctcccgcccgcccccccaccccccgctgccgcgcgccgcccgtgacgtcagagccccctcccagccccacatctccctcctgctcctcctcctcccctccgtcggtcagtcagtccgcgaggagagtccgcggtggcggcgacggtggcgagagccgcgggggccgtaggaagccaaccttccctgcttctccggggccctcgccccctcctccccacaaaatcagggatggaggcgcctccccggcaccctcttagcagccctccccaggaaaagtgtccc

SEQ ID NO: 35678 - DNA, 2300 bp, Homo sapien
ttagtagagttggggcttctccacgctggtcaggctggtctcgaactcccaacctcaggtgataagggaaggggcactattgacatttatggttggggcagaggtgtaagatattcttcaaagcactacctacatgttgaagaattgttcctcacccagattctcaaaagtcccccaggacattcacgtagtgaaaacctgtgtttaattatctgagcctataacttaatacagttttaaaatttttttttaaatatacagtgaactttctaggaatgcaattatagttgtgtgtaaaattagggaaaattaactttgctaccaagagttgttcaacattttgttaaatcacttcattgatggcaacatgctggaggtagttgagtcaccaactcagcacctggatcagcctgtgttggtagcagtttcatccccgtggttctgtgaataggtggaagcatctgcttactccatcaggacttctagggtagtcgggccttggcactcacacattaaaatactgtttatgttattttattgcaagttacttttctttcatttcccctttacgttacagaaagggaagcattttgctttctgtttaaagttgtgtatgtaggtaggttatatcatctatgactttctctccctccttccctttctttttgtttgagatggagtcttgctctgtcacccaggctggagtgcagtggtgcgatcttggctcactgcaacctctgcctcccgggttcaagcgattctggtgtctcagctgggattacaggcgcacaccatcacaccacgctaatttttctatttttagtagagatggggtttcgccatgctggccaggccaggctggtctcaaactcctgagctcaagtgatcagtccgcctcggcctcccaaagttctgggatttcaggcgtgagcctcatctatgaatctcaatttaggacagtaaaagtgtcattacaaaatatttattgtaaaaaagggttggaggttgagaatctcaattctagtcagtctctcagtgtttggtttcttcctaccatttttccccctaggaccagccagaaagcagctttttttttgtcccccccaacaaggagcccactgtttcctctcccagcccaaactcaggcctacgaacaacaacagcacaacacacacacacacacacacacacacacacacacacacacacacacacacccctccacttcaaggtatagccaagagcttctggagccgtcaaaaaggtctgtacctgctgtctttagagcttccagtttgcccttggtcaagaaatactgtttgctaggctctgctggagtacatcaggtaatactggcttctaaaccaccctgaggttcttttctcttgtccttttactcccttcgtacttcaatttctctccttgatgtccccctccctgttttgttttttgcctccaatccgttctgcgcgttccctgcagagcaggcgagtagcaatgctgctggaccatggagctgctctagtctcccagaaatctcttctacacccaacccttcttgcgcttaggtggtcctcagtccccctcccccacctccttctgacccaggcttctttctcgccctccggtcgcagttctcctgggcatctgcctctgcctctctcctctcacccggatctagggctgccttctctttgtgcagccgtctttctccaccttcatcccagactccctgtctcagcgccagctcctctgcctttggctcgggttccctctcccccaccccagcttccagttgtttggcccgcaggtccctcggcagtgaccggcgccccccgacgagtgcgtgtgcaccagggcacctccctctcccccacctctcagccccgcgcctctccaccgcccgccccaccgcgctgtgggcggtccagggcggggctgggatccggggcggctcccggggctcgggttgtgggaggcgccctctccccggtcttcccctctcttccccccgccctgccttcccttgcaccctccttcttccctccgcccgggagctctccctggtccccggcgccgcctccttccctcccggctccccgctccccgctcccgtggctgccgccgccccggggaagaagagacaggggtggggtttgggggaagcgagagaggaggggagagaccctggccaggctggagcctggattcgaggggaggagggacgggaggaggagaaaggtggaggagaagggaggggggagcggggaggagcggccgggcctggggccttgaggccc

SEQ ID NO: 35679 - DNA, 2300 bp, Homo sapien
tgttggtcaggctggtcttgaactcccaacctcaggtaatctgcccgcttcggcctcccaaagtgctgggattacaggcgtgagcgggcccagcccctataccccagatttctgcaagtggcaacaccactggcttcattttgctggtggcccctctggccttcccttgtatatatcacctttgcccaaagaccatgtcagccaagggactgctctcacagctccaggaatcctcccctttcaggaaatttgaggcagttgagggcatgaaagtaaataagctgagctcatcagaggccttgtattgtggtggttaaaagagccagttctaggactagaaagcctggcttgaaatcccagctctgccactccctagtggtgtgactttagcaagttcctttacctcttttgtacctcccttttctcacctgtaagatatgggtgataatagtttaatatttgttttgttgttgtgaggattaaaggtgttaatgcaagtaaaccacttagaaccacagcacatagaatatctcagtaaggtggttagttttttttattgttgttttcagagatgctgtgatttctccaaagtggctgtgatggctcggcaggctcctgaccctctctgctcccacatgcctccaccctcatcctgatctcccatccagcttttgacagcttgcttggtgctggacaattgcacacatcttaccacccccaaatcctgcccagaagcatcttgtgcataactctcctacctgaatatgcaacagggagaaagagcgtcccaggacattttaggtttttgaagaaaaaaaaacccctttggtaaaaagccagagatccacagcggccactttttccatgggattgacccctgcaatcttgactttcaaccacacagcaccagagtagccaaacattgcttgtgtccaaacgctggctgccttgaagggtgaaagaataagcagttcccaaactcagctgaccttaatgtccttctagctccttacgcccatctcggacaaaagcagaaatgtatgtctcagttgtgtttctaccccttgctgcccaatataaatttttgtgttgcccaatataattttttgtgacgatggaaatgttctgtatttgtgttgtctgatgagataaccactaactgtagtgctattgagcatttgaaacatggctagtgtaatcaatgaaccaaatttttaattttatttaattgtaattaattttaagtggccacatgcagggagtgactgctgcattggacagcacggctctaaattgagccttttttccttatttggtgaggcatacttgccttaagattgggaagtctatttttggaacctgctaccaatgctggtctcacacttgcaattctcagctgagccaagaggtgagagaaaggtcattttccattccagatctcactctcccctgtgacactgaggaaactggcaagtgatgtgaaggctggagagcgtgtcctgtatgctggctctgtcccttctgcctgtgttgactgacatagttagttgctgcccttgctggtctcccttcctccaaccttgcctctctgagcacacctgacattcatctcatgacttccctaaaaacattctttgggaacaagaaactaacaaatcccaagtgacctatcacatatacaaacatacagggcagagtttggattcgcggtagaagaaagggaggttagacattaagaagaatggtctggtgatgacagttgtgagataatagaaacaggaaaaagaaatctaagttttctttctttttttaagaaccaataataatttctctcttttgactagtcagtagggctggggtggattggaggaagcttacatattccatgaacaagcctcttcctaaggtcctgtaagtgatcctgccccactgattagcccctagaagacccttcaaaggttggatctccaggagggagtgggggaggaaagccctgtaccaggcagcctctgctccattgctctgggggggtggggaaggcaaaccctggtcatcccctcagtctgtagcccttttgtgtgagtgcctggcaagggtgacgtggggctgtttctgcgggcacagctgcagcaattaccggagtggaggcagggcccaggcagcactgccctccaagatcttcccttgggcttttcagcagtaaggggacatgcaccccaagggcctccacttggcctgaccttgctgcgggggctctctgtccccaggaacagtagagatggcaagcttatcaagaccct

SEQ ID NO: 35680 - DNA, 2300 bp, Homo sapien
aagaattgttaagttgggcgtggtagctcatgcctgtaatcccagcactttgggaggccgaggtgggtggatcacctgaggttgggagttcgagaacagcctgaccaacatggagaaaccccatctctactaaaaatacaaaattagccaagcatggtggtgcatgcctgtaatcccagctactagggaggctgaggcaggagaatcgcttgaacccgggaggcggaggttgcggtgagccgagatcatgccattgcactctagcctgggcaacaagagcaaaactctgtatcgaaaaaaaaaaaaaaggaaaagaaaagaattgtttcaaaggactttttaaaaactccacaagaaatcttttctagggagtggggagggatagcattaggagatatatctaatgttaaatgatgagttatgggtgcagcacaccaacatggcacatgtatacatatgtaactaaccggcatgttgtgcatatgtaccctaaaacttacagtataattaaaaaaaaaaaagaaaaaagaaagaaatcttttctagccgggcgcggtggctcacgcctgtaatcccagcactttgggaggctgaggcaggcagatcatgaggtcaggagtttgagaccagcctgaccaacatggtgaaaccctgtgtgtactaaaaaaaaaaaaaaaaaaaaaaaaattaaccgggtatggtggcacgcacctgtaatcccagctactcaggagttggaggttgcagtgagctgagatggcgccactgcactccagccggggcaacagagcgagactctgtctcaaaaaaataaaaataaaaaaataaaagaaatcttttcttcatccttcatgaatgtcctgtcacaaggtttatcagcaggcattctttttttttgttctgtttagaaatagggcctcactccattgccaaggctggaatgcagtggtgcaatcatagctcactgtaacctcaaactcctgagctcaagcaatcctcccacctcaacctcctaagcacctaggactaaaggcatgtaccacaacacctggccaagttgttttcattttttctagagaaagggtcttgctatgttgcccaggttggtcttgaactcctggcctccagcaatcctccctcctcagcttcccaaagtgttagcattccaggagtgagccacgggggcccagcctagacattctttagtactatagtaattcagataagatgctcttgaaagaacacttgcccagtaacggcaatgtctcccaagtagctgggattacaggtgtgcgtcaccaccaccggctaacttttgtatttttaatagggacaaggtttcgccatattggccacgctgaggtcgaacttctgacctcaggtgatccgccccctcagcctcccaaagtgctgggattacaggtgtgagccaccgctctcagccgcgtgttttaatcataatactttggtctttttttttttttttcgtaaatactttcctcttttttttttttttttttttttttgagatggagtttcactctttttgcccaggctggagtgcagtggcgtgatctgggctcactgcaacctccacctcccggattcaagcgattctcctgcctcagcctcctgagtagctggggttacaggcgcccgccaccacgcctggctaatttttgtacttttagtagagacgaggtttcgccatgttggccagggtggtcttgaactcctgacttcaggtaattcaccagcctcgacctcccaaagtgccggaattacaggtgtgagcaatcgcgcccaggcttttttttcttcttcttttagagtcaattaagactgggaaagcgaaaatcctagcgctacttgggaccagcagctatcagttggtcggaggctcgaagtggtggtgcatggccgggctgtctgtgattcttaggatgggaagcttgaccttggcgggctcaccctctcatctgggtcaaggggcacattctcggtggcctgatgactgggagggagcggaagagggcggggccggggtggggccgcggcgccgggactgcgggtgctcggccggagcgctccagccgctggtccccgggagaccctgtgcccctaaatcgcggtccactgcgcgcgtcaggtgagtagagcggcggcggggagtcgcgctagcggtagtagaggctgatgttggatgttgtccccactcctctgactcttccgcaggccaggggagcactgcgcccctaatcttggaggggcttccaacctctggggtcctccggggaaac

SEQ ID NO: 35681 - DNA, 2300 bp, Homo sapien
tcctttttccagtatttttcattttataatattccatgatgcgattaaatttttatacaatcatatttcattcaactagacaacaaaaattaatttagtgcctatgctgaaccaggtatgccctcatatgctcaagtgcctgacattctagaagcttcacaagaccgaagtggagccactggagtgttttaggtgaagaaacgacacactttgactcacagtagcaggaccactgtggagagaacactcaggtggcaggtaatggaacagtgctagagccactattcaggagtgacagagtggtggggactaagggaagaggagggcctgagggatgagagggacggagggaagggctggagaagcaggaggtgaggagaaggagcagagggacagaatttgaaagcagcagaattcttagctttaaacacattgttttataaatttttaatacatccatctacagagcctagcagggtgttccttgcatttggcctttaacaccttatgtgggactgcctaaaaattaattgctttttctgctttttttcaggtttaaaaaaatactaagtgttccaataaaacatgcacaccacttagatgcggatacttcctaaaaacaggaagtgcatgagcactggtgaggggcattgtgactgcgttgaacacttgcaactttgaggtgaatgaatgtattggctcctggttgcaatatacaatcacacgttgtgctactttgtattgtcaggagatgtcctggactcccacagaaactcagggctatggaatgaaggtaattttagaatacaacaagagtcacagatacatagtctgggaaagcaaaacttaggagctctgagagttgtacaactgtaatgcatttagacacatttatatatcaaggggccaaagtaacagtttttacacataagattcctgattggtcgggcgcggtggctcatgcctgtaatcgcagcactttgggaggccgaggcgggaggatcacgaggtcaggagatcgagaccatcctggctaacacggtgaaacccgtctctacaaaaaaattagccgggcgtggtggcgggcatctgtagtctcagctactcgggaggctgaagcagaagaatggcgtgaacccgggacgcagagcttgcagtgagccgagatcgcgccactgcactccagcctgggcggcagagagagactccgtctcaaaaaaaaaaaaaaaaaaaaaaaaaaaaaaaaaaaaaaaaaggttcctgataattcaggggttaccaagattctactactcactgcagctaataaaaaaaaaaaagaaagaaagaaactggtctctgtcctatttcatatgctcaggtacaacttttccagagaagaagaggaggggggcggggaggagcaggaggaggaggaaagaaggaggagaaggagaaggagaaggagaaggagaggaagaggaagaggaagaggaagaggaagaagaagaagaagaagaagaagaagaagaagaagaagaagaagaagaagaagaagaagaagaagaagaagaagaagaagaagaagaagaagaagaagaagaaaaggaagaagaagaaactgtctctacaccttcattctcaggacaagttcattgtctggcaccaagctccttggggtgaattttcttccaaaagagtccggggagtccaggtatggaatgggaggcagaaagttcaatcaagggactgggatttcggaatgaataatgaagggagatggactgggtccatgccgaaggtttctccctggtttctcagcccccgggcgaagactcagggagacattgagacacaccctgcacaggagggggagggggagggggagggcaaagtcccagggccccaggagtggctctcaagggctcaggccccgaggcggtgtctggggttgggaggctcagtattgagaattccccatctccccagagtttctctttctctcccaacccgtgtcaggtccttcttcctggatactcataacgcggccccatttctcactcccattgggcgtcgcgtttctagagaagccaatcagtgtcgccgcagttcccaggttctaaagtcccacgcaccccgcgggactcatatttttcccagacgcggaggttggggtcatggcgccccgaagcctcctcctgctgctctcaggggccctggccctgaccgatacttgggcgggtgagtgcggggtccagagagaaacggcctctgtggggaggagtgaggggcccgcccggtgggggcgcaggactcaggga

SEQ ID NO: 35682 - DNA, 2300 bp, Homo sapien
catgaaccacactgcccaaaccttcttcattcctgccaacagtggctgccctcccccgccccccaaccccagctatgagatgctcaaggaggagcatgaggtggctgtgctgggggcgccccacaaccctgctcccccaatgtccaccatgatccatatctgcagcgagacctccgtgtctgactatgttgtctggtccctgtccaacatcctcttcatgaacccccactgcctgggattcatagcattcacctactccctgaagtctagggacaggaagatggttggagacctgactggggcccaggcctatgcctccactgccaagtacctgaacatctgagccctgattgtgtgcatcatcatgaccattctgctcaccgtcatcatcctagtgttgatcttccaagtctgtcgatagatcaggaggcatcatccaggccaggagctctgcccatgacctgtattccacatactccaacttccattcctcgtcctggccccagagctgagttctgtatcagcgctttatcctcacacactcttctacaatggcattcaataaagtgcatgtgttcctggttaaaaaaaaaaaaatgtactggtcagtggcttttagcataatcacaacatcgtgccacagttgctattatctaattgggaagattttctttttttaaaggctagtcaagtaaagcagtgggagcggagaaggaaaaaagaaatctgtaattggttgtgatcaattagttgtaaacaccactacactctgaccagcctaattgggaagatttaaggatgtgacacggtctaatgggctcagaggcagaagcgacagtaatctggaagcaggagactgcttaggcagtggcatcccggtgggacagggcaaggagattggggagcccacttttactgcaacactggaaagagggatgtcaccagaaaaatgggggtggtgacagacaggaggttgtggcagctgtggcttccatggtagagacctcacgtgtgacattcagcagatggggtgctgtgggggtcttagagcactctgactatagctgggacagtcacagtgtttaggaagcctgtacagtgatctaggctgaatcttgtgcagtgatctaggctgaaagccgagactaaagtagtggctgtgggatcaaaatagggttggaggagctttgagtacttgagaaggaaaagggggaaatcagaaggcaccacggaaagagaaacaggggaggaagagaggatgatgtcatgcgagacgtgtagagtgtccttgtagacctgtcacattggaagctactatggtctcagaggtacagatgtcctaaagcaggctggaaaagggagtctggggagagcttggtgttggagtggacactggcaagctgcctccttggccttttgatcacccaggggctgaatagagaggcagccccgggagacctcacacacttacaggaagtgaccataagaaaggggacctagctttgagtaaaagggaggagaaggagattgtaaagctgaaacgtctaagagatttgtcgtcttagcggatcagctggggcaggtgctacagaaacagaggtagctgaggtctggaaacaggtctgcaaatctggtcactggccacatagccagtaacgctgtgcgcggctgaggggagtgtgttggaagaataaccaggcctcgtctcttctgtaagtgtgtcctggaaagaacaagcgaatgacagtcagcttgatggggtggctggcgaaacggtcttggtgaggcacgctatcctaggggtgggggtgcggggatggggtggtcgcaatacagggagggcggcagggcccaggtcgtgctcatgcggttggggctgtactctcagctgctcggagccagtccccgcatttggcggcgcttccgcgcgctcccccttttctgggctccaggtcccgccagccaaagttctccaggtctcctgaccgctggaaccttccccttctgagtgtggccccgccctcccagctcgtgattggccctaagctgcgggcgccagttttcattgggtgagcggtcgctggggtggggccaggtgacaggaaatttctggtgggccttcgcggctccgctgggttggcagccgcttgagccactgcgaggaaagcaaagtctgggccatggagatgagcctagtcctgctgttcctgatccgcactgccctttttgcaccccagggagctgctgctggtaagtggggttcctggcggtcctcggcggagcggcagcggcggggcgtt

SEQ ID NO: 35683 - DNA, 2300 bp, Homo sapien
catgtgacccatccatgtttcatgtgaatcctcagtcccagtgaagcactcagatgatgcaggcctaggctgacaactggactgcaaccttgtgagaggccctgagcaagaagcactcagggaaacctctcctggattcctgaccattggaacctgcgggagatgatgaatatttgccattttgagctgctaagttttacataatttgttatgcaatagtaaataactaacacattttcacaaaagaggatgtagtattacacattaatttgcatttgctctaaatttatcattattattaatattattgttattgagacagggtctcgctctgtcgcccaggctggagtgcagtggcatgatcaccatgcactgcagtgtcgacttcctgggctcaagggaccctcttatctcagcgtcctgagtaactgggactacaggcatgaagcaccacgcctggctaattttctaaatttttttgtagagatgggggtttctccatgttgcccaggctgatcttcaacatctggagtcaacaaatctgccttcctctgccttccacggtgctagaatcacaggtgtgagccaccacacctggcctaaattaattataagacattacacatgtaacttagttttaaaaggtaaggagaatgtccatggctgaagaggatgcattttattaccattcacaatgatcactttacttgaacttcaatttccaactgtgtccaaattaaacacaaaaggaagatccaacccttgctgggctgattctttgatggcccccaacagccacctcccggtcattcactttcccccagttattcaagcaactctagtgtagatgctgctgtgaagggatttagcagatataactaagggcctcaattagttgactttaggctgggtttatcctgctttgactgtcctaataaggtgagtccttgaaaggtctgtgttctttctgagcatagagatttgcagtgtgagagggattcagcatgaggggtttcctctaccgtgggctttgaaaatgaagaggctgtgtaggaaagaacactgttaggcaccaggaattgagcacaaccctgcctattctctgtattgacagccagcaaggaacagaaacctcagtcttacaactgccagaaactgcattctgccacctctgtataagcctgaaggaggattcaaaatgaaaacacagcttttggaagcccagaacagggattctatccacatcttgcccagatttctgaccaaggaagtataagcagataaatgggtgttgttttgccagtcgtggtagtgcacgaatgaattgatgaattgatatgcacactaattacataaaataaaatatttcttaactttttcagtattttacattttataattttctgtgatgcaatttaatagactcatatttcattcattcagtcaagaaaaattaatttaatccctacaatgaaccaggtgtgccctcatatgcttacgtgcctgacattccagaagcttcacaagaccaaggtggagccagtggaatgttttaggtggagaaatgacacactctgactcacaggagcaggaccactgtgcagagaacagtcacgtagcaggtaatgggacagtgctagtgtcacaaataaggagtgacaaggtggtggggactaaggggagaggagggcctgaggcatgagaggaatggagggaagggctggagatgcaggaggtgaggaaatggagcagagggaaagaattcgaaagcagcagaactcaggtttaaacacattgttttatatattttaatacatcaatctacagagccttgcagggtgatctttgcagttggcctttaataccttatgtgggtctgcctaaaaactaatttttttatgttaatcaggtttaaaaaatactaagtgttcatataaaatatacacaacacttagaagtggatacttcctaaaaacaggcagtgcatgagcactggtgaggggcattgtgactgcattgagtgcttgccactgtgagatgaataaagtccgtactggctcctggttacaacatatagtaacacagtggctaccttgtattaggagatgtcctggactcacacagaaactcagggctatggaatgaaggtaaatttaaaatactacaagcgggagtcacagatacattgtctgggaaagtgaaacttaggagctttgtgattcctgttgtaatgcttttagacacatttatatgtcaagggaccaaagtcacatttttggccgattagattcctgatcatt

SEQ ID NO: 35684 - DNA, 2300 bp, Homo sapien
ccttccacggtgctagaatcacaggtgtgagccaccacacctggcctaaattaattataagacattacacatgtaacttagttttaaaaggtaaggagaatgtccatggctgaagaggatgcattttattaccattcacaatgatcactttacttgaacttcaatttccaactgtgtccaaattaaacacaaaaggaagatccaacccttgctgggctgattctttgatggcccccaacagccacctcccggtcattcactttcccccagttattcaagcaactctagtgtagatgctgctgtgaagggatttagcagatataactaagggcctcaattagttgactttaggctgggtttatcctgctttgactgtcctaataaggtgagtccttgaaaggtctgtgttctttctgagcatagagatttgcagtgtgagagggattcagcatgaggggtttcctctaccgtgggctttgaaaatgaagaggctgtgtaggaaagaacactgttaggcaccaggaattgagcacaaccctgcctattctctgtattgacagccagcaaggaacagaaacctcagtcttacaactgccagaaactgcattctgccacctctgtataagcctgaaggaggattcaaaatgaaaacacagcttttggaagcccagaacagggattctatccacatcttgcccagatttctgaccaaggaagtataagcagataaatgggtgttgttttgccagtcgtggtagtgcacgaatgaattgatgaattgatatgcacactaattacataaaataaaatatttcttaactttttcagtattttacattttataattttctgtgatgcaatttaatagactcatatttcattcattcagtcaagaaaaattaatttaatccctacaatgaaccaggtgtgccctcatatgcttacgtgcctgacattccagaagcttcacaagaccaaggtggagccagtggaatgttttaggtggagaaatgacacactctgactcacaggagcaggaccactgtgcagagaacagtcacgtagcaggtaatgggacagtgctagtgtcacaaataaggagtgacaaggtggtggggactaaggggagaggagggcctgaggcatgagaggaatggagggaagggctggagatgcaggaggtgaggaaatggagcagagggaaagaattcgaaagcagcagaactcaggtttaaacacattgttttatatattttaatacatcaatctacagagccttgcagggtgatctttgcagttggcctttaataccttatgtgggtctgcctaaaaactaatttttttatgttaatcaggtttaaaaaatactaagtgttcatataaaatatacacaacacttagaagtggatacttcctaaaaacaggcagtgcatgagcactggtgaggggcattgtgactgcattgagtgcttgccactgtgagatgaataaagtccgtactggctcctggttacaacatatagtaacacagtggctaccttgtattaggagatgtcctggactcacacagaaactcagggctatggaatgaaggtaaatttaaaatactacaagcgggagtcacagatacattgtctgggaaagtgaaacttaggagctttgtgattcctgttgtaatgcttttagacacatttatatgtcaagggaccaaagtcacatttttggccgattagattcctgatcattaggagttaccaagattctgctacccactgtagttaataaacaaaaagcaaactggtctctattctatctcatgcactcaggcacaacttttccagatttaaaaaacaaacaaacaacaacaacaaaaaaccctgtctctacacctccattcccagggcaagctcactctctggcaacaagctccctggggtgatttttcttctagaagagtccacggggacaggtaaggagtaggaggcagggagtccagttctgggacggggattccgtgatgcaaagtgaagagagagggacggggcccattccgagggtttctccctggtttctcagacagctcctgggccaagactcagggaaacattgagacagagcgcttggcacagaagtagcggggtcagggcgaagtcccagggcctcaggcgtggctctcaggatctcaggccccaaaggcggtgtatggattggggaggcccagcgctgggcattccccatctttgcagggtttctcttctccctctcccaacctgtgtcgggtccttcttcctgggtactca

SEQ ID NO: 35685 - DNA, 2300 bp, Homo sapien
tatacgactattttgttaattcccattgatgtatatgtgattgtttccagtttttgccataaacattggtgtacatgtctcctggacacatagccaagaatgtccccagggggtatgatcaggaggcagatggtgggattatatgatgtatggacattaatcatactagataaggctaatttgatttctcaagtgcttgtaccaagaatgggaaagagcttgtgttgctcatgtgttctgaaaacattcagttggaggcagaaattaaatgttaaaaggtactgtcttggctatagaatcaccctaggcattttttcatattccattaacaacttccttttctttacttttatattataaattacggcattatacttttagcataaagttcaaataatgcttccttttggcctaaacacttggagtttatgaaaaaaatggagggagggagaaagctctgagggaggaaaggaggaaagaaggaaggaaggacagagaaagacaaaatttaaaatgttcaaaaataggaggaaagagttggaaacagcaagtatagctaatgttattaaaatgcaagggattaaaagatatgtagataatatccatggaataatggaaacttaagaaagccttaatagttatcaagtgctgtgtcacaaactacctcaaaatttagtagcttaatagaacaaatatctgttaactcaaagagatactacacacacaagtaaaatagattctgtgggggtggcagaagttggataaagagaaggattttacaggttggaataagagttattgatatgcagatggaaataatttttagtccaagtccttcaaggagcagatgccaagatgagcttaaagtctgcgacatcttataaggggacacacccgtaagggaatatgggaagtgagccagaaatccctgagaaaaggcggcagaccacgatgcaagtgtgaccccaagtgctggacagaaggagagaaagtttgtttgacgcatcctagagcacaggcaatctaaggagagttgagcaaggccgtggaggagtcttccagctacagttagccatcagaggagtcccgtgtctcccaggaatggcttgccttaatgcctgctgtgaccagtcactggctgggaacagcccatgggaagcagggctttgcaccaatcctgctgaggatgtcagagcacaggagcacagccttgggacattacctgtgagtatcactcaatccttccttcctgagggttctgggctcttgaatatgaaaccctctcaggctgggttgctggatgattctgctcacacttacaacaggacaaggggaaccataaggtctccaagtggatctcttatttccacacacacatctcctgccctccttgtgtgatagcagccctgcctcctcctcttctcacctgcttgtatctggacacatactattcaaacatccctgggggcagccataatgtatatttccatggactctcatttaaatgtctccttgccagggtgccccctttgggaaaccaggacctcctcccctacagagcccagatattggagatgagaagtgcaaaatcaccctgaaggtgaatataagggtttagatatggagccacacctgcttctacttcttggtttttggacccacgtattcttccttctgtaaacacagcactatagagacatctttgattcaatacatgcaccacatcctgaaagatggcacccattcctcagagggtttcatccaagctggcactaagttgtgtctgtagagacctgtccatgactctgtgtggctggcagcccctgggaggtgcaggtggtgataagaccagggggtgccatggtcatggaccacgcttcatcccctttcctctgaggtgtgtcccgcgggcagataatgtactgaaattctgagccagtggctcaggaatgccaatagtgatactggctgagggtctaagagtagagaggaaaaccacaccacatctaataggtgcctatccctgtgaggatgaacctccgccccccgggccgcctcccacttgagctgggtgatctgagccgccgtgtctgcggctgtcaaggagcacaggtcctcgttcaggacgatgtaatccttgccatcgtaagcaagctggtgatacccgcggagtaggcgcccgtccgaccccacgtcgcagacagacatcctctagatgggtgtgagaccctggccccgcccccgcggccagccccgcccaccgagccccgccctcgccaggaccaacctgcggggatttt

SEQ ID NO: 35686 - DNA, 2300 bp, Homo sapien
gcatgatcaccatgcactgcagtgtcgacctcctgggctcaagggatcctctgatctcagcctcttgagtagctgggactataggcatgaattaacatgcctggctaattttctaatttttttgtagagatgggggtttcaccatgttgcccaggctgatcttgaacttctggagtcaaatctgccttcctctgccttcaacagtgctaggattgcaggcgtgagccaccacacctggtctaaattaactataagatattaaacatgtaacttagttttaaaaggaaaggagaatttccacggctgaagaggatgtattttattactattcacaatgatcactttacttgaacttcaatttccaactgtgtccaaattaaacacaaaaggaagatccagcccttcctgggctgattctatcatggctcccaacaaccagctcctggtcattcaccttcccccagttattcaaccaactctaatgtaggtgctgctgtgaagggatttagcagatataattaagggcctcaattagttgactttaggctgagtttatcctgcttggactgtcctaataaggagagtccttgaaaggactgggttcttcctgagcatagagattcacagtgtgagagggattcagcataaggggtttcctccactgtgggctttgaaaatgaaggggctgtgtaggaaaggacgctggtgggcaccatgcattgagtgcagccctccctgttctctacagtgacagccagtgaggaacagggacctcagtcttacaactgccagaaactgcattctgccacctctgtataagcctgaaggaggattcaaaatgaaaacacaggtttaggaagaccggaacagagattccatccacatcatgcccagatttctgattaagaaactataaacaacaaatgagtgttatttggccaggcgtggtagtgcacacctgtatcctaacatttgaggagctgacacaggaggaacacttgcagccaggactttgagaccagctaggataatatagtgagacactcgtctctacatttctttttaattagctgggcatggtggcacttgcctgcagtcctagctactctgaagactgaggtaggagggtcccttgagcccaggaatttgaggctgcagtgagccatgatcatgtgactgcacttcatcctggatgacagagggagactctgtctctaaaaataaatcaatgaatacaataaatgggtgctgtttaaagccaatgtttgtgacaatttgttacccagtcttataaaattcatacacagactcaaaagactcctggaatgaactgatgaattgatacgcacactagttacataaaataaaatcttttttaacttttttagtgttttacattttataattttctgtgatgcaatttaatacactcataattcattcattcagccaagaaaaaataatttagtccctacaatgaaccaggtatgccctcatatgctcaagtgcctgacattctagaagcttcacaagaatgaggtggagccactggagtgttttaggtggagaaatgacacactctgactcatagtagcaggaccactatagagagaacactcatgtagcaggtcatggaacagtgctagagccacagttcaggagtgagagggtggtggggattaaggggagaagagggcctgagggatgagagggacggagggaagggctggaggagcaggaggtgaggaaaaggagcagaggaaagaattccaaagcagcagaactcttaggtttaaacacattgttttatagattttaatacatccatctacagagcttcgctgggtgttctttgcagttggcctttaatatcttatgtgggtctgcctagaaactaattgttttttatgttaatcaggtttaaaaaatactaagtattcctaaaaaatatacactccactcacatgtggatacttcctaaaaacaggcagtgcgtgagcactagtgaggggcattgtgactgcactgaacacttacaactgtgaggtgaataaagtttgtgctggctcctggttgcaacatatagtaacatagtgtggtactttgtcttgaggagatgtcctggactcacacggaaacttagggctacggaatgaaggtaaatttaaaataaaacaagcgggagtcacagatacactgtctgggaaagtgaaacttaagagctttgtgagtcgtgttgtaatgcttttagatgcatttatataccaacaggccaaagtcacattttttaccgattagat

SEQ ID NO: 35687 - DNA, 2300 bp, Homo sapien
ccagtgaggaacagggacctcagtcttacaactgccagaaactgcattctgccacctctgtataagcctgaaggaggattcaaaatgaaaacacaggtttaggaagaccggaacagagattccatccacatcatgcccagatttctgattaagaaactataaacaacaaatgagtgttatttggccaggcgtggtagtgcacacctgtatcctaacatttgaggagctgacacaggaggaacacttgcagccaggactttgagaccagctaggataatatagtgagacactcgtctctacatttctttttaattagctgggcatggtggcacttgcctgcagtcctagctactctgaagactgaggtaggagggtcccttgagcccaggaatttgaggctgcagtgagccatgatcatgtgactgcacttcatcctggatgacagagggagactctgtctctaaaaataaatcaatgaatacaataaatgggtgctgtttaaagccaatgtttgtgacaatttgttacccagtcttataaaattcatacacagactcaaaagactcctggaatgaactgatgaattgatacgcacactagttacataaaataaaatcttttttaacttttttagtgttttacattttataattttctgtgatgcaatttaatacactcataattcattcattcagccaagaaaaaataatttagtccctacaatgaaccaggtatgccctcatatgctcaagtgcctgacattctagaagcttcacaagaatgaggtggagccactggagtgttttaggtggagaaatgacacactctgactcatagtagcaggaccactatagagagaacactcatgtagcaggtcatggaacagtgctagagccacagttcaggagtgagagggtggtggggattaaggggagaagagggcctgagggatgagagggacggagggaagggctggaggagcaggaggtgaggaaaaggagcagaggaaagaattccaaagcagcagaactcttaggtttaaacacattgttttatagattttaatacatccatctacagagcttcgctgggtgttctttgcagttggcctttaatatcttatgtgggtctgcctagaaactaattgttttttatgttaatcaggtttaaaaaatactaagtattcctaaaaaatatacactccactcacatgtggatacttcctaaaaacaggcagtgcgtgagcactagtgaggggcattgtgactgcactgaacacttacaactgtgaggtgaataaagtttgtgctggctcctggttgcaacatatagtaacatagtgtggtactttgtcttgaggagatgtcctggactcacacggaaacttagggctacggaatgaaggtaaatttaaaataaaacaagcgggagtcacagatacactgtctgggaaagtgaaacttaagagctttgtgagtcgtgttgtaatgcttttagatgcatttatataccaacaggccaaagtcacattttttaccgattagattcctgatcattcaggggttaccaaggttatgctacccactatagttaataaacaaaaagcaaactggtctctattctatctcatgcactcaggcacaacttttccagatttaagggggaaaaaaaaccctgtctttacacctacaatcccagggcgagctcactctctggcaacaagctccctggggtgatttttcttctagaagagtacaggaggacaggcaaggagtgggaggcagggagtccagttcagggacagggattccgggatgaaaagtgaagggagagggccagggaccttgccgagggtttctccctggtttctcagacagctcctgggccaagactcagggagacactgagacagaacgcttggcacaagagtagcggggtcagggcgaagtcccagggcctcaagcgtggctctcagggtctcaggccccacaggcggtgtatgggttggggaggccccgcgttggggattctctcctccttctcctaacctgtgtcgggtccttcttcctggatactcaccgggcggccccagttctcactcccattaggtgacaggtttttagagaagccaatcagcgtcgccgcggtcctggttctaaagtcctcgctcacccacccggactcattctccccagacgccaaggatggtggtcatggcgccccgaaccctcttcctgctgctctcgggggccctgaccctgaccgagacctgggcgggtgagtgcggggtcaggagggaa

SEQ ID NO: 35688 - DNA, 2300 bp, Homo sapien
atcccttcgtttcctataagggatacttttagctaatttaatatccatagaaacaatgctaatgactggtttgctgttaataaatatgtggataaatctctgttccgggctctcagctctgaaggctgtgagacccctgatttcccacttcacacctctatatttctgtgtgtgtgtctttaattcctctagcaccactgggttagggtctccctgaccgagctggtctcagcaggagactccatcctgagtcttctgatacatattcctttgtattccttcaaagatttgtgcaataaatatatatatatatatatctccccaaaacaaacctcagttagttttgctggtttttaagcttcctgtatagcaaattcctactgcatgtattttcccatgatgcacattatgtgtaggagttatctgtggtgtgggaggctgtcattcattcatttttactgctgaaggcttacatatcgttttaccacaatttcaccagtttcctattgatgtacatgtggctgattccagtttttgccataaatattagtgtgcatgtctcctgtgcacataggcaagaaagccccaaagctcccagagtggatgattaggaatgggttggttgcatgatacattgtatggactttaaccatactagataatgataatatgatttccaaagtgattgtggctacttaaacttttacaataaatgtgtaatacttgatgttgatgatgtgttctgaaaacactgagttgaaggaattgtgttaaaagtcactgtcttggtggtagaattatagcaagcatttttattctgttaataacttcctgttgtttacttgtttctcatataaaagacattatgcttttgacagatagattcagaaaatgcttacttacagcccaatcacatagggttattttatatgttaggaaaattttataataaaaaggaaaaactggaggaagggagggaaagaaggaggaatggaggaaaaagtgaaagaagaaaagaaggaaggggaaggggaaggaaagggagaaagaaggagggaaggtgataggttgaatggaaatagagaagaaagagagagagggagggctagaaggaaggagaaagggaaggaagaggccaggtgtggtggctcatgcctgtaatcccagcactttgggaggctgaggcaggcagaacatgaggtcaggagatagagaccttcctggctaacatggtgaaaccccgtctctactaaaaatacaaaaaaattagctgggcgtggtggcaggtgcctgtagtcccagctacttgggaagctgaggcaggagaatggcatgaacccaggaggcagagcttgcagtgagctgagattgagccactgcactttagcctgggcgagagagtgagactccatctcaaaaaaaaaaaaaaacaaaaaacagaaggaacaaaggagaaaagaaactaaaataaagaaaagaataggtgttaagaaactagaaaccatatgtgtggctaatattatcaaaataggagaaaataaaacagatgtagttaacttctatagaataatggaaatgtaagagggcttcattagttatccattgctttgtgacaaactacccccaaatttagtgattaaacaacaaacattgaggaactcaaaagcataatacaaataccagcaaaatggagccaatgcaggtagaagttgaataaacaaaaagattttacacattggaataagcaagaggtcactagtgggcagatgaaaatgattttatagtccaaatgctccaaaaagcaagttccatcatgggattaaagttatagcattttattaggggacacacctgtcaggcgatatggcaagggaggtaggttaccctgggaaaggcaacaagatgcaaaggtgatccccagtgatggacagaaggagagaaagtttactggatgtgccctagaccacaggcaatctaaggagagttaagcaaggccatggaggagtccttgagctacagttggctatcagaggagtccctggtctcccaggaatgtcctgctttcgtgtcactggtgtgatctgtcactggttgggaacagcccattggaagcagggcctcagcaccaatgctactgaggatgtcagagcacaggagcagggccttgggagattacccagcattactcaaaccttctgccctgatgggtctgggtccttggaaatcaagctgtctcaggctgaattgctggatgattctgttcacacttacaatgaggtaagggaaaccagaaggccccc

SEQ ID NO: 35689 - DNA, 2300 bp, Homo sapien
aggtgcggtggctcacgcctgtaatcccagcactttgggaggatgaggcgggcggatcacgaggtcaggagatcgagaccatcctggctaacacggtgaaaccctgtctctactaagaatacaaaaaaaaaaaaaaaaatagccaagcgtagtggcgggtgcctgtagtcccagctgcttgggaggctgagacaggagaatggcgtgaacccgggagccatagctggcagtaagccgagatcccgccactgcacccaagcctgggctacagagcgagactccatctcaaaaaaataaataaataaaattaaaaatgaaggggctgtgtaggaaagaatgctggtgaggaccaggaatcaagcacagccctccctgttctctacattgacagccagcaaggaacagggacctcagtcttacaactgccagaaactgcattctgccacctctgtataagcctgaaggaggattcaaaatgaaaacacagcttttggaagcccagaagagagattccatccacattttgcccagatttctgatcaaggaactataagcagataaatgggtgttgtttcgccaggcgtggtagtgcacgaatgaattgatgaattgatatgcacactagttacataaaataaaatctttctgaacttcttccgtgttttgcactttataattatctgtaatgcaatttaatacactcatatttcattcattcagtcgacaaaaattaatttagtccctacgataaaccagatatcccctcatatgctcacgtgcctgacactccagaagtttcacaagaccgaggtggagacactggagtgttttaagtggagagatgacacattctgactcccaggagcaggaccactgtgaaaagaacagtcacgtaacaggtcatgggacagtgctagtgtcacaattcacaagtgacagtgtggtggggactaaggggacaggacggcctgaaggatgagaagaatggagggaagggttggagaagcaggaggtgaagaaaaggagcagaggaaagaattcgaaagcagcagaattcttaggtttaaatacattgttttatggattttaatacatccatctacagagccctgcaggatgtccttggcagttggcctttaatactttatgtgggtctgcctaaaaactaattttttaatgttaatcaggtttaaaaattactaagtgttcctataaaatatacacaacacttagcagtggatacttcctaaaaacagacagtgcatgagcactagtgaggggcattgcgactacattgaacagttgcaactttgaggtgaataaagcctgtactgactcctggttgtaacgtacctggttgcaaagtacacagtgtgctactttgtattgaggagatatcctggactcacacagaaactcaaagctatggaatgatggcaaatttaaaatatgacaagcgggagtcacaggtacactgcaaaagtgaaacttagaagctttgtgagtcctgttgtaacgcttttgggcacatttatacatcatggggccaaagtcacattttttaccgattagattcctgatcattcaggggttaccaaggttctgctatccaatgtatttaataaacaaataaataaataaactggtctctattctgtctcatgcactcaggcacaacttttcccaataaaaaaaaaaaacaaaaaggaaaacaaaaaacagtttctacacctccattcccagagcaagctcactctctgtcaccaaactccgtgggtgagttttcttctagaagagtccaggtggacagggagtccagttcagggacggagattccgggatgaaaagtgaagggagagggacagggcccatgccgagggtttcttcctggtttctcagacagctcctgggccaagactcagggaaacactgagacagagcgcttggcacaggaggagcggggtcagggcgaagtcccagggccccaggcgtggctctcagggtctcaggccccgaaggcggtgtatggattggggatgccccgccttagggattcgccacctccgcagtttctcttcttctcacaacctgcgacgggtccttcttccttgatactcacgaagcggacacagttctcattcccactaggtgtcgggtttctagagaagccaatcggtgccgccgcggtcccggttctaaagtccccacgcacccaccgggactcagattctccccagacgccgaggatggtgctcatggcgccccgaaccctcctcctgctgctctcaggggccctggcc

SEQ ID NO: 35690 - DNA, 2300 bp, Homo sapien
acatcatgcccagatttctgactaaggtactataaacagataaatgggtgttgtttggccaggcgtggtaatgcacacctgcaatcctaacatctgaggagctgacacaggaggatcacttgcatccaggaatttgagaccagccaagatcaaacagtgagacactcatctctacaatttctttttaattagctgggcgtggtggcacttgtctgcagtcctatctattctgaagactgaggcaggaagatcccttgagcccaggagtttgaggctgcagtgagccatgatcatgtgactgcacttcaccctggatgacagagggagactctgtctctaaaaacaaataaatcaacaataattgggtgttgtttaaagtcaatgtttgtgataatttgttatgcaatcttataaaattcatacacaggctcaacagactcggaatgaattgatatgcacactagttacataaaataaaatatttcttaatttttcagtgttttacattttataactttctgtgatgcaatttaatacattcatatttcattcattcagtcaacaaaaatttagtgcctaagatgaaccaggtatgccctcatatgctcacgtgcctgacattctagaagcttcacaagaccgaggtggagccactggagtgttttaggtgaggaaatgacacactctgactcacaggagcaggaccactgtggagagaacagtcacgtagcaggtaatgggacaatgctagagccacaatttagaagtgacagggtggtggggactaaggggagaggagggcctgagggatgaaagggacagagggaagggctggagaagcaggaggttaggaaaaggagcagagggaaggaattggaaagcagtagaattcttaggtttaaacacattgttttatagatttttattacatccatctacagagcctcgctcagtgttctttgcagttggcctttaatacctaatgtaggactgcctaaaaactaatgttttttatgttaataaggtttaaaaaacacttagtgttccttctttgcagttggcctttaatactatatttgggactgcctagaaactaattttttttaattaatcaggttttaaaaatactaagtgttcctataagatatacacaccacttagacgtgaatacttcctaaaaacaggcagcacatgagcactgctgaggggcattgtgactgcattgaacacttgcaactgtgaggtgaataaagtctgtactggctcccggttgcaacatatagtaacgcagtgtgctactttatattgaggagatgtcttggactcacccagtaactcagggctgtggaatgaaggtaaatgtaaaaaacaagcgggagtcacagatacattgtctgcgaaagtcaaacttagtagctttgtgagtcctgttgtaatgctttcagacacatttatgtatcaaggggccaaagttacatttttttaccgattagatacctgatcatttaggggttgccaagattctgctacccactgtagttaataaacaaagagaaaacttgtctctatgctgtctcatgtactcaggcacaacttttccggatttaaagaaaaaaaaaacaaaaacctgtctctacgcctccattcccagggcgagctccctctctggcatcgagctccctctctggcggcgagctccctctctggcggcgagctccctctctgtcaccaagctccctggggtgagtttttttctagaagagttcagggaaataggtaaggagtgggaggcagggagtccagttctgggacggggattccgggatgaaaaatgaagagggacggggcccatgacgagggtttctccctggtttctcagacagctcttgggccaagactcagggagacattgagacagagcgcttggcacaggaggagcggggtcagggcgaagtcctatggccccaggcgtggctctcagggtttcaggccccgaaggcgatgtattgattggggaggcccagggttggggattccccatctccgcagtttctcttctccctctcccaacttatgtagggtccttcttcctggacactcaggatgtggactcagttctcacccccatttggtgtcgggtttctagcgaagccaatcggcgtcgctggggtccctgttccagaagtccccgcgaacccattgggactcagattctccccagacgccgaggatggggtcatggcgtcccgaaccctcctcctgctgctcttgggggccctggccctgaccgagacctgggc

SEQ ID NO: 35691 - DNA, 2300 bp, Homo sapien
agagggaaggaattggaaagcagtagaattcttaggtttaaacacattgttttatagatttttattacatccatctacagagcctcgctcagtgttctttgcagttggcctttaatacctaatgtaggactgcctaaaaactaatgttttttatgttaataaggtttaaaaaacacttagtgttccttctttgcagttggcctttaatactatatttgggactgcctagaaactaattttttttaattaatcaggttttaaaaatactaagtgttcctataagatatacacaccacttagacgtgaatacttcctaaaaacaggcagcacatgagcactgctgaggggcattgtgactgcattgaacacttgcaactgtgaggtgaataaagtctgtactggctcccggttgcaacatatagtaacgcagtgtgctactttatattgaggagatgtcttggactcacccagtaactcagggctgtggaatgaaggtaaatgtaaaaaacaagcgggagtcacagatacattgtctgcgaaagtcaaacttagtagctttgtgagtcctgttgtaatgctttcagacacatttatgtatcaaggggccaaagttacatttttttaccgattagatacctgatcatttaggggttgccaagattctgctacccactgtagttaataaacaaagagaaaacttgtctctatgctgtctcatgtactcaggcacaacttttccggatttaaagaaaaaaaaaacaaaaacctgtctctacgcctccattcccagggcgagctccctctctggcatcgagctccctctctggcggcgagctccctctctggcggcgagctccctctctgtcaccaagctccctggggtgagtttttttctagaagagttcagggaaataggtaaggagtgggaggcagggagtccagttctgggacggggattccgggatgaaaaatgaagagggacggggcccatgacgagggtttctccctggtttctcagacagctcttgggccaagactcagggagacattgagacagagcgcttggcacaggaggagcggggtcagggcgaagtcctatggccccaggcgtggctctcagggtttcaggccccgaaggcgatgtattgattggggaggcccagggttggggattccccatctccgcagtttctcttctccctctcccaacttatgtagggtccttcttcctggacactcaggatgtggactcagttctcacccccatttggtgtcgggtttctagcgaagccaatcggcgtcgctggggtccctgttccagaagtccccgcgaacccattgggactcagattctccccagacgccgaggatggggtcatggcgtcccgaaccctcctcctgctgctcttgggggccctggccctgaccgagacctgggcgggtgagtgcgggatccggagggaaatggcctctgcggggaggaggtaggggcccgcgcactggggcgcaggacccggggagcagcgcaaggaggagggtcggacgggtctcagcccctcctcgcccccaggtacccactccataaggtatttcagcaccgccgtgtcccggccgggtcgcggggagccccggtacatcgcagtgggctacgtggacgacacgcagttcgtgcggttcgacagcgacgcggcgactccgaggatgtagccgcagtcgccgtggttggagcaggagggaccggagtattgggaccggagcacacggaacatcaggcccgcgcacagactgacaagagtgaacctgcccatgccgcgccgctactaccaccagagctaggccggtgaatgaccccggcctggggcgaaggtcacgacccctcctcatcccccacggacgtcccgggtcccccccgcgagtctccggctccaagatccaccccgaggctgcgggacccgccagatcctcgacccgggagaggcccaggcgcctttaccaggtttcattttccgtttaggccaaaatccccgcgggttggtcggggcgggggcggggctcggtgggcggggctgaccgcgggggcggggccagggtctaacaccctccagataatgtatggctgcgacttggggctggaagggcgcctcctccgcgggtatgaacagcacgccaacgatggcaaggattacatagcccggaactaggacctgcgctcctggaccgcggcggacatggcggctcagatcaccaagcgcaagtgggaggcagaagaatttgcagagcagatcagggcctacctggag

SEQ ID NO: 35692 - DNA, 2300 bp, Homo sapien
tcgagacaatcctggctaacaaggtgaaaccctgtctctactaagaaaaaaaaaattagagcatagtggtgggcgcctgtagtcccagctacttgggactgagacaggagaatggtgtgaacccaggaggcggagcttgtagtgagcagagatcattgggccactgtaccccagcctgggctacagagccagactccgtctcaaaaaaaaaaaaaaaaagaaaaattaaggggctgtgtaggaaagaacgctggtgagcaccgggaattgagcccctcccagttctctacattgacagctagccaggaacagggacctcagtcttacaactgcaagaaactgcattctgccacctctgtataaacccgaaggaggattcaaaatgaaaacacagcttttggaagcccagaatggagattctatccacatcttgcccagatttctgaccaaggaactataagcagataaatgtgtgttgttttgccaggcatggtagtgtgcgaatgaattgatgaattgatatacacactagttgcataaaataaaatctttctgaactttttcagtgttttacagtttataattatctgtgatgcaatttaatacactcatatttcattcattaagtcaacaaaaattaacttagtccctacaatgaacgaggtatcccctcatatgctcaagtgcctgacactccagaagcttcacaagaccgaggtggagacactggagtgttttaagtggagaaatgacacactccgactcacaggagcagggccactgtgaaaagaacagttacgtagcaggtcatgggacagtgctagtgtcacaattcatgagtgacagtgtggtgggaactaaggggagaggagggcctgaaggatgagaaggatggagggaagggctggagaagcaggaggtgaggaaaaggagcagaggaaagaatttgaaagcagcagaattcttaggtttaaagacattgttttatggattttaatacatcaatctacagagcctaggagggtgtccttggcagttgtcttttaatacctcatgtgggtctgcctaaaaactattttttatgttaatcaggtttaaaaattactaagtgttcctataaaatatacacaacacttagaagtggatacttcctaaaaacaggcagtgcatgagcactagtgaggggcattgtgactgccttgaacagttgcaactttgaggtgaataaagcctgtaatggcttctggttgcaacatataggaacacagtggctactttgtattgaggagatgtcgtggactcacacagaaactcagagctaaggaatgatggcaaatttaaagtaagacaagcaggagtcacagatacattgtctgggaaagtgcaacttagtagctttgtgagtcctgttgtaatgcttttggacacatttatacattaaggggccaaagtcacattttttacctattagattcctgatcattcaggggttaccaagattctgctacccactgtagttaataaacaaagagcaaattggtctctattctgtctcatgcactcaggcacaacttttccggattaaaaacaaaaacaacaacaacaaaaatctacacctccattcccagatcaagcttactctctggcaccaaactccatggggtgatttttcttctagaagagtccaggtggacaggtaaggagtgggagtcagggagtccagttcagggacagagataatgggatgaaaagtgaaaggagagggacggggcccatgccgagggtttctcccttgtttctcagacagctcctgggccaagactcagggagacattgagacagagcgcttcgcacaggagcagaggggtcagggcgaagtcccagggccccaggcgtggctctcagagtctcaggccccgaaggcggtgtatggattggggagtcccagccttggggattccccaactccgcagtttcttttctccctctcccaacctacgtagggtccttcatcctggatactcacgacgcggacccagttctcactcccattgggtgtcgggtttccagagaagccaatcagtgtcgtcgcggtcgctgttctaaagcccgcacgcacccaccgggactcagattctccccagacgccgaggatggccgtcatggcgccccgaaccctcctcctgctactctcgggggccctggccctgacccagacctgggcgggtgagtgcggggtcgggagggaaaccgcctctgcggggagaagcaaggggccctcctggcgggggcgcaggacc

SEQ ID NO: 35693 - DNA, 2300 bp, Homo sapien
aaacaaagtcagggttcttcaagtcacaaagggaagggcaggaacaactcttgcctctcagtcccacacaaggcagctgtctcacactatagaaaaaaatattcatgaacaaattcatatccatcacagtgaggggtcacaccttaaacagcccatcgcatgctcaatacatccaatgcaaagaaaccccatagcacagctgtgtccactgttccgcccaacacccaacacacattaggtcctccaagctctcacctttacaagctgtgagggacacatcagagccctgggcactgtcactgcctggggtagaacaaaaacagaacctggtcagatcccacagaagatgtggctagaggaggaattgtgaggtgggtgggctcccccatgggctcccaaacacaatatcccaaggacctcaggcatcagcctccttcatacttacttgcagcctgagtgtaactccctccttttctatctgtgagaagaaaatgtcctgtgagataccagaaaggagccagggccttaaggtcctagaggaacctcctagtcttggaccccagagaagtttccagaaatgtgtgactgcagacccagggcgggatcaggaaacatgaagaaagcaggtgtgggtcctggaccaatagccctcctgaggtctgtcctcagggaccttcccctgtgacttgtgactgctgggatcaggtcccatcaccgccgtaatcaaggtgataaatctgtccttcattttaacaggtgctttacaaaagagtaagtgctggcacacagggcccagactgggtaggcccatgattgtggacggtgcttcccagtaatgagacagggcacatttctagctggggcttggaaccctcagtgagacaagaaatctcagaccccacccttcaccccttctccacctgagctcttcctcctccacatcacggcagcgaccacagctccagtgatcacagctccaaggagaaccaggccagcaatgatgcccacgatggggatggtgggctgggaagacagctctgggaaaagaggggaaggtgaggggccctgaccctgctaaaggtctccagagaggctcctgctttccctaagagacatgacacccccatctccctccttaccccatctcagggtgaggggcttgggcagaccctcatgctgcacatggcaggtgtatctctgctcctctccagaaggcaccaccacagccgcccacttctggaaggttccatcccctgcaggcctggtctccacgagctccgtgtcctgggtctggtcctccccatcccgctgccaggtcagtgtgatctccgcagggtagaagcccagggcccagcacctcagggtggcctcatggtcagagatggggtggtgggtcatatgtgtcttgggggggtctgacgggaagagtcagaaaattcaggcattttgcatctgtcatgggacactccaccagcacgcatgtggccatcttgagaatggacaggacacccgggatggggaagagagcacagaacccagacaccagcctggacacaggcacctgggataatcttctattccctgagaagggaacagcgacttctggtcctgacctgagtggaggctgagggactcagaagtgctggactcagacccccacacacattgagtgtgaagcagagaacaaggcctgagaggaaaagtcacgggcccaaggctgctgccggtgtcaaagggaaccactcatcagtattcgagggatcgtcttcccgtcactccttcagagattttatcccttaattgtgtcagagagcagggcggaacctcagagtcactctctggtacaggatctggaacccaggaggattcctctccctcaggaccagagggagggtgatattctagtgttggtcccaattgtctcccctccttgtgggaggccagcccgggagatctacaggcgatcagggaggcgccccgtggcccctggtacccgtgcgctgcagcgtctccttcccgttctccaggtatctgcggagccactccacgcacgtgccatccaggtaggctctcaactgctccgcctcatgggccgcctcccacttgcgcttggtgatctgagccgccatgtccgccgcggtccaagagcgcaggtcctcgttcagggcgatgtaatccttgccgtcgtaggcgtcctgccggtacccgcggaggaagcgcccgtccgaccccacgtcgcagccatacattatctggatggtgtgagaacctggccccgaccccgcggtcagcccagtccc

SEQ ID NO: 35694 - DNA, 2300 bp, Homo sapien
tcccgatttaataaatggtgttgggaaaactggctagccatatgcagaaaactgaaactggaccccctccttacaccttatacaaaaatcaactcaagatggattaaagacttaaacataagacctaaaactgtaaaaaccctagaagaaaacctaggcaataccattcaggacataggcatgggcgaagacttcatgactaaaacacaaaaagcaatggcaacgaaagccagaattgactaatgggatctaattaaactcaagagcttctgcacagcaaaagaaactatcatcagagtgaacaggccacctatggaatgggagaaaatttttgcaatctgtccatctgacaaagggctaatatccagaatctacaaagaacttaatttacatgaaaaaaacaaacaactccatcaaaaagtgggcgacggatatgaaaagacacttctcaaaagaagacatttatgtagtcaacaaacatatgaaaaaaggcccatagtcacttatcattagagaaatgcaaatcaaaaccacaatgagataccatctcacaccaattagaatggcgatcattaaaaagtcaggaaacaacagatgctggagaggatgtggagaaataggaacgcttttacactgttggtcggagtgtaaattagttcaaccatcgtggaagataatgtggcaattcctcaaggatctagaaccagaaataccatttgacccagcaatcccacaatcccactactggatatatacccaaaggattataaacattttactataaagatacatacacacatatgtttattgcggcactgttcacaatagcaaagacttggaaccaatccaaatgcccatcaatgatagactgaataaagaaaatgtggcacatatacaccatggaatactatgcagccataaaaaggatgagttcatgtcctttgcagggacatggatgaagctggaaaccatcattctcaggaaaccatcagctacgtgttctctgggtctctcagagaaagacccacaagaacagaaaaccaaacactgcatgttctcactcaaatgggagttgaacaatgagaacacatggacacagggaggggaacatcacacactggggcctgtctgagggtagggggctaggggagggatagcattaggagaaatacctaatgtagatgatgagttgatgggtgcagcaaaccaccatggcacatgtatacctatgtaacaaacctgcatgttctgcacgtgtatcccagagtttaaagtataataatgataataataataaattggatttgtaagtgtgcctttaacaagtactgaggttaggaattttaaaaaggaaatgaggccactctcggaagatcccctcagtttagcagaacagctagatcaatttttagaaccaaatttttatacttgggctgagataattcaatcatgaatattctgtttactgggaaaaagacgggaataattagaagggcagccataatcatttgggagagacagcagcatcctcctgggtaaggagtcctgccagctaagcagaaattcccaaatgcagatcctggatgggataataatgaccccagggatcgggtccaaatgcaagaccatagggagctaataattagagggattatgcagtccactcataggacacaaaacgtccccaaagcattcaagatccaacaacaagaagaggagactccctctgcatttctgcagaggctcagggatcaagtgaaaaaatattcaggattaaatccagaggacccagtagggcaaggccttttaaaggttaattttgtaactaaaagctgatgtaatattactaagaaactgcaaaagattaacggatggaataaaaaaccaattaaggaaatactgagggaagctcagaaagtttgtgtgtgtgtgtgagagaaagagagagagagagagttaagctgctatacctgaaggaagagagagccagcggcacagctgtgtgtggcagctggcttctaaaagctgttgataaaggttactgctgagtcatttccgcagagctgcctgtttttgcagacagacaaggggagccagggcacagcacggctcggctcatgcccagagaaagaggaagaagctgagtgtgagacagaaaggaaatgggatggcagagagagaatagaagaggaaaattagcaagagagactaaaagagacagagatcaaagagaaacacagaaggtaaaactggggagacaaataatgtaaaaggaaaaaagagtacaagacaaagtgaga

SEQ ID NO: 35695 - DNA, 2300 bp, Homo sapien
atgaagttggactcctgacttacaccacatatacaagttaactctaaataaatcaaagacctacactcaggaactaaaactgaaaaattcttagaatgaaacattgggaataatcttcatgacataggttttgacaacacttttatggatataacaccaaagcacagacaacaaagaaaaaattgataagttggacccatcaaaataaaaaaaattgagcattaaaaaacacaatctgcagagtgaaaaagcaaccattagaatggaagaaaatatttgcaaatcatttatctaataaaagattaatatccagaatacataaagaattcctgtaacacaaacataagactcaaaaaaactatgtaggcaaagaatttgaatagccaattctccgaagaagacatacaaatggccaatagacacatgaaaagatgctcaacatctgtagttattagggaaatgcaaatcaaaactgcaatgggctactacttcacaccaattaggatggctataatcaaatacacacacacacacacacgcacacacagagagagagagagagagagagagagaaagcaagtttggcaaagaggtagagaaactggaacatttgtgtagtacattgggaaagacaaagtggggcacctgctatggaaatcagtgtgttgcttcctccaaaaactaaaaaattaattactatgtaatccagaaattctacatctgggtatttacccaaaagaaatgaaagcaggaacattaaaaagatatttgaacactcatgttcatagcagcataattcccaataaccaaattcatagagacagaaagtagaaccagtggttccaggggccagggggaaggaggaatggggagctactgtttagtaggcacagagtttcaggatgcacaaaaatgtgaatgtacttaatgccactgaactgtacacttttaaatggtgaaaatagtgaactttatatgtatattttacaacaattaaacaacaaaaaagaaattgtcaccgcgtaccaaacaataatatagaattagaaagaggctggggtcctggtcagagagaaaaaaaccaaggcctgaggaagggccttcagagaggagtggtgctgaaggcggagcagtcacactccaaaagagggctcaggttagaaaaccctcacaggaggaaggtggtgctgggagaaggcccagaggaggggatgaccacagcccactatgtggtaagtgaagattttggatatgaagtctaggaactgacagcccaccggggtcaaggaaccgaaagaggatgagggtcaaggagccgttggactagagcctgttttgggtctgggtgggggtgaggagatgggcagggcaaggactaaagggtggcatgagaaggaagtgggggtgaccctgggagaacttggggtaaagtgagaacaggaagggaggggttgtctgggggagggtggggtttggggaaggtgagaacttgctgagggccgaaggcagctggtcaagaggtgggaacagcataaggtcccaaggcagagaggggcagagggaccagggagggatggtccagcacctgagggtttcagggtggggtcctcaagagggtgaggctgaggatgaaggagtggggaacgggtcacctgaggcagggcccagagcaggcatctgcactggaggggagggggcatctgcgctgccctgcgccctgcctaaggcccaactttcattagcaccagggctccccttaagtggcctggaggggagtgggatggagggaagactcccccgacaaaaggcagcaccagaaagttagggtcagggacagctgggaatggagaggcataggggcagcactgggtgaaggctgcttgtaggaaaggcccataagggaggcaggagggacgggagcaggggatgagggcagaggacaccctacaaatggatcagagaactgcagatagaaaggggtagcagggagcagggagggcaacaggacccagggggccatgagaaaggaagctgaggaagtaggagggaacttggtgtccttagatcattggagtccacagtagctgggagggttgacagagaggaaagaaccctgggaacgggaggcgaagggataatgagctggggatgggagcagtcgcaggaagaatcctctgcctggagccggcaggctccaacccctcagcttgagagtcaggagccccatagtccccacagcaataggaagcaccagctcctggtcccgaaaaaaggagggccccaactccagggactgcggc

SEQ ID NO: 35696 - DNA, 2300 bp, Homo sapien
aaacagataaatgggtgttttttggccaggcgtggtggtgcactcctgtaatcctaacatttgaggagctgacacaggaggatcacttgcagccaggagtgtgagaccagcccaggtaatacagtgagacactcgtctctacacttttttttttaattagctgggtgtggtggcacttgtctgcagtcctgtctactctgaagactgaggcaggaggattccttgagcccaggagtttgaggctgcagtgagccatgatcatgtgactgcacttcacgctggatgacagtttttagagactctgtctctaaaaacaaataaatgaatacaataaataaaaacaaataaataaatacaataaatgggtgttgtttaaagccaatgtttgtgataattttttacacagtcttataaaattcatacacaggctcaacagactaatggaatgaactgatgaattgatatatacactagttacataaaataaaatctttctgaactttttcagtgttttgcattttataattatctgtgatgcaatttaatatactcatatttcattcattcagtcaacaaaaattaatttagtccctacaatgaaccaggtatcccctcatatgctcacgtgcctgacattctagaagcttcacaagaccaaggtggagccactggagtgttttaggtggagaaatgacacactttgactcacattagcaggaccactgtggagagaacagtcacgtagcaggtaacgggagagtgccagtgtcacaattcaggagtgacagtgtgatggggactaaggggagaggaggggctgagtgataagagggacggagggaagggctggagaagcagtaggtgaggaaaaggagtagagggatagaattcaaaagcagcacaactcttaggtttgaacactttttttaatggtatttcaatagatccatctacagagcctcgcagggtgttacttgcagttggcctttaataccttaagtgggtctgcttaaaaactaattgtttttatgttaatcaggttttaaaaatactaagtgttcctaagaaatatacacaccacttagatgtggatacttcctaaaaacaggcagtgcatgagcactggtgatggacattgtgactgcatcgagcgcttgcaactttgaggtgaatgaagtctgtactgactcctggttgcaacacataggaacacagtggctactttgtattgaggagatgtcctggactcacagaaactcagggctatggaataaaggtaaatttaaaacaccacaagcgggagtcacagataccttgtttgcaaaagtgaaacttaggagctttgtgagtcctgttgtaatgcttttagacactttatatatcaaggggccaaagtcacatgtttttaccgattagattcctgatcattcaggggttaccaagattctgctacccactgtagttaatacacaaaaagcaaactggtctctatactatctcatgcacccaggcacaacttttccagatttaaagaaaaagaaaaaagaaataaaagaaaaaaacctctgtctctacacctccattcccagggagagctccctctctggcaccaagctccctggggtgagttttctttttgaagagtccaggggaacaggtaagcagcggggaagcagggagtccatttcagggacaggaattcccggatgaaaagtgaaaggagagggacggggcccaagctgagggtttcttcctggtttctcggacagctcctggaccaagactcagggaacattgagacagagcgtttgtcacaggaggagcggggtcagggcgaagtcccagagccccaggcatggctctcagggtctcaggccccgaaggcggtgcatgggctggggaggtgcagcattggggattccccatctccgcagagtttctcttctccctctcccagcctgcgacgggtccttcttcctggacactcacgacgcggacccagttctcactcccactgagtgtcgggtttctagggaagccaatcagcgtcgcgcggccccggttctaaagtccccacgcacccaccgggactcggagtctccccagacgccgacgatggggtcatggcgccccgaaccctcctcctgctgctctcggggaccctggccctggccgagacctgggcgggtgagtgcggggtcaggagggaaacggcctctgccgtgaggagcgaaaggtccacctggctggggcgcaggacccggggagccgcgccgggaggagggtcgggcgggtctcag

SEQ ID NO: 35697 - DNA, 2300 bp, Homo sapien
acaaatgcaagtcaactaaaaaagttaagctaattttcaagtgcagaactatctatctgtatctgatacaaatgggaatattcactgaaccctggagagaacgagcatttgaaaaaaaaaagggttcacttaagagatatgattttatcataacagcattgaaactttaatctcttatttttcctatttgacttcttaaaaagggtggcattgccaagaattttctttgatatggtttcacaattgtattcaccttctctccattctgagacttatccataagaatactcactttaatccgacttctactgcatggttggaaaagaagatacgcaataactctttcaaactcctttatctcttttactctctcatgcttctcatatgtaagtagctggctctggcttcttctcaagattctctccttgagtctttgttctgcaagttctctccctcgaatcatgcgttcctggtgatccttagtctgcatctgttccctctcatttacctgctttcttctctgtgcgttctggatgccatgcccttctggcataatttttggtaattttgtttcattggggggttgtagtacttgtctaaatggtttgttcttaaattctccagcctttcctgtttgatgtatgtgcctttctatgtgtttcatctctctctcaggtaccaaacagtactgttttagtccttctacgctctgggttgttttctcctccatttttttctagatttcattgcctgtctcttctttcatcatttccactattattttattataataagactctgctttggcaagccagtagtcaagagaaacagcttgctccctacagagtatttcacactcctcctgatatttctgcattatcaactgtcttgctgctgttgtatgcacaccacctagattctgtcaaagtgaagtcagaaatttataatgtgatcatctttttcctttgaacacatttaaacaggagccaagcccaccctccctaatgacaccaggaaaagctacatgctctttactttagcttagttgttattttattcccatcactcccaggtgagcctgggagctctgaaagtattaagtactcaccaccacaaatcagtaactaggtttaaaaatgtatggtgttggaagtttccaaaaatgatactttgttttgcaactgtggatatagctgggtaacatttgccagtgtagacatactacctgaatgtgtcacttgggcagaaggattttaaacctaagattccttctctgtgtagttccaaactgtatgatgtgaagataatttacttaccaagatctttttttccagtggagactgctgacctgcagcaatcctaggatctttagatgatgtaccccaggccaatctggaagataaaaaaggcaaggtagattcaaatgtaggaggtgtcagaacaaatctgctaatagggaggactacagcagggccatttcccccatgggaaaccactgcattcctatggtagaaaataatgaatgctcttttaataagaggatctttcctttcatatgaacaagcatacttttcctgtggactcagcgtgaaccactgtgaatctcgtattggggattgtgagtgggaagagacatgctccttggtgaggtgttgtccaagtacatctatgtcagtctgctcagtcctcaagcctcctttgtgttctgagacgattgtaggttctagttttctagacgattctaggtttctagttttctcttcctgcagtttcttgatccgggccctctctgactctatcagcacatacagcatttctgccctctaatcttttgttctgaaattctgttatttgactgctcagccctctgcttgcctgactaacaatgccaatcatccttcactctaaatccattatgagactattccctgttgaacccctcaggatggcaatttgtggttactctgggtttatttatagaggaggctgatggcaacacaaatgaaaactatcatcttttatgtgtcatccctggtctagcctgagtttactgtgatgtcgtatttaagccactgaggatgcctggcatttcctctgtatgtcttttataccatttagagttcaaaggatggtctttacagtctgacagagctagatctgaaatctaattctaccacttcctaggtgtgtgactcagggcaagtaacttctgtcagctttctcatctataaaatggagatgtaagacaaaaatctgcctctcagggttataaagaacaaatatgaattagatgtaaagag

SEQ ID NO: 35698 - DNA, 2300 bp, Homo sapien
agcgttccttgggtcccgctggcgagcgtgggctttctgcagctcgcaaccggcctcgtgctttgcggacggttcactgcgcttggaaaggggtgagtcggctttttgagggacagcaagtggtgagagtgaaggcccgaggaatgcttagtcccacgggacgaaaggaagcagggatgaagtggtacacttgagaaggggttcaggactttggaggtggtggaacagaggagcttggggcttcctctccttcgactcctgccagataagtgaggctagcagtagtcaagaaagctcattaagtaggatttcataagacttaggtcgagtttggcttttagttgtgcctgccgcctatcgaactcttaattcattatgtcatccgttaagtggacagctgacatttccctgatcttttataaaacatgagaataagtatctttgggaaatctttctattttcattaatctgtaacttatattccaagtagaaactttccctgaaggggcagcttgtagttgtttactagtttcctgctagccctcccaccaccatccactctgatagctgtgctaagttcattcatataaaagttctggagccatcactgttttctcctatgaaggacacaagctgtagtcttttcgctgggagaggctcccatctgcctttctctgtaataatggagagaacgccatagtgaaagggttaaaactcagcaaactgctgaagagtgacaagccctatcatttaactgtgaaattgcttgttattctgtcttacaaagggagacgtgttgttgagctgattgtcgtagacagtttttattctcacttatctgtgtgtctcctttgaaaatggaacttgaaattctaccctcctcagttttctgtttttaatttgaaaaacagccaacatcccctgtgaattgcagtaaaggaacaaagcattaaaaggcatatccttttcccaacaaaagctcacagtctaatcagtaaagatttattgagcaactatgccaggttttgagctgaggctgagcctgcaaagttgaaatctgtgttctctgacctcaaggaacatgaatgaataattagaatataataaaactgtgctagtaggtacaaaatgtgagagcccagaacatgcatataaaggaaacatatctgtaaacttcaaggaagactgggaaatggcttaataaaaatagatacaatgttatggcagatatttaaaaaagatgctcagatattatgtgtcaaggatcatcagcaatcagcaaatcattaattttgagaacttgggatcacagactctaatgttaagtattgtgctagaagccatgtacagagaagtaaaagtaagatgatcatacgtttacaatctcaaaataagcttacgtagacaaataagaatgttcctaagaggtcagtgagaccaaatatttgatatcagatcctttccaacaatatagaggcatcatatttgtagatataaattacagttttcattccttatgagcctaaatttcagcatcaaaatgttaaaagtgatatgtgaatacagatatcacagtgtaaaccacgattaattttcaaatgagttgtagaattaaaatatgtcaagtatttagaggaagggaagatcactgacagagtagactggaaagactttataatcaggagcttgacctgtgaaggacagatagatagaatttattgagaacttaccaagctctttacatctaattcatatttgttctttataaccctgagaggcagatttttgtcttacatctccattttatagatgagaaagctgacagaagttacttgccctgagtcacacacctaggaagtggtagaattagatttcagatctagctctgtcagactgtaaagaccatcctttgaactctaaatggtataaaagacatacagaggaaatgccaggcatcctcagtggcttaaatacgacatcacagtaaactcaggctagaccagggatgacacataaaagatgatagttttcatttgtgttgccatcagcctcctctataaataaacccagagtaaccacaaattgccatcctgaggggttcaacagggaatagtctcataatggatttagagtgaaggatgattggcattgttagtcaggcaagcagagggctgagcagtcaaataacagaatttcagaacaaaagattagagggcagaaatgctgtatgtgctgatagagtcagagagggcccggatcaagaaactgcaggaagagaaaactagaaacctagaatcgtc

SEQ ID NO: 35699 - DNA, 2300 bp, Homo sapien
aaagtctttccagtctactctgtcagtgatcttcccttcctctaaatacttgacatattttaattctacaactcatttgaaaattaatcgtggtttacactgtgatatctgtattcacatatcacttttaacattttgatgctgaaatttaggctcataaggaatgaaaactgtaatttatatctacaaatatgatgcctctatattgttggaaaggatctgatatcaaatatttggtctcactgacctcttaggaacattcttatttgtctacgtaagcttattttgagattgtaaacgtatgatcatcttacttttacttctctgtacatggcttctagcacaatacttaacattagagtctgtgatcccaagttctcaaaattaatgatttgctgattgctgatgatccttgacacataatatctgagcatcttttttaaatatctgccataacattgtatctatttttattaagccatttcccagtcttccttgaagtttacagatatgtttcctttatatgcatgttctgggctctcacattttgtacctactagcacagttttattatattctaattattcattcatgttccttgaggtcagagaacacagatttcaactttgcaggctcagcctcagctcaaaacctggcatagttgctcaataaatctttactgattagactgtgagcttttgttgggaaaaggatatgccttttaatgctttgttcctttactgcaattcacaggggatgttggctgtttttcaaattaaaaacagaaaactgaggagggtagaatttcaagttccattttcaaaggagacacacagataagtgagaataaaaactgtctacgacaatcagctcaacaacacgtctccctttgtaagacagaataacaagcaatttcacagttaaatgatagggcttgtcactcttcagcagtttgctgagttttaaccctttcactatggcgttctctccattattacagagaaaggcagatgggagcctctcccagcgaaaagactacagcttgtgtccttcataggagaaaacagtgatggctccagaacttttatatgaatgaacttagcacagctatcagagtggatggtggtgggagggctagcaggaaactagtaaacaactacaagctgccccttcagggaaagtttctacttggaatataagttacagattaatgaaaatagaaagatttcccaaagatacttattctcatgttttataaaagatcagggaaatgtcagctgtccacttaacggatgacataatgaattaagagttcgataggcggcaggcacaactaaaagccaaactcgacctaagtcttatgaaatcctacttaatgagctttcttgactactgctagcctcacttatctggcaggagtcgaaggagaggaagccccaagctcctctgttccaccacctccaaagtcctgaaccccttctcaagtgtaccacttcatccctgcttcctttcgtcccgtgggactaagcattcctcgggccttcactctcaccacttgctgtccctcaaaaagccgactcacccctttccaagcgcagtgaaccgtccgcaaagcacgaggccggttgcgagctgcagaaagcccacgctcgccagcgggacccaaggaacgctagaactatacgtcccagaacacttagctttgtttttaactacggtgcagccgcaaaagggaaataccggctcaggacccaggggagttgtagttctctaatccaaagaaatcattatttggcaacgtacggttttcagggggatataccccgcgactgcgttcctgtaggatgtgagacaaagagaataaatatcccaggattgggtgctggtgggaaaatttgctggaagcgcagcattggttaccaattttgtgctcaacctctcagtaccagggtgaaagtggagacgcaatctcccttggaagacgttagtctccatctctaacgctcccgagacacggttcgcaattaattatgacgtcacagccaatcgtcaacgcgaaagcctgacgctctagccggctctatctcgctgccccgccgcgggcgcagagctggcgctctagcccacggagttggttaactcctctcaccggcccctggaaagggttccaagtcctttagtacccgacgctgtctgggaattccgggcgtttcggctccttggtcgcagaggcaggaggcgtgcgtggcaggagggttcgggttatatactcctaggtcctgggacagaatagttacgac

SEQ ID NO: 35700 - DNA, 2300 bp, Homo sapien
acacaaatgctgagaatacagcactcgcccaaggcctcaaagaattcctacagttcaagttctaaaaaactcgaatttatagtcaaaaatcacaaaacaaagaaaaaaagcactatgagagagacagcagaaacaaaagacagcagcatcagacacacaaaatccgcagatatcagaattataagacatagaatataataaccatatttaatattttaaatatatatttaaagaataataaaaggaacaatttaaaatatgattaaagaactgataattatttaaaaattaaggagatttgaaaagtaattaaatagaactcaaaataataacaatagtaaaaaataataatacttgaaataaactgaagacagaattagtgacatggaagagggacctgaagaaattactcagaaggtggcataaagagaacagcaattgaaaatatgaaaagaaggtgagagaaatggaggacagaagagagaaacctctttctagtaactaattcgaggtccagaatgtgaggactgagaacatgggggaaagagaatattaaaagagatgatggctgataattttccaaggttgatgaaaaaaaagtccactctcagtttcagaaagtccaacaaatcccaaacagaataaaagaaaatcgtattttgatatactatagtgactgcagaacaccaaagacaaaaatgaggtcttaaaagcattcagaaagcccatgttctctaagtcatgtgtgactaattctctccaaagaaagctaccttgactgcggttgaagactgcagtataagatgctgaccactaaacaatacctgcttcttatgttgttttttttttcttcatttccttttaaatatcctaaaagtaggtcaggcggggtggctcatgcctgtaatcccagcactttgggatgctgaggtgggtggatcacttgagctcagaagttcaagaccagcctgggaaacatagagaaaccccatctctactaaaaatacaaaaaaaaaaaaaaaaaaaaaaaaaaaaagccaggcgtggtggcatgtgtctgtggtcccagctactttggaggctgaggtgggaggattacctgagcccaggaggcggaggttgcagtgagccaagattgcctcgctgcactccaggctaggtgacagagcgacaccctgtcaaaaaaaaaaaaaaaaaaaaaaaaaaatcctaaaaggtttatttcactggttataaaaaggtttaaaaaagtgtaacttaaaaaaataaaaaacaactacaaatctccctattaccagaactgcacagaaataagggatgggaccaagggaaacggccatttcgtacaaaaaaataaatcactggatttgtttagttagcaaacagactgagcagagggaggggaaagaatactcacttgcagttggtacaggtgtagaagacagtttgcccttcatcggctgaacgcatctgtctggtgtggtatgccattccttcatgaccacatcgagggcagcgcctgtcaacctgggaagaaactggtgggttagggaggcctggtcatatccccttacttcccacaggaatcaggcgatcacgcctctcaaacgtcgatggtttacatctcttttccctcttggaattgggcacaaaactctccagagctttgcaatcactcctccatttctttcctacccaccttatggagccagttcttgatctcattagcttaccacaggtccctggcactcaggcccttcctccaccgacataggcatggctgtccccagttggtggaacacaaccgaagtcttcacaaccttcccctcaaagtctgcacaggcaagtaagaactggttatggagacaaccagagagagctgacaccggaaacctcccctttcccctggctggttaggccaggaggccctacatcctttccctcagttttcatcgctagaccaaatgtacaaccgcctgatgtcctgctctaggatcccctcctcaacccaaccgatcttgagttccccaagcttccgaccctgcgccctccgccaggacccctgcgtacaagcctctcaccccgaacgttgatgttgaagccacagcgaatacaggtgaccgtatcctgagccccgggcagaggcaggaccgagccgcaatctgaacagaaatccaggtccgactgaaagctggagcaagtattggcgaggtccatgacagacatgcggtcgggtctgaggagggagttggaagtttattaacaaaagagagaagagttcctgtcccagaggtcgtaac

SEQ ID NO: 35701 - DNA, 2300 bp, Homo sapien
gaaaaactaggaatttggatagtgagacatttaacagaaattttaaccagatctctttagcatataaatttggacaacaaaaaatctgatactaagtaatgccactaagtgatcactataggtgagtattttattagtattgagataaatacaatacacagttgacccttgaacaacacaggtttgaactgcttgagtctacatatatgtggattttcttctacttctgagacccataagatagcagcacatttaagccctccttttcctcctcctgagcctactcaacatgaaaatgtgatccacttctacttaatgaatagtaaatatattttcttttccttatgattttcttaataatgttttctctagcttacttgattgtaagattatatgtattataagtatataatacatatacaaaatatgtgttaatcaacggtttatgttattggtaaggcatctggtcaacagtaaagttttgggggagtcaaaagttatatatggatttttggctgttcagagggtcagcaccccttacccccatgttgttcaaggatgaattgtatatctattataatagattcttacatagaaagaaagaaaaaagtaaagtcacaaggaatcctactccacagagataaccaaattatactgtatatctgtgcttgtgtatatgtatgtggctctgtatatgtgtgttgctatatatgtgtttggtttttttaatggactagacatgctgaactatatcttgcttttttctgtttgaactaaaaactttcaaggggaacaaatgcatactcaggtcccgcattccttggctcaaatagtgatcaaggggttactgtaataattatcatataattgtgtggccctttatatatattcagagctctcaaacatagctatcttgtttgacccccacagcaacctggagaatgggcagggcagtcttccccactgtacgtttgaactgttctggcagttgactttcctgacccactcctgaaatctgaaacaaacctgttcatgtttctaccctactttaagcctttctctggcccataacagtgattggattaagcttaatttcttagcaaagcatacaggttcttccatataaccactgcctacctgtcaagcttcatctggcactccctcagatccaagcggtacaaaactccatttcctgtagtgcacacatctacaactttttaagctgctcttctaaaaaaacctacttgtcggccttcctggttcttgttttaccactttcttttgctctctaagaaacgtgcatatatttttataaaatagcctatactgtaatttacgaccatttctctgcttcatcctactcatcaccccagagagaacgaatatgttggcagtatgtaactacattcagatttacaaatcagacatggcatttgttaatgccccagtgtttcatatttttgttagttttcagcatgcctgtctttcctactagagctaaaaggcagggtctgagcgtcttacgcgcctccatcttcaaggcgtagcacagtgactgaaaaaaactgacgttgaacgtgcactaaactgaactgctcaaacacctacaggcacagggcgaggggtagaaccacatcgcttgactcttaagtgtgtttccaactgctcccacttcccgttttctttagagaaacccagaccaaacaaggaaagggaaataggccacggtagggtcattactattgctccttaagcttcctcgccggtccacctacccagacaaggcaaacggaaatctgcagcaggactcagcttggtgcacacaactccgccctcgccacacccactctgcagcgtctggcccggcaatacccatctgggcgcccctcctgcttcctctaggctgtgagtacgcgtgctgccccagactctccctcctccacccacacccgcagtgacaccccttccgccaaatttgtttctctttctttcagcgcctgcgcgctgtcacgttacggcggaactaatccagcgacgcctgcgctttgacgcatttggtgccgtggaagggaaaaagggggactgcagtatgcgtcacacccggaagcggcgagccggaagtggggttagccaggttatccccaggggtggagaagcggaggcccaggaggagggggaataaagaaggtggaggatcctggctaccactctgaatccgataccgcttctcttagacctcagcgacagaaaaagggaagggtgtctcatcccccttcctcctctcctccctgtcctgagcc

SEQ ID NO: 35702 - DNA, 2300 bp, Homo sapien
aaggcacttggattggtgacaattgaggttcttgaggagtctcagagacatttctccagtacttcaagcccagatccaaaaagatcctgagaggccttggagttggggataagccaggacaatgaaggaaaagagataacatgagactgaaaagaaggtcaagagaggcagagacatccagaaaatatgacaaactggaaggtgcaacaacacagaagtgcaaacagactcagagagtcagagactggaggagaaaaggcaatcttgtgtattagtttcctattgatactgtaacaaattaccacaaacttaggagcttgaaacaatacacatttgttactttattattctgtagttcagagtctgaaatgggtcttactgggcaaaaattaaggtgtcagcagtgctaggttccttctgaatggtctgctagagaatccattccctcgtcttttgcagcttccagaggttacccacttccttagcttgtggcttcctgcctcagtctccaaagccagcaatgtcaggccgatcacttctcatgctgctatctctctatgctacctatcagagcatagaagtgcatcttttacaaaatagatttcagtcacaactgtagtcttatgcttgggtatctgtgtgttttatgagcactgagccgggagggttgttccaagatgaatgtacgtgtgtttgtttgtgtaggtttgtttatcagggtgtcatatttgagtgtctccccgataagtatgggggaggcagaagaagagtgcctggagggggtgcctaataaagtcctgctgctccataaagacttactgctgttatactgttattcttattaataataaaactgatgatagagtatctgtctctttgcctgttttctttgagcatgtccgtctgttcctaaataatactggacatttatcccagtgatattcaatgcatatgaggctattcatacacattatatttagctgtgatgtttgtattacatgaatgcttctgtctgcaagtttgtgcacatttgggcatttggacactgatggatgcagacacatgttatataacagtgtgggtgatcatagttgtagacatctggatgtttacttatgcacaaacccccatgagtatccagttagctaggcctggcattggaagggtagagaagctaggaagaggagggagcagggaggaagaggagaggtggggagaggagcaggtaaggagaaaaagagagaatggaggtgaggaatgaaggcacaaaggaacaccagaaaaaaatcaggaagcaggagggggtcccagggatctgcaactgaaaaaggcagggttgactcacagcaagaacacaagtcagaagaccagggtagggctccacttctggtcattcccttgctatgtgaccttggctattccagttctctgggcctctgtgaactaccagagttgaaatagataataccgggtacattccaaagaaggaaggaaagagaaaactggtaataaaatcacacacggggaaaaacagagagaaagaaccagaaagagagacttacgaagaaagtaaggagaggccctgggagctggccagaggtagagctgaaagagctctgccccgactccctgaggccgaagtgtgggcgcctgctccccaccccttaccccagagctgcagaatgcccttaagcccttaataggtaaggaaggaagatggaaaggcgagaggcaccaggaatgaaaaccacacatcaacactcagaggcttgccaaagccacacaaaccaggatctgtgcttccggcccccagcccccagatgtaggtgtgccagccacctggaatgactcgcaccttggcaatgtgggcgcacatgccaagagtgagcctgggcacccggcccatgcgcgtaccacaggcggaggggaaggtaaaattggggctcttcggggggtcacagggggctaccctccccacacagggctaccccgccccagagcgccctctagtgaccgcctcctaggctctgggaaccaggtgtgctattctcccctccctgctcccccaaaccttacccgggaagcaggagaaccagatgaggcgttacgcaaggcctggtgtttacctcccgtgggagcctcctccctccctataaagcctgatgtggtggagagatttgacgagactgagactctggttgaagagagaggcaatcccaggagaggggcggaaagcggcaaaagttaatgcgggagtcggagagaagggcatctacacagcaagcagcaggggcggcccg

SEQ ID NO: 35703 - DNA, 2300 bp, Homo sapien
atgtcccctctgcaaaacttccgtaaggaagaacgcaatcaggttcaactcgctgttgcggaatctggtggagaaaatccaagctctacaagcctctgaggtgcagtccaaaaggaaagaggctacatgcccgaggcaccaggagatgttccactatttctgcgaggatgatgggaagttcctctgttttgtgtgtcgtgaatccaaggaccacaaatcccataatgtcagcttgatcgaagaagctgcccagaattatcaggtaggcatttgaggtttcttccctgttcccccatcagcccaggagttcagtgaggccctggaaactgctaccttcccactgagggtttgcaccccattgcccccaccccttgggcttgagtgggcagctcgcagtcaggcacagtgggttcaaagagctgagtctggggaactgctgactctctaaatcaaggtgcaatggagaatggaaaggatgtgaaaatttgactcagaaggtttgggctcaagcccagtcttgtgagtttactgtacaacctgcaaggaatcactttacctctctgagcctcaggtacctcacctttcaaatggcaaaaacaaaacaactctcttaaagttgttggtaggacagatgaagggaagtttgtagttctttgataattccaaagcaccatccatagtcctagttagtcataaataactatgttctggtcatttaggtcacttaggctccagatttctcccttctcagcaacccctttccccgccagcttgagaaaggcgagtccttaataattacacaaggactcacctggagagtgtcaccagctctcctaagagaccaggaggattttatgaggccagaaatctccaggcacagcctgtccaaacggccctctttccgcaggggcagattcaagagcagatccaagtcttgcagcaaaaggagaaggagacagtacaagtgaaggcacaaggtgtacacagggtcgatgtcttcacggtaagaaaaactccatcccacgatctctggaagcagaaacatctctgccaaagctcctggaatcccctattacactgacccctcagaaaaagatccagtgagccatgtcctctcctcggcgcctcagcacctgaccggccaggcggcatcacctcccgcgtcggcctcgctattacagcgggctgactgctcagtctccaccggcagacaaggtggggcacggaaaacccgcgctggtcttagaatcgcaagtacaggtttttaaggccgagctgcgccctcaacggattccccaattagaaaatgaagacattggccgggcgcggtggctcacgccagtaatcacagcactctgggaggctgaggatcgcttgagcccaggagtttgagaccagcctgggcaacatagcgagactctcctcttaattaaaaaaaaaaagaaagaaaactagccgggcgtggtagcacacgcctgtagtcccagctactagagaggctgggaggtgaaagtattgtttgagcctgggaggatgaggctgcagtgagccgtgatcgtgcactgcactccagcctgagtgacagagtgagagactgtctcaaaaaaaaaaaaaaaaaaagacagaaggaaaatgaagacattgtgaccccacttacctattttcctgtgtgcgtgaaaggaataaaatctatatgaaagattataaactgaaaagccttctggaattgtattagacagttccttgaaggcaagtggtaaaccataaattaataatttcgcttaaagctgagcacgtagtaggtgcttttagaagtttgttctcctctcctttcctttcttccaggtctgccctggcacattgctctggttgggaattccacacaaacttaataaaattaatggctgaataaagtgggctagaaggaccttcgaggccatcctctcaccctctgcctgtccctgtttcttaggaccaggtagaacatgagaagcaaaggatcctcacagaatttgaactcctgcatcaagtcctagaggaggagaagaatttcctgctatcacggatttactggctgggtcatgagggaacggaagcggggaaacactatgttgcctccactgagccacagttgaacgatctcaagaagctcgttgattccctgaagaccaagcagaacatgccacccaggcagctgctggaggtgagtcccttgggggcagaattgcagagaggtagcagcccatccctagtctcaggtcagagcatggaccactggcagaatacctgagattgcccca

SEQ ID NO: 35704 - DNA, 2300 bp, Homo sapien
tgaaccggggattcagaggttgtagtgaaccgagatcacgccattgcactccagtctgggcaataatagtgaaactctgtctcaaaaaaaaaaaaaagaaagaagaaagaaaaaaaatatatgtatatatatatctccattcagtccagtggatggatgacccaggataacaataataattctgagagagtaaagcacctttgaaacactgtagattctcattttttatgtctaaatttccttcctcatgaagccatcagtacctgtttggtgacagttctttgaaactctccagtggtgttcatatgagtattttcattctctctgctgggttgcccagcttcattgaaataccaatgttcttttaaaatatttgtttatcatttttaaagattactatttgttttcattaatgctgaaacaagaaagaataaagaagacttaatgtggaataggaaacctggaattaagtctgagatctgtcatttattagctggatgagctggaacaattagtagtgtctctaaaccaggggttatcaatgtgtgagcctccatcaggagcatcgacttctccagagaatttgcttaagatgtcaatcatcaggctccaccaaggacctgttgaaagagaaagtctctactggagttcagcaaatctgaattttaacaagttttccaagtgattctgaagaatactgagttccttttttgagaaaggataaagataatttcttacaggtgagacttaaatgaggtaatataagcaaaataaatctataaatcagagtcataatgtcaaatgccttcaagggccaaggagacgtgaggtagcagagcggtggggaacatagccaccctctctaaaggcatctacattatcattattttctaaatcatcatgccagtcaaacaaaacctgtcaaaagttaaattctgcttctaggggccagcagtttaggagtgtaagtaaaacaatttacagatgttagactgttttaatttaaccctaaaacaaacaaaaagaaaggtctggaggtataacatttctgaaagtctttggtttacagcagttgctataaggggagccacataatttatagtccaaactggacatttctgaaagtgaaaggaggtgctattaataattacaccaggacaaagtgaaacccaggatggttccaggcaaagcagagtgtatgatcactctggctattattataataatcatccacaagccctgtttgacctaagattaagatcagacaaaaattaatggtgtacttcttgctggggacagacggctgataatggagagtgaggaggtgagggtggaagctataccaagagaaggggtagggaggaagcacccttttccttaagacaagaggcaaggagggaaggttaggacatgaatgtacagaagggaatgtatgtaacactggttgatatattcctagtcataacaaaagccatagaaggcaagtcagggatcagagaagcaccaagaaggaagaagaagaacatatagacagaattggcaaagcaaagaatgggcacggagacaccagcatactggagacatacagagaaaaaatcaacagaggacagactactacaggtgttgtggggagacagaagatcaccaggggcaagagcaaagtgcaaaaacaaagaacaactctttagaaaggaagttccttgcctatcctactgagctagggagtggttggttgaccctgtgactggaaattccccaaggtaggtgatgataacctccacattttcacaaaattctgtgaggagccaaagcacctgaggtagagaattgcccttcccctactttccagatgctctaccaaggcttgaactttgcatacaagatgcccaaagcattgcagtgaactggctgtgacctttcagtaggcatcaccacccacccctccactccctactcagagctgattgggaaatcccccataagtggtgtttggtgccccggtcattctgatcttagtcaaccaccatacaaacatacctttagtccaaagttcaggacaacttatttcactttataagcagcctattacacattcaaagtatccatttgttctcaagaggtagcaaggtaggactgcccatctgttttcctctctttataatattttctagatcctaaattttacgcttttctatcatttctttatttttttctccctcttcttttcctctctctctgctcttctaactaattggcagaatctctgacctccactttctctgactcccttctcccttcct

SEQ ID NO: 35705 - DNA, 2300 bp, Homo sapien
atgtggttcataagcactttcatgtatagtcaagttattgctacccgtctcagtgtagaagtggcttacaggaaccaccacccactgagataactcacctgacatcagagactaaagtgaaaggtcagagatctgtcacaataagaatgtgtgctgtgacatgaggcaccagaagtctgtggacagtgaagccaataaatccttttaacccctagatgtagaaaattataagcgtattactcagtctcatcaaagtctagtcaaaatggaagctctcttctttaggaatatacttattaaatatgcatatacaattatacatacatcatgaaataaaatgatctcttgcatatttgcacatgaaattaatagaagttattctgacatcagaaaaggaattggaagaagaaaaaaagtttggttccagccaaaaccagcaatttattgaagggaagggatacattttaaatagaatagatgcctagattgtttgacaatcacttgatgaagaattaaccacataaacacattaaaacttaaaaaacttgttgttttggcataaaatattgacatctacaaacagtttcatactacacctttacaacaaggacttaacgaaaaacaggccaatgactttcagcaacttaaaagagtatttaagattagtcactgcccaagaaaacttgaaatgccctgaaatctcaggcttacataggaaactcttcacagaggcttctccaaaattaatagcactaaaaatttgcatattattaccaataacgattgtgaaatggatattaacttttctaaactttcaataaaaactttttttgcttaactatgctagacgaaataccaaattattcattctcacccaggaaaatacattacaaaagtgttgtcgaatgaagagggaatcaaaaaatataaatgggaaaatataggggtggttcaagcagttattagaattttggggggattttttgatgtttgtgatatgtcagtttttaaacatttatcatttgctgtcattgtttttcctcattgtaagtcatatttgcttttattcttaattttgtcaaattctgtatcctttttcttttctttctttccttttttttttaatttttttattttgagacggagtgttgctctgtcgccagacctgagtgtagtggcaacgatcttggctcactgcctcactgcaacctccgcctccctggttcaagagattctcctggctcagccgcccgagtagctgggattacaggcacatgccactatgcccagctaattttttgtatttttagtggagacgaggtttcaccatgttggccaggatggtctcgatctcctgacctcgtgatccacccacctcggccacccaaagtaccgggattacaggcgtgagccaccgtgcccggctgtatcctttttcttgaaaagacacaacactgtgtaagctttcaagccccacaaacctgggccatctccccgccccaggagagttctccggcaatgggagtggcccagacaggctccccagatagggtcggtttccaacaggagccctaaggggagctgaaccggaaaacaagtctgttagtagcgctggtcctacgtgtcagggctcagtggatagagaaggaacaggtgagaagcagagcccccgcccagtccccagcggtccccttgggagctctgctcgtgaccgtcccgaggggctgcggctccggggctcgggtcgttttgagttcctatctttgcggcggctctagaattccaggggcaaggcttgcgctctgtcgtttgcagaagaccgtcgccaacggacatctgggccctctggtgtttccagccccacctcctcccagcctttcttgtaactaacctgatcgaatgtgtgaattgggatttcttttaaaagcccacctcaactgaaattgggacagtgtaatcaggattccgctcccccgccttcaccccaatcggttgcttttcaaatacagcttttctaaaacgccgccaggcacccgggcgtgaaggcgcgcgtccggcgttcctgggcgctcacccagtggtccgcgcgccaatctccctaacgttccccaaccaccgtccgagctgccccactcttcgcccggtcactgatgcagaggctgtcaggcctctctgcgcacgaaacccatcacagcacctgggccagcagccagtgccgggctgtcctcttcccaccccaaggcggtcctcttgagtcttcacaccgcctccttcggatccctccccatcctgaggacttc

SEQ ID NO: 35706 - DNA, 2300 bp, Homo sapien
taaatacagtggatttctgccttcaagttgctcaataaaccagtaggaaaatcaagaaaagtacctaagtaactagtagaagttactatatagtcagtactataagttggtacaaagtgctgtttcttcatctgtctatccatacatctaattatcaatctatctttccatctgtccattaatccatccatttatcaagcttttactgaatcctttctaagagcaagaaaaggtatatatagagagatgacattttatggtaatgaagcccatgggctgggataagagacacccagatctgaatcccagctctatgtttacaccactgtggccttgggcaggttacttaatctgtccacatttttgtttcttatactatttcatgagatacgacaggaacgtagattgtggaggggtcaaggattgaaggttaaaaaacagacattgtcggaaatgccttaggaagagaactataagtgagtacaatgcctacatttataatttcaggtggtgaaatctgaatcctgacaaggtcaagagagtggccactagggtgggtggcaaaagcaaaggtcattggatgtgagcaggacaagaactgaaaggccttggtgttaaatgatcatgtacatagtctttgaaatcaccaggatcatggtaatttcacagccagatgaagggcaagttctgggaggatcctgagcacaggagcttctgtccccggtggagtgtgggatgtgccaccctcccagcatgtggatgcactcaccaacctggaatctctccaaacctctttgttcaggatcttacagaggttccattatttaggtatgattgatcaaatcactggctgttggtgattaactcagtccctgggctcctctcccctccccagaggtcagaggtgagactgaaagttccaaccagccaggcgtggtggttcacgcctgtaatcccagcattttgggaggccaaggcaggcaggtaacctgaggtcaggagttcgagaccagcctggccaacatggtgaaaccccgtctctactaaaaatacaaaatattagctgggcatggtggtgtgcacctgtaatcccagctactcgggaggctgaggcaggagattcgctggaacctgggaggcagaggttgcagtgagctgagatagtgccgttgctctccagcttgggcaacaagagtgaaactctgtctcaaaaaaaaaaaaaaaaaaagaaagaaagaaagaaagatcccaccctctaatcacatggttcttctgccaaccagcccccattcttcctccaagagtcacctcattagcataaaccctggtatggttgaaaagggcttattatgaataataaaagatacactcatcagaacataaccatgtggtaagttgaggtgcatcaggaattaagatgattcaacttaaaatttttgactttatgatgggtttactggggtattgagtacactttcaccttacaatatttctgacttcagtgaattcactgggacgtaaccccatcataagttaaggatcatctgttcaagggttttaggagctctgtgccaagactaattatatatatatctcacaagatcacacaacccacagcaaacagtggcaaagtgggattgagggaggaggctctgaaatgaggttttcaacaagcgtcttggacccttagaagtttcaagtgacagcccttattagtggcaccccttaggggctccctcaaactcaatgccaagactagcctgactggagggaacttagacaatggagtgggcatttgatgttccagcatcttgagtgggtgccattattctgtgacacctggatcctggggttccataagctggggttctaggatgtccattcttagttgagtctcatttcctgtcatatcgacgtcaaaggcccaagaccttcctcctccccttgagcaaacaagccacgccctgcaccaaagtccatctcaccttccagctaccctaggtaattttcctggtaattcagtgtttctaggaaagcatgagtctttccaccccccgccctgagatttactgacatatgaacacatatgattggcatgatataagaaccactcatctgctggccatctctccaggtctggagccagagaagatgatctgaaattgtagcaggagaaattgaggtaggatactaagaaagcttttcaggagtggggctaggcaagaggtgcagcatgagggaataagagtgaatcctcagtatctaagggaggtggcaggtggcgggggacttctttcttt

SEQ ID NO: 35707 - DNA, 2300 bp, Homo sapien
tgtacatagtctttgaaatcaccaggatcatggtaatttcacagccagatgaagggcaagttctgggaggatcctgagcacaggagcttctgtccccggtggagtgtgggatgtgccaccctcccagcatgtggatgcactcaccaacctggaatctctccaaacctctttgttcaggatcttacagaggttccattatttaggtatgattgatcaaatcactggctgttggtgattaactcagtccctgggctcctctcccctccccagaggtcagaggtgagactgaaagttccaaccagccaggcgtggtggttcacgcctgtaatcccagcattttgggaggccaaggcaggcaggtaacctgaggtcaggagttcgagaccagcctggccaacatggtgaaaccccgtctctactaaaaatacaaaatattagctgggcatggtggtgtgcacctgtaatcccagctactcgggaggctgaggcaggagattcgctggaacctgggaggcagaggttgcagtgagctgagatagtgccgttgctctccagcttgggcaacaagagtgaaactctgtctcaaaaaaaaaaaaaaaaaaagaaagaaagaaagaaagatcccaccctctaatcacatggttcttctgccaaccagcccccattcttcctccaagagtcacctcattagcataaaccctggtatggttgaaaagggcttattatgaataataaaagatacactcatcagaacataaccatgtggtaagttgaggtgcatcaggaattaagatgattcaacttaaaatttttgactttatgatgggtttactggggtattgagtacactttcaccttacaatatttctgacttcagtgaattcactgggacgtaaccccatcataagttaaggatcatctgttcaagggttttaggagctctgtgccaagactaattatatatatatctcacaagatcacacaacccacagcaaacagtggcaaagtgggattgagggaggaggctctgaaatgaggttttcaacaagcgtcttggacccttagaagtttcaagtgacagcccttattagtggcaccccttaggggctccctcaaactcaatgccaagactagcctgactggagggaacttagacaatggagtgggcatttgatgttccagcatcttgagtgggtgccattattctgtgacacctggatcctggggttccataagctggggttctaggatgtccattcttagttgagtctcatttcctgtcatatcgacgtcaaaggcccaagaccttcctcctccccttgagcaaacaagccacgccctgcaccaaagtccatctcaccttccagctaccctaggtaattttcctggtaattcagtgtttctaggaaagcatgagtctttccaccccccgccctgagatttactgacatatgaacacatatgattggcatgatataagaaccactcatctgctggccatctctccaggtctggagccagagaagatgatctgaaattgtagcaggagaaattgaggtaggatactaagaaagcttttcaggagtggggctaggcaagaggtgcagcatgagggaataagagtgaatcctcagtatctaagggaggtggcaggtggcgggggacttctttctttgggtcatctttggtggtgatttgacaggaaggaacaaagtggcttcaaacattatacaagtctctagtctgttctgtgtcctgttttctttctcattctttcagtgtggaatctatatgaccctgggagggatgttggttggaagaatgaccagctgatggagatgctgctgtaattattggtggtaataatgggcagcagtgagccacccggtgtgacagtgtaggagaaaacagtccaaactcctgccaaactctctctactgatggcaaatcagaggagactcaaattgtaagtttatagtggtctggcttttggccatgacaatgacaccttgcccttttaatttggggcccgtgcaaatattcactgaaagctgtcaagaggaaaacagaattggttattgaatcacttgcttcctctaggtgtatgaaaaataatttcaagtttaacaaacacaaggaaaccgcagggtccatgtcaaagctgatgagctatttctgaaactcgtgcagaattgtggtttgtgtggtctatgtcacggcacccttgagggagagtgggcaattgcctgaacttggaggctgtgtcctgtccccaggctgctccagggctgcctccttcc

SEQ ID NO: 35708 - DNA, 2300 bp, Homo sapien
atcccccaccacctggcacaacagtcccctttggggttcgggtaacactggactattttatttatttatttatttatttatttatttatttatttatttatttttactgtagcggggagaaggcaagaaaccataatgcaaatgatttatgttgatacacattagaaaacgattagtcagataatcagtttcaaccacatttatctagggtttagtatttttatattactacattcaattttaataaccctctaggcaaacattattaccttcattttacagagaaagaaatgtaaactgactttccaaatgtaaagtgactttccaaaggtcacaaagctagaaagtatcacgttaaggacgatcccagtctcctggcttaaagccctacgctcctcccacacctcatgccaagaccaagatctgcagccacggtccttcacccatgcacacatctgtggataaaaccaggccttcccccattctcccactgggtgatcagcctagccccttgtggttgctccctttttactctaatcactttattacctccccttcccatccaatctctgctcttcctgccacgagtgcagcccaggaactagtttgtccaatacaggagccaccagccacatgtgtctactgagcactgaaatgtggccggtctgaatggcggcatgctgtatatgtaaaatacataccggatttcttttttttctttttctttttctcttttttcttttctttttttttttttttgaaatggagtctcgctctgtctcccgggatggagtgcagtagcgcgatcttggctcactgcaagctcctcctcccgggttcacaccattctcctgcctcagcctcccgagtagctgggactacaggcgccggccagcacgccaggctaatttttttgtatttttagtagagacggggtttcaccgtgttaaccaggatggtctagatttcctgacctcgtgatccgcccgcctaggcctcccaaagtgctgggattacaggcgtgagccaccgcgcccggccaacacaccggatttcaaaggcttttcacaaatttaaaaatgtaaaatatcttattaatgactttttatatggatcacatattgaaatgataatattttggaaatataggactaaataaaataacatcattaaaattactttcacctgtttagactatttttatatggccactaggaaattttaaattgcatatgtggctcactttgcgtttatgttgaatagcattgctcggaagacagatctgacagcaaattatttatggtcactcaccttcttacttgtgtgcctagggcaagctgaataacctggctgggcctcagctttctcatttatgaaatggagatcctaatagcactgatgttgcagagcagacacagaaataagatcatacttttaaattgcttgtatcaatgtaagttgtaccgtcattgtaaataaattctggccaaattgcttgtatcaatgtaagttgtaccgtcattgtaaataaattctggccgttagtagttttctttctcctccccatcatagggaatattccagcctcttttgaggcctgcagcaggccagttgaggcatcaccattgaagttgctggtgcagtgtacaccctggcacaaggaccttatctgagcccccacactctcctgcttgctgatgggcaagccctgggctggctgatacctccaatctctttggagacagctggccatatggcagaaaggctggaatggcatctccactctgtgacccagtctcccacttgcccccaaaagaatatttcttctgacagtggacagctgacatatcaccactttccttctactgtgagtgtctctggatgggcagaaaggaatggccagcccctggttatggtcatctaaggtcacctctgaaatgctgtgagcccctcttccttcctctcctctgctatttcccatctctgctgttggcaggagaatagaaccctggctgccagagatgcaagtgtgtgacgatatgggtgctggtgcatatttagtatgtgcctgtgtccagccatgtgcatgtgtgggtgtgtgagtgtgtgacccagcccttcccccgtggccaagcagagagagtggccttgaggaagccatagcagcaggaccagcatggcctctgctgcctctgtgaccagcctggcagatgaagtcaactgccccatctgtcagggtaccctgagggagccggtcactatcgactgcggccacaacttctgccgggcctgccttaccc

SEQ ID NO: 35709 - DNA, 2300 bp, Homo sapien
tgaccataaccaggggctggccattcctttctgcccatccagagacactcacagtagaaggaaagtggtgatatgtcagctgtccactgtcagaagaaatattcttttgggggcaagtgggagactgggtcacagagtggagatgccattccagcctttctgccatatggccagctgtctccaaagagattggaggtatcagccagcccagggcttgcccatcagcaagcaggagagtgtgggggctcagataaggtccttgtgccagggtgtacactgcaccagcaacttcaatggtgatgcctcaactggcctgctgcaggcctcaaaagaggctggaatattccctatgatggggaggagaaagaaaactactaacggccagaatttatttacaatgacggtacaacttacattgatacaagcaatttggccagaatttatttacaatgacggtacaacttacattgatacaagcaatttaaaagtatgatcttatttctgtgtctgctctgcaacatcagtgctattaggatctccatttcataaatgagaaagctgaggcccagccaggttattcagcttgccctaggcacacaagtaagaaggtgagtgaccataaataatttgctgtcagatctgtcttccgagcaatgctattcaacataaacgcaaagtgagccacatatgcaatttaaaatttcctagtggccatataaaaatagtctaaacaggtgaaagtaattttaatgatgttattttatttagtcctatatttccaaaatattatcatttcaatatgtgatccatataaaaagtcattaataagatattttacatttttaaatttgtgaaaagcctttgaaatccggtgtgttggccgggcgcggtggctcacgcctgtaatcccagcactttgggaggcctaggcgggcggatcacgaggtcaggaaatctagaccatcctggttaacacggtgaaaccccgtctctactaaaaatacaaaaaaattagcctggcgtgctggccggcgcctgtagtcccagctactcgggaggctgaggcaggagaatggtgtgaacccgggaggaggagcttgcagtgagccaagatcgcgctactgcactccatcccgggagacagagcgagactccatttcaaaaaaaaaaaaaaagaaaagaaaaaagagaaaaagaaaaagaaaaaaaagaaatccggtatgtattttacatatacagcatgccgccattcagaccggccacatttcagtgctcagtagacacatgtggctggtggctcctgtattggacaaactagttcctgggctgcactcgtggcaggaagagcagagattggatgggaaggggaggtaataaagtgattagagtaaaaagggagcaaccacaaggggctaggctgatcacccagtgggagaatgggggaaggcctggttttatccacagatgtgtgcatgggtgaaggaccgtggctgcagatcttggtcttggcatgaggtgtgggaggagcgtagggctttaagccaggagactgggatcgtccttaacgtgatactttctagctttgtgacctttggaaagtcactttacatttggaaagtcagtttacatttctttctctgtaaaatgaaggtaataatgtttgcctagagggttattaaaattgaatgtagtaatataaaaatactaaaccctagataaatgtggttgaaactgattatctgactaatcgttttctaatgtgtatcaacataaatcatttgcattatggtttcttgccttctccccgctacagtaaaaataaataaataaataaataaataaataaataaataaataaataaaatagtccagtgttacccgaaccccaaaggggactgttgtgccaggtggtgggggatttgggaccgtaggaggggccaccatgggcagatgtggtgagggaggaaaggagagcagaagaggggacccgatgagcaatccttacaccctacctgcagtgtcgaaacagcgtcccgcccacacacttccggcagaatctcccgaagtccacacctctcactccagcctggactttgatgctgtgggcacgcctcagagccagaagtttatggctcccacctgctcaatctgacaggaagcttctgctccccagttctccccagccactgtggtctacagattccaggaaacccatccccctgtgacctcatggtgtgctctgttctccaccctagggaccagaaggagccaggagtaaagaactggcttacttggccgcc

SEQ ID NO: 35710 - DNA, 2300 bp, Homo sapien
aagagaccttttgatagaggtgataggaaaggaaagacaaacctatgggctgggagcatcaagaagacattaaagggattggggtgacaggagaggcccagagagacactgcatcctgccctggtaacccgggcaggccctgcaggatcaggtggcatgcttgtaccctgcttctcctgctgtacacccccgtgaagaactttcttgatgctctctcttagtaaccgggcacatcccctccgggagcttgccatgactcattgccgcagccccactgctcggctctgcctgtttcatgacagcttcagatgtcttgggtgagaagagtcctccaggagacttgggcggatcacttccctccagaggccctgtatgtggctgtggatgggggctcctgagtctttcagcctcttctcctcagggccagccctgccctggctctcgggacccaccctctctgggctgctcacaacctttaacctttagaggactcttctttctcctgtatgattctctccctttctactgttctaggaacttccatgtcaggaaatatgcccaaatgggcctctggcccacactccagctactgctccattcatttgctcttttatgccacctttgtcagcagagctgtcaggacacactgtctgttttgttgcctgtcctctgaagccgccttggacttacatgttttgaggggcatgttagaggacttggccagaaatgtgctaccagtctctgggcacttgcttcatagcggggggttgggatgtgcctctgacttcttgtcttattcctctggagtaaagctcacaactcttcccaaacttttggaagcagtcatcagcagccacaatttgttaattccatttgtttcccaaatctcaccctctccaggaagccagcctgcaccccaccggcccctgctcccatcccccttcactctgctctcttttcccgtggtgcgtatcactcacgtagtatgatgtatttgctacattgattattgtctgcttccccctgctagaatgtcagctctacagaagtagggatttgtctctctctctctttttttttttttttttttaactgttctgaggcttctagatgagtgcctggtacctaggaagcacttaataaatatttgtggaatgagtgaaaggaaggcaaaaatcaattaatacagggtattaaggaggcttttgactcacaaaagggaatctgagcatgtcagaatagccctcttcccactcaccctgccctaccacctgtctgtcacagagatagcaccaccattctcccccctgtacaaaccatgctctgttcttgtttatccttgaccagtatgtccagttgaatctgtctctaaaatacctggaatgtattgcttctctctttttctccctactgccaccaccttagttcaggccatctttagctctcccctggtccacggcaaaagcctccggaccaacctccccatgttcctcttgcctccttagtcccttctctgtggggcagccaagtgagtggtcacttagggttttggctcactgctgtacagtgacgcaaacagaatagaagtttatttctgcctcagttaacagttcagaggtgcagggtctagagctatcacagtagctgtacataagcttatccaagggactgggttacttccatgtggttcttccaccagcttctagggatgttgtcctctgctgcgtggtcaaagttgggctcaccaccaccatgtccaaaattcagttggggtaaaaaggaagtagaaagcaattttctttttttaaaggacaatgcccagaattatggtcattgctttctatcacattccattggctggaacttagtctcatgaccagaccttgtcgtaggggatctggaaaatgtagtcttcccaggtggccgcctgaccagcaataactccgggggttctattattaaaaggaggaaggggagagtggactctggaggttacacagcagtctcagccacatgtagagcggatcacacatatcatgcccctacttgaaacccttggtgggtttccactgtacgtggagcaaaagtgaaactccttaccatgcatatccagccctgcgcagtctggcctctgccgttctcaccaagccctttcctgttttaccttacctctcttcatccggccagtacttcttatccgtcaattctctgcgcaggtatctcccagagaggttgcccatgtcatctcccagccattgtggcttctgtcattgtgccgattttgtttgttttcttgttgt

SEQ ID NO: 35711 - DNA, 2300 bp, Homo sapien
agtcctggatagactttagaatctcctgggaagtttgttttttaataccagagcctgggccacctctggagatcctaagtcagttggtctaggtatgttttgaagactcaccagtttgaagactacaaatctgatgtgtagtcaaggtttgaaccattccacaagatgataaaggattccttcctatatttggtgcaaagcaccaagtgacacttaggaatattttagacaagagagcttggttcatgattcaacattagacagatattctggcacaaatatgaagaaccctcaattttcccctgtgggtcagccacaagaccagggcaatttaacgccttgtctcatccacctcccagctggctgctacctcctgcccctctttgagccctgtggggatttctagcgttcagagccctggtagtttttgtggcctgcactgtgcttcagagcaccactgatgctcggctccgtggggaaagtaagccaagtgtgaccacaagaacgcatcatccacagtcactgggatctcctgggacagcctgggatccaggcctttggcctggccagtaggggtgcagtcactcctagtatgcacatccagatcacttgctttttgccccgaattctggcctctccaggtttgttagaggtgtctcacggaagtttaccccatggagagtttgcttatctcagattaaaatatggggattaatctgggacccaggagcccttaaatggagtacccacagggaatggagctctaggctaagtgctttgggattacaggtgctttgctcttgtttggaggtccagacatatgcttgagaagcagcttgggatactcaagagaggcctgaactggtaccctggaggccaggatgaaaacccaggcctctccatttactttcttgggccccagagtccacatttgggattcactgtctaccagggcacctctctgggtggcatctaggagccggaggcaggccagagtttcacccaggctggagtgcagtggcgcagtcatggctgtctgcagcctcaacttcccgggctcgggagatcctcctgcctcaacttcctaagtagctggaactataggcatgtgccatcgcacccagctaattcagctaatttctttttttggagacaatgtctcactatattacccaggctggtctcaaactcctgggctcaggcagtcctcctgccttagcctcccacagtgctggaattacaggcacaagcccccgtgcccggctttcagctagtttttgtagctcatagtgattattcttggagccaataatcgtgcatgcatccacatcttgaaattacatggtgtcaccttgaccagtctgttgacatatgcagattaggtatttatgagatccagagacttataggggaggggtggatttcagggaaaagggaacctcttagagaaaggtagggagtgtctgcagttctgcctgtgaggagggtaccaggacattgcagggcttgtttgttgcatcttcctggttctatagaattgcagctagcttctggtttattttttcatttttattttttgagatggagttttgctcttgttgcccaggctggagtgcaattggcgtgatctcagctcactgcaacctccgcctcctgggttcaagcgattctcctgcctcagcctgcccagtagctgggattataggcatgcgccaccacacctggctaattttgtattgttagtagagatggggtttctccttgttggtcaggctggtctcaaactcccgatctcaggtgatccacccgcctctgcctcccagagtgctaggattacaggcagaagccaccgcgcccggccgcttctggtttattgaagagacagaaaaataccccctcacccccagcagggatgtgtgacctctggtgcaagggagttcatgaagtgacttcttcaggttcagaattctcatctgagtaaagggagtgggggtggagtgggtcatctctgaggttttttttttttggctctgattttggtttctgtctgcccaggagtcaggaatggagagaagggtaatggttttacctcttattgtggaaacctgttgagatcacagagaatatactgacggcataaaagggcagaaccatagcagggtgcggtaagttggggaagagtttttggagagggtgaattttgcattggacctgacagaattgtgtatggggaaggggagcggttattctggtctgctcacatctctcatactcaacctcatttctcctaattctgaaat

SEQ ID NO: 35712 - DNA, 2300 bp, Homo sapien
ggggctggggcagggagtttcaagaccaggtgtaaggtgaaagcacagggaccgagggagaagtggcatgagggaggtcagagagttaagcagagctgtcatgtcaggagccccagcccctgcaagagtcttccatgcccctctaagtgtgctgagaggatagagaattttaagtggggtggtggatttgtggctggagtctgcccagaatggtctgtgaataggccaaagacctcaggacagggagaaaacgcttagtggcacagcattattttttattttattattattttttgagacggagtctcgctccgtccccaggctggagtgcagtggggcgatctcggctcactgcaacctccgcctcccgggttcaagcgattctcttgcctcagcctcctgagtagctgggactacaggtgcgcgccaccacgcccggctaatttttgtatttttagtagagacggggtttcaccatgttggccaggatggtctcgatctcttgacctcgtgatccgcccacctcggcctcccaaagtgctgagattacaggcgtgagccaccgcgctcggcggcagagcattatttaaggagcatgttaaacacactttcttcccacaccaccaactaaaaaagcaggtatcaagagggtctaggtaggtgctgagaccacctccagagcacaggcccgccagagttgtgctcagcaggtgaggtctacactcctctcagcccggaggggcagcgtgagttatactgctggacaaaggggaaaaagacaaaatgctgggctggggtagaagggaaggacgcgggtgttaaatgtgggcgtggtttcttctgaatgtcccacccactccactatacattgcttaaatgcagtgcaaatttccctacccccagcggaggaggggtgaagattcagcaggttttagggtctaggaccctgagctcctccattcatgaatacccaaacaactgtagcccaccctctcaccactgcctaggcggacgaccagtgtccccagctagatctctacccttaggagcagggcactggctgacccggagaacctgcgccgcctcttctcagcctgctgccagcccagtgcacgagctgaatgccgctgccgcctggctggccgggaaagacggggatcttgacgcggcggcgcctgggacacggcaaccgcagcacagggcatggccctgcggctggaccggacgcggcggctgcaggcagagcaggaagagagcgcaggctgggcagcggcgtacgcttcggcgacgtcagcttccggggccgtggacgggggcgcgcccgagcctcctggaaacctccccaccaaggacctggggaacccaagtctcggcccgctttgtagcctctggtttctaaattcagcgtcgaggagcgaaaacaacccccctgaactgggcccagacccttaagctcctggaacctcagtttttccttccgtcgaatggcgacaatggctgtctggttgaacgttattttacctaggaagtaataattttcgtaaataggtctctgagagtatttgcttgctaaaatcctgctttgtcctggaagcaaatttaggccacgttaggggcggggacttcgtatttgatgttgagcacctggcgagcgccaccttcgcctcaaagcgccctcggaccctgatccagcataaggccagagttgggcagtgaggggtctcgagaggtggaaaggggattattgccctctcaagagtcctacgtaggtgactcctaagccttagcatttactcccttagaccgtgtaacaggccaccccaattacgcgccaaactcaggctgcggctcttggcgcagcctcggtcccgcctgatttcagtttccatttcgctgcccctggtgccccaccgcccgcggctgtctggggatttgcccggtgatcagtgacgtaaaagagactaaggttcccattggatggcgaagttcggcaggagccaatcccggggctggtccgggagaaatctcggcgaagggccccgaatagccgggagattacggggcggggacgagctgtcgcgctggttgctcgtgcaggagcgggacccggaacagaccgccgtgagagaggaggggtgccggccgggattcgcggcccggagctcgggaccggtgagtagggggtgcacatgagacatacagcgaagcaacagtctcgtacgctcaccgggtttggggcgacccaacgcagccgccgggcccgggttcaaaacggggccaggcccccgggcgggctcagg

SEQ ID NO: 35713 - DNA, 2300 bp, Homo sapien
gggtgagggtgggaggcaaggattaaatagaaaaggggcataaggaaagtttttagggaaaagaaactgtcctctatctgggcaatgtggtagttacatgactataaataattaccaatattcataaaacattgtagctaaaactggtgagttttattatacacaaacgccccaattaggaaaaaaaaaggtgggggaagaaggcaaaaatgaagacacttttacataatccaaatcagaaaattcatttcctagggatcttgtactacgtataattttgaaggaagttcttcaggctgaagggaaatgatactagatggtgacctagatatatagaaagggataattaacaacagaaattatgcacatacacagatcacatacacactcattttcttaatgacaatatgaatgcttaaaacaaaaagtattactgtattattgagtttataaagtatattgatgtaatatatacaacaagaatagcacaatggtaggttacatgaaactacactcttacaagtgtcctttattttgctggatgcagcttaatattacctgaacttcaccatgaaaagtcaaggaatcgggtttcaattcttacaacaataaaaaattagtgtaaagaaatatacctaaaagccactagaattaaaaccataaactaaaaaatgtttacttaacacataagaaagtaggaaaggaggaatagaaacaaaaagatacgagacaaattgaaaacatacagcaaaatggtagaccaaaacccaaccattgtaagtgaagaaatgacacgacctgagtcacattagcagaactgctgagcactgtggggagaacagacatgggcaggaagtgagggacagtgttagtgccacaattcaggggtgagagggtggcagggactaaggggaggggagggtgtgagggatgagaggggcagagagaagggctggagagacaggaagtgaggaaaaggagcaagggaaaggactctaaagcagtggaggagcctagcagggggttcttgacatgcattcggtatttaatacattttgtgggactgccaaaaactaatggcctcctcatgattaaaaacataagagtaaaaaaataccaagtatgcaaataaaatgtgcacactgcttagatgtgcataattcataaaaacaagcagtgcttaagcattgatgataggcattttgacttcagtgcaattttgaggctccttgttacaatatacagtaacaaatcctgcttctttgtattgagatgtcctggactcacacagggaaactcgggctatggaatgaagataattttaaatgcaacaacccagagtcatggatccacagtctgggaaagtaaacttagaagctttgtgactcgaattgcaatgctgtttggatacacttatatatgaagcaggcaaaatcaggtcttttacagattagaatcctgatcattcaggggttagattgtgctaaccactgtattaataaacaaacaaacaaaaaaacctggtcactatgagaatctctatcttgtgccttcagccacaacttcaccaggtttaaagagaaaacccctttctctacaccgccattcccaaggcgagctcactctctggcatcaaagttccctggggtgagttttcttctaggatagtccaaggggagaggtaaggagtcggaagtccagttcagggacgaggattccaggatgagcgtgaatgggaaggggctgggcccagcctgggggttctctccctagtttccacagacagatccttgaccaggactcaggcagtcagtgtgacaaagaggctggcgtaggaaaagagaggtcaggacaaagtcccaggccccaggcgtggctctctgggtctcaggccccaagagcgatgactgcactggggagtcacagggttggggattgcccactcccctgagttttggttctcccaaccttcttcctggatacttgtgacataatcccacttctcactcccattgggtgccgggtttttagagaagccaatcagcttcgccgcgatcccggcactacgatcccggcactacagtcccggcgcaaccacccgcactcagattctccccaaacgccaaggatgggggtcatggctccccgaaccctcctcctgctgctcttgggggccctggccctgaccgagacctgggccggtgagtgcggggtcgggagggaaagggcctctgcggggagaagcgagtggcccgcccggcccggggagccgcgccgggaggagggtcgggcgggtctca

SEQ ID NO: 35714 - DNA, 2300 bp, Homo sapien
atcacaaacgctgctcaaagaaatcagagatgacacaaacaaatggaaaaactttccatgctcatggctaggaagaatcaatatcattaaagtggccatactacccaaagcaatttatagattcaatgctattcctatcaaactatcaattacatttttcacagaactagaaaaaacttaaaattcatatggaaccaaaaagcctgagtagtcaaggcaatcctaaacaaaaagaacaaaggtggaggcatcacattacctaacttcaaactacagggctaccatgaccaaaacagcatggtactggtacaaaagcagacacacagaccagtgggacagaatagagagcccaaaaataaggccacaaacctacagccatctgatcttcaacaaagttgacaaaaacaagcaatggggaaaggtctccctattcaataaatggtgctgggataactggctggccatatgcagaagatcgtaactggaccccttttactatgtacaaaaattaagatggtttaaagagttaaaacccaaaattataaaaatcctgaagataacttaggcaataccattctggacataggaactggcaaatatttcatgatgaagacaccaaaagcaattgtaacaaaagcaaaaatggacaaattggatttaagagctttttcatagcaaaataaacaacagggcagacaatctaccaaatgacagaaaatttttgcaaactatgcatctgacaaggggctaatatctagcatctataaggaatttaaacacagttacaggaaaaaaaaaacccactccattaaaaaatgggcaaaggacatgaacagacacttttcaaaaaagacatacatacagccaactagcgtgttaaagaaaacctcaattatcactgatcattagagaaatgcaaaatcaaaaccatgatgagatatcatctgccagtcaggatggctacaaaaaagtaaaaaaataatagatgttggtgaggttatggagaaaaggaacttatacacttgttaggagtgtaaattagttcaatcactgtggacagcagtgtggtgattcctcagagagctaaaaacaactaccatttgactcaccaatcccattactggatatttacctaaaggaatataaatcattccaccataaagacacatgcaagtgtatgttcattgcagcactattaacagtaacaaagctgggcacagtggctcacctcacgactgtaatcccagcactttgggaggctgaggtaggcggatcacctgaggtcggcagtttgagaccagcctgaccaacatggagagaccccatctctactaaaaatacaaaattagccaggtgtggtggctcatgcctgtaatcccagctacttgggaggccaaggcaggagaattgcttgaacccaggaggcagaggttgcagtgagccgagatcacaccattgcactctagcctggtgaaggagcaagactccatctcaaaaaaaaaaaaaaaaaagaaagaaagaaaaatacacattcagaggagacaaaaaataaaaaacaatgatgcatgcccacaggatctagaaaataacttcttaagggcaaatctaggagttattggccttaaagaagagatagagaaagagataggaatagaaagtttgttgaaagggataataacatagaacttcctaaacctacagaaagatatttatatccaagtacaagaaggttatagaacaccaggccaatttaacccaaagattacctcaaggcatttaataatcaaactcccacaggacaagggtaaagaaaggatcctaaaagcagcaagagaaaagaaacagataacatacaatggagctccaatacatctggcagtatatttttcagtggaaaccttacaagccaggagagagtgacatgacatatgttaaagtgctgaagggaaaaaaccttttaccctagaatagtatatccagcaaaaatatccttcaaacatgaagaataaacaaagacttccccagacaaacaaaagctgagggatttcatcaacactagactggtcccataagaaacgcttaagggagtactttggtcagaaagaaacagacattaatgagcaacaaagaatcatctaaaggtaaaaaactcactgttaagagtaagtacacagaaaaacccaaagtgtgataacattgtaactgtggtgtgtaagtagaaagaataaatgataaaccaatcaaaaatagtaactacaacttttcaagaccagtcagaaaaataagataaaattagaaac

SEQ ID NO: 35715 - DNA, 2300 bp, Homo sapien
aggaactaaaacttaaatacattttgtgaaatggttgacacttcactgataatgatttattgcttggattaataaattttccaaaagttgtcttatgtagaatatggtttgcaaccagcagaaccattaatctatactgcaatgatatgcactatgtataattgtttaaaagcctctacttaatgatgtaaaatgctctatttaattacacatttgggtaaactgtatactaacatctgatggcatttttccactgtttgttgcttttttcaaatactttattgtacaaagctgttcttaatatttttcaagtttttttctttgaattttgctaatgttttccttgaattatgagcactgacagaatgtgcttagcacttttggctattcacacagcttttgagcatgatttgcatccaatatttacattgctagcaataataagccatctgtgagttttgtcaaaagttattggggattttttaaattttagaaatgcaaattattgtttctttgaactaactcttatgcagttgcaaaggcatttccagttgttatagtttgtgtacaatatcaggtgttccagattatgattcattattaatatcattgcttccttgttccctctgaggtccagaagattcatgtttacaatatttagaaacaatgttaaaaaggtatccaaagtttgtcactttattattagtttgttcttaatattctgtttaagtttttgaattcatagatatcaaaacgctgcacaattatgatttccacaggaataacaacacactaacaataagaaccaaaaacagcaaataggctgcctacaagttttgacaatattaggataatgataatgacagtttttctaaatctcacagtaaagaatgcagcaacccagcaacactgctacctgtggcctcaggctgcagtgtcagctcttccctgggtctccagcctgccagtctaacctgaaaattatgtacttgccagcccccacagtcacgtgagtgaactggcccaggctggtcaccagggtcagtttctctgtgtgtcattaattcattcagtcttcagcagtctctttggagctgagatgtacctaccatctgccttttgggtgcttagggtggagaaccagaaaagtataacctagtgtgtatcctcaaagagctaacaatatggggtggtacctataggtctggaaacactttactgactctgtgaggcataccaggagacgtcagagaacagtccctcctcaaatgccaaatgagatgcagaagaaatagtttgctcaagttcatgggccagatatcccagtggtcagggagtttcatgaatgagatggaactttgcatggaacccgagggatgtgtatgatttgagtagatgaagaaaatgagactttccaagcagctagaagttagggagcagcaagatgtgtggtgggattgagcacagttggttcagaggatagactgcagttttaataatttgtagtaaatatctcccaactgtttggcactattggagcaagttcttgaatgccaaatgaaggcataaatcagtaagaggcataataaaaggctgagcagtgcttggctttttacgaactgatcctgataggagcagctgttcaacaaagttgccaggtcaccgttacatagtccctgccttctaggggctcactgcctactgggagagacagtctgaaagttggtggagcatgtaactgttggatgaggagtttgagcctgtggactgtgggacccccgaggagggtgtggctactctaggcagaacaatcccacagtttatttatatttaaccttgaaattcattagaggatttttcagcagaggtttggtacttgttaatgttaaggtttgcattctctagaacctcaaggaaagctgtaccgtgcataatgtaccctcttatgttaatgttgtgtactgtgatcctgtttcagggacttgcacttaggaatctgttacagtgagcacagaagcagacctgtgggctcatagtcttcaccccccacccatatatacaagatgaacagagtggaggttaaacaacttgactaaacaacacagttcatggtaaagcccaagactgtacctgcccatccactgccttttccatgtatcctggaactgagcatagacctcttcccaggcagagctgacagcaagtaaaggagatcataatcaggggaccaaacaactttgtctaaagtgtgaatgtcacctaaggagaagctgtgagatcagaagggtggggcagaggag

SEQ ID NO: 35716 - DNA, 2300 bp, Homo sapien
agagaggctcaataattttctttatttttatttcatagaattcctgacctcaaagaacatatctatgagtgatttctgatagggaaacatgttgaccttgtcccaaatacctagtgctttcaaaaaatagtaacatgtctaacagtctatacaaattcttctctcttgtcaggtagaagtgagagcaagagtcgtaacagcaaacacccttctgacctctgaaatgcttcaaactttagattacaaagattttgttgtcacggaccgggacacagctgggggtgttggaaaccacacccacttctgcctgagggaaagacaggatagtagctaggtgaccactagataccctctctcagagttgaagggtccttaagcctgagaggtcattattgtcatcatctgtgccctgtaatgaggtgttagtaggggtgatatgtatttcttctggactgggaatttaactgctggtttatgttcttccagagctccctctttgcccactagcagggcattagctggtgctgaagacagtggctgcttggcgagcctggatctccaagtgaccccctcagcaactcctgatgaacaggtagcatgtaaaagaaatctttttggtttataccagtgagatacgggagttgtatatcattgcagcataatctaggctatagatgatgcaatactgctacattagggtctttgatttctagtcaggccctatgcctaggatagcttactgctggcacactcttcagccagtctctcagctctgcacagcaccagatatgccaggattttggcctttgattcagagctcttttctggaattttcttcatgaccagagaatacctctgtcttgctttgctgacaagaggtattaatctagaaatggctatagttatagttcatacaggaaatgtgttgcaaaaaattgagctaatctagagaagagaaaataaaagatgggaagtcttagttgcattcaaatccctggttccagttgtacctgaggtgcagttacattattgttcctttagtttgctaaataagataatgaatccccatgttgacaaggttaagttagatttctataatttttctaggaataacatagtgtttttatttgcccagatgttatagctcacctaaaaaaaccctatctatccagggcttttgttgcctttttttttttttttgagacggagtctcgttctgttgcccaggctggagtgcagtggcgtgatctcagctcaccagaacctcagcctacgggattcaagtgattctcctgcctcagcctcgctggtagctgggactacaggcatgcaccaccacacctggctaatttttgtatttttagtagaaatggggtttcactgtgttggccaggctagtctcaaactcctgacctcaggtgatctacccgcgtaagcctcccaaagtgctgggattacaggcatgaaccaccatgcctggactattgccattttcagtgttgtgtccagtgatgtttccttcacaccaagaagtcttcaggggattcatatatggattgtgaaatcctctagtgacatggaagtttctgtgtcatgcagatagagaaattgtgatgcctggatgcctgaggttttttggagtgaggtactatgcatttgcaagtaattgtaaactgtataatccaggattaaaagataaactattgttgcatttagaactgtgtttagaatacaataatttgttgttgttttgtaataggactgaagccaatattaaagcaagtcaaccaaaggttctctggtgtagacaagacagcaaaaggacagactaccttgtggaacctagcattgttctccttctgcagcactaagtaacatttgttctccgttaagatctttgcaaaccacacacaagaattgctggtcatcctgccaatagatgctgctcacagaaccaaatttcctgtgctgaattgtcactcatgggcttgagagtaggagactggagaccaaggtggctagaatccagttgggcctgatgtctccctgttgaaagggctccttgtggaatgaatagcacatggctcctgtggtggatctgatagtggcatagcaccaagtgatgcaggcctgccaggggccacagacacagaagatgctcccggggtcccccatgtactccagacacactgcaggccacctctcccagcaggttgccagtcatgggccccatcatcatgacttctgtccaaggtgtgctcggaaatctcttccttaactgtgactttctgacaggtgga

SEQ ID NO: 35717 - DNA, 2300 bp, Homo sapien
ggtgcggtggtgtatgcctgtagtcccagctactcaggaggctgaggcaggagaattgcttgaacctgggaggcagagattgcagtgagccgagatcgcatcgctgtactccagcctgagcaatagagctacactccattaaaaaaaaaaaaaaaaaagccaggccaggtgcggtagctcatgcctgtaatcccagcactttgggaggctgaggcgggcagatcacgaggtcaggagatcgagaccatcctagccaaggtggcaaaaccccatctctactaaaaatacaaaaattagccaggcatggtggcgcgtgcatgtaatcccagctactcgggaggctgaggcaggagacttgaaccagggagtcgggggttgcagtgaaccgagatcacgccactgcactccagcctggctacagagcgagactccgaatcaaaaaaaaaaaaaaaaaacaaacaacagcaacaacaaaaaagccatttcttgatcctgcttacctgtgtaacaccatcttctctttcgctgcagtgaagttgtctgtgtttatctctgtgtttatcttcgtttcctcagttctcatcattcttgaacttctgcagtcctccttcctcttgctactcaatttacactatccccatggtcatcagaggtttttcccttggtcttctttctggcacctgataccactcaagctactacttccccacgtctacatttgctctcttttgtcccagaaaattattggatacagtctaggatacaattgctccctttgtccccacatataccctacacaccttgcctctcctacaaacctatccagaatcttcttaattcccctcacattcccaaaatgagctgagcagtctttgaagtaaaaattaagctatagttaagtttcacctccatttcacttgtgcattttactcctttttttatttttttaaacctctttcaaatgatccttgggcttcgagtaccatgatctacccagacttgcattccctgggctgtgttctagttctggtcatgtcagcttttcccttctgatgaatccttgtaattacttgagtctcattctgtcaggcaatagccacagtgaagaagccagtgtgcgttatggcaaagcccaggaagacgtaggtgtgaatttttgctttaccatttcttgcctgtgtgacttatgccatggggcttcactggtctgggtcccagtttctcatctcttagatgacatcattttgttgggaggattacatggagtgatatgtataatatatctgataactaagtggtttcagttagtggtagttgtttttatttgacatagtcttgataagtattaatttcttcctaagcccagggtatttgtattttgacaacaaataagttttaagtaaatcaatctatagatattatggaaatctggacccctatatcctagctgaggaagggtatctggcacccattgccacgtaggagcccctgggctccaggacaccagggaaaagaggttaaataggtccccctcctctgacatgatacccagtgattcagtcagggtacaattgggaaaacaacccataccccagggactggttacaaaagtcttgaatagctaaacgcagaacaggatggttaagttgcattatgtagacaacagtgattcaggtgggcaggccctacctccttgaggtgttatctgtggacagatttttgtgcgattgtggcacaaccctgggtttctttcttcatgtgcctgttcttaatgggcccaggagaggtaattcaagggagcaagggacctgtagaatgatcatgtcctcttttttctagccataaggttatgaatcatatatctcgggggtgtgattctgaaggaaagaagtgtgtgccatagcaggagaatggaaggcagacagctgttgctattactagagttttagcagcccccgtaactcagctagcccagactaggatctcaatatggggtgagatgtattttccaatattgaatagcaaatgatgtaactttgtcatcttcatgttgatcttaaacatctctctgatgaacagtataagaaaacaaatgatcacttagaggatcctgtttggtagttaaaaccgtattaaaatagagagggaagaaattaagcctccttgatggtgaagagattgggaaccaccactccagtgttagaaaatgtcaaatgacagaaggtgggctatattaagtgggaatttccaaaccccaccccctggaaggaaggaatgcttggtgacaagccttagaggag

SEQ ID NO: 35718 - DNA, 2300 bp, Homo sapien
tttccttccatattcagcataaaatccccttaatatcagtctctaggcaagcacattcttcacagtccttagaactggacctcctcttgttaatttccttagtctaatcacattcctcctggttatctacaaacagaaagccagaaaggagggctatcaacatcttaagcgccacaaattaacaaatcaaaaccaaatctctctctccctccgaagccacggctaaggaggctcactgcccagttagtggctttcaaactacccttacaagtgagacatcttgtgaattagaacaagtgctgctgctaaaatccctaacggctacatagcaatgtgaaaaaaggtatcaaatgtaattttctcaaatttaatcttcttcaattcttggcacaaaaaaaggaacagtaaaggtagacaactgtaattagcatgtgtgatcccaaatctttataccttagatactggattatattttcagcaagtaaatagtttctggctcccaagatgagaggttaaataatgcagggtgtttgtaaacagcagcacaatttacaccggaaattagggccctttctcaccgaggagagtacagcaaaatctgctcatctctttcaatgaatattctccatgactagtgctggcggcggggaggcggagcaagctatcttttctaccagccgtgtcacacccctcctagcactaacccctcctcctcagccttttcacacctctacccactactagcccctccccagccccatcacctcttcccgggcccctcacacctctcccagcatactcttccccagcctcatcacctcacccacttcctccaaaatcactgacctgctaagcttccagcagcaggcgggcaaagcagggaggctgtaatgcaaaagtccgcagtccctacacaaacactatctgctcctgcggagaaactcaagtcacagccccagaagtggaaagaacaggccttggctctcacccagttaacaagcgtttatccagcgcacgtgttgcggtcggaccccatgcgaaggagctaaggacacaaaggtgagcagcagagacgcggttccagctctcccccggctcccactccagcgggataggtagataatttcggtaaatttcgccaagcaggggcaggacaaagagtatttgaagtctaccgcggggagaacttacctaatccttgaatgttaaaaggctaaaaactccactagtcggaagtgacgtgccagcttagccccgcaggtccgccacgtaattggccgccgccacagctagccaccctctccccagactggcccgaagagaggaaaagtgtggaagtccacaagccgcccccgccccgccctcttcgtcgactttcagctgcaccgggaggcggcggcgcctggccagagccggggcctggagcctggactagacagcctcgccggccggggcgccagtccagcgccctgcgggcaatgggcttcagcgctcgagcacgcgcatgcgcgggcctgtatctccagaggattcctcgggtcacctggacgccagcatctcagccacctgcccctctgggtcccttcttgcccttgattccccctgctgcttctcatcgccagccctcctcctccttcttccgcaggcaccgctagacccggccgcggccgcccgccgacaccccagcttccactgacacgagcctcggcgcggcttccgcttccggcgagtattgtgtgtcgcgccgcggggcgggggcgaggggaggaggaaggagggaggcagcgctccggcggctccgcgccccgcactcccggacccgaagccgggaaggtaggtgctgtcccgccgccgcgcccgagcctggggcctgcgctcgccggccggctccgcaagccgcgtcccagcgccccgcgactgcgtcaccggccccccgcacgtaaccacagctgcctccgcccgcctcgggcccgggcggacgttttgccgccccggcgacgtcagcgcgtccggcgttgcttggctaccccgccgttcccccgtcccgctgctgctcacctccccgggtgaaactctgacgcagtcaccgcgggtctcggcagcgtcatagcggcgggcatcccatctgcacgtcacacctctttctcacctggacacgcatcccttcctaccctgccagccacgacgtttcctctttcccctctccaatgccccagccccagatctggcggaagaagatggagaacgggggtgggacagagttgtggacaacctctcaggagagggtcgcaaggtgggac

SEQ ID NO: 35719 - DNA, 2300 bp, Homo sapien
ggaaaatctgaaattattcttccttttatccatcagactagcctaaaggaaatctgctctcttcttggaatgacatttcacgcaacattccatttctcttgtgttcatctggacactcagaactgctgaaaactgataaattatggcaaccatattaaatattgctgagctcaggccaacgacttcttgaaaagagagcaacgagtctatttgtagtgactggaatctttcaatatagctattgataactaacaccctgggcatagtgtgtctccaacttataggtcctggagtggttgcgaattaagagacacaaaagaggcaatgagatctccctcaagcgcagcctcagaagaattggaaatgcataggagagatttataaaacacaaggctggccccctactccatccttaaaacatccatacttttagccatgggtaagttgatttaactatccccataaccttttctcctcccgacccccatccttctccagggacctactggaaggaaggaaatttggtagatctatgtgctgagagataagtggccatgtaatgaggtaggttaacaacaattgttcctgtatatattgttggcacacacaaatgtgtttgatttggagtaggaactgataacttctttggatttgaatttcttctgtcagcaataggagagaagttcagtcagatgatttctatctgtgggaatccaactttgacttgtggtgatcctaccccttcctcagtcttttacaaattaagtggcctcctcacctgagacgagtagaactgtatgcacagtaaggcaccaggacggatctagactggcaaagaagtggtgagagaaatggggaaagggttagggaagaagggagaggactctcaactacagtcatagtgagaccttgagtgcctctgcgttagtccttcctcttcctctactccttgtgtctcagctgaagggcaaacttcagggacaatctcattttgtttctaccactgttcagggtcccaccttgcgaccctctcctgagaggttgtccacaactctgtcccacccccgttctccatcttcttccgccagatctggggctggggcattggagaggggaaagaggaaacgtcgtggctggcagggtaggaagggatgcgtgtccaggtgagaaagaggtgtgacgtgcagatgggatgcccgccgctatgacgctgccgagacccgcggtgactgcgtcagagtttcacccggggaggtgagcagcagcgggacgggggaacggcggggtagccaagcaacgccggacgcgctgacgtcgccggggcggcaaaacgtccgcccgggcccgaggcgggcggaggcagctgtggttacgtgcggggggccggtgacgcagtcgcggggcgctgggacgcggcttgcggagccggccggcgagcgcaggccccaggctcgggcgcggcggcgggacagcacctaccttcccggcttcgggtccgggagtgcggggcgcggagccgccggagcgctgcctccctccttcctcctcccctcgcccccgccccgcggcgcgacacacaatactcgccggaagcggaagccgcgccgaggctcgtgtcagtggaagctggggtgtcggcgggcggccgcggccgggtctagcggtgcctgcggaagaaggaggaggagggctggcgatgagaagcagcagggggaatcaagggcaagaagggacccagaggggcaggtggctgagatgctggcgtccaggtgacccgaggaatcctctggagatacaggcccgcgcatgcgcgtgctcgagcgctgaagcccattgcccgcagggcgctggactggcgccccggccggcgaggctgtctagtccaggctccaggccccggctctggccaggcgccgccgcctcccggtgcagctgaaagtcgacgaagagggcggggcgggggcggcttgtggacttccacacttttcctctcttcgggccagtctggggagagggtggctagctgtggcggcggccaattacgtggcggacctgcggggctaagctggcacgtcacttccgactagtggagtttttagccttttaacattcaaggattaggtaagttctccccgcggtagacttcaaatactctttgtcctgcccctgcttggcgaaatttaccgaaattatctacctatcccgctggagtgggagccgggggagagctggaaccgcgtctctgctgctcacctttgtgtccttagctccttcgcatggggtccgaccgcaacacgtgc

SEQ ID NO: 35720 - DNA, 2300 bp, Homo sapien
tttttttttgcatccctgacccgacatttatccctatgttaagtcctaactccagatttgccccttcttgttattctccatcttctcttccaatcaattcaacctctttgtttctccattttcaaaacttgtgactcccagccatcaaccttttttttcttgttagtaaactgacacacaacccccaattgatctatcttgtctcttacctctgctttctcttgttagaaagagaagcttccttcaactctagctcagcatacttctcctgatccaggctcattccacttatatcttagaaccaatagttccagacactgtatcctcgtttgacatacgtttctaacagacaagaaaggaatctgagaagtaaaaaagtcataaaaatattaacatttcttaaattaaccatattttaaagtttaatgttataagagctttatgattaatccactggagtctaagcttgattctctgacactgttctctcattcttctaaatcacaatatccaaccttttggcttccctgggcccactggaagaagtgtcttgggccagacataaaatacattgacactaatgacagctgataagcttaaaaaaaaaaaagtccatgcataacttttgttctatcaccaccacagaaggtccatgcataatttttatcagccaccacagataagcaaagagagtcctcatattgaaagggttagataccactgctctaaaggctaacaaatggaatgaatgaggcaaaggcaacctcctcttttcaggaaaatctgaaattattcttccttttatccatcagactagcctaaaggaaatctgctctcttcttggaatgacatttcacgcaacattccatttctcttgtgttcatctggacactcagaactgctgaaaactgataaattatggcaaccatattaaatattgctgagctcaggccaacgacttcttgaaaagagagcaacgagtctatttgtagtgactggaatctttcaatatagctattgataactaacaccctgggcatagtgtgtctccaacttataggtcctggagtggttgcgaattaagagacacaaaagaggcaatgagatctccctcaagcgcagcctcagaagaattggaaatgcataggagagatttataaaacacaaggctggccccctactccatccttaaaacatccatacttttagccatgggtaagttgatttaactatccccataaccttttctcctcccgacccccatccttctccagggacctactggaaggaaggaaatttggtagatctatgtgctgagagataagtggccatgtaatgaggtaggttaacaacaattgttcctgtatatattgttggcacacacaaatgtgtttgatttggagtaggaactgataacttctttggatttgaatttcttctgtcagcaataggagagaagttcagtcagatgatttctatctgtgggaatccaactttgacttgtggtgatcctaccccttcctcagtcttttacaaattaagtggcctcctcacctgagacgagtagaactgtatgcacagtaaggcaccaggacggatctagactggcaaagaagtggtgagagaaatggggaaagggttagggaagaagggagaggactctcaactacagtcatagtgagaccttgagtgcctctgcgttagtccttcctcttcctctactccttgtgtctcagctgaagggcaaacttcagggacaatctcattttgtttctaccactgttcagggtcccaccttgcgaccctctcctgagaggttgtccacaactctgtcccacccccgttctccatcttcttccgccagatctggggctggggcattggagaggggaaagaggaaacgtcgtggctggcagggtaggaagggatgcgtgtccaggtgagaaagaggtgtgacgtgcagatgggatgcccgccgctatgacgctgccgagacccgcggtgactgcgtcagagtttcacccggggaggtgagcagcagcgggacgggggaacggcggggtagccaagcaacgccggacgcgctgacgtcgccggggcggcaaaacgtccgcccgggcccgaggcgggcggaggcagctgtggttacgtgcggggggccggtgacgcagtcgcggggcgctgggacgcggcttgcggagccggccggcgagcgcaggccccaggctcgggcgcggcggcgggacagcacctaccttcccggcttcgggtccgggagtgcggggcgcggagccgccgga

SEQ ID NO: 35721 - DNA, 2300 bp, Homo sapien
cagaggcaaagtggaagagatcctgcaagacacatctatcctttcacagtgttcccaagggaacttggaaaggagagtcaggtattagaggaaagagaagggtatttgtatacaaagccctggccttaaagaatgttacttagtagctactcccaaattgtcagccttcttacctggccaaggtgtccaagccagaaaggaaaaaaggttatggagtctttctcaccctaaggacagggtggaagagggtggtatatagggaagggccagataggcaacttcatttggcttgtgtgcatctggcctggaactggtgttaagccaggcttttgcttgtttgttgccatccctcaccctttgccatttcccttttcagagaatgtaaatgattttcatgttaggccaaaataaacaacttatagggtacatatgttgtcataaaaggtaaaagtgatgcatgccaaaccaaactaaaccaatttggattatctgctattcgggtaatcttcacagaaatgactgagagaagaatctgcagtttactgagggcatttcagttcctcctaccacctcaacaggactttgtccagactctcctcctcttacctttgtgccttgactgtggttctttgtggcaagatactttggttggttaaaataatatggaacaaaggatccactgaagtgatctctgtgttgtgtggtaatttggtgacagccttgtactgatgtgtaagaatcactgggtgttagacatgcatgttcctgggtctcacccttagtggttagtcaaggtctggggtgggccggacatctacattttatttatgagacagagtctcgttctgtcgcccaggctggagtacagtggtgatctcagctcactgcaacctccgcctcccaggttcaagcaattctcctgcctcagcctccagagtagctgggattactatggactatagccatgcaccaccacacccggctaattttagtggagacagggttttgccatgttggacaggctggtctcgaactcctgaactcaagtaatctacctgcctcagccactcaaagtgctaggattacaggtgtgagccaccgtgcccagcctacatctacattttaaacacaccactctcatttgagtccgaaaacccttgtgaaactagttccagaggaggtttcagccatgtccttcctcccagctggagccctgcttgtctgtccccgcctggcactgggtctgaaattggagagaagtcatcctctcctgacttatgctgccctccccatctcagggttcattgatcttctacccctccaattcatgtccctctgcttctgacttcagtaactgatagtcactatgagtcacaggacaccagacagaagaactggaagatagaagaggtcagagggaggggtgtgaggtgaatgtcagtgtggggagtggggtgaagtttcaggggcaggggatgctgttgacagatttctgtgctgtacctaagcctaggagttagaaaccattcactcagaaagtgaggatcacctactgtgtgtccagcactgcataacaggaagtgtgtttctttggtaggtggaatagtaggagtaaactgtgctttctgaggaccgggagtccttttccctccctccagcaccctcatgatccttcccactttcacccccactggcaccagtgcttttttttaatgtattacctctgtgccttccgtctgtagatcttacaggcatctgcctcggacctcaggagagtagggcagaagctctagctgggtataaattgcacataaccatctccccaacgtagctacataaagagaccagccttctgtcctgaaaatggccgatttaagatcctcacctgctccactaggtctctaggtgatataattggtcatgagcttgaggaagacaaaagcactgaaaattcataaagggaccctgggcatggattgctggggttgtgtttagaaaccgatgagtttgtgaggcctccgggaggctcccgagggcgcggggactacgtttcccaggaggcctcgcgcggacgcccgggcggggctgtgcgaggggtggggctgcgggaggccctggagcgcggcggtgatggcggggccggtgaaggaccgcgaggccttccagaggctcaacttcctgtaccaggtgagtctgcgacaagggccccacggggacggtgctcggcgtcccagagtgactgctcccctcccgcaggccgcccattgtgtccttgcccaggaccccgagaaccaggcgct

SEQ ID NO: 35722 - DNA, 2300 bp, Homo sapien
tgatctcggctcatcgcaacctctgcctcccgggttcaagcgattctcctgcctcagcctcctgagtaggtgggattacaggtatgcgccaccacctccagctaattttgtatttttagtagacatggggtttctccatattgataaggctggtctcgaactcccgactgggattacaggcgtgagccaccgcgcctggccaccccctgtatctaaaataaaagttaaaaatttaaaaataagtacataagagaatgtatgctatgagccaagaatgatgcttgcaaaattttgcaagaacaacacttatgaaaatgaaaaataatcactcttcttgttaccaaaaatcttggtagctgcagaaggtgggatctttcctcactgggagtcgcagagccaatacatgaaaccaaaagtgagccttaagcagagcaagctttatttcctgcacaggacttgtaaagaggagagcagctctgccaagtcaacttctccactagtgaggcggctagtgaggggtgagggggctaaaatgtaggattgctctaatgaaggggttgggcattaaaagtgagggggaggaatattcatatgttttatgggaacaggcagtgaacttctccaaactggtaataccgctttccttttggtccttttaggacttcttctactcatcgtcatggagatcgtcaactgtcatggcatggatgggagcgcaatttagcctggaaacgggattacaatgaagcgtgaggtctttttgaagtcatttggccggctctcttggttgtaacgagtctcagctggtttgactacaaaggcaacttcttgaagcagatcctgtttttttgtttttgtttttgttttttgtttcttgttttttccccctagacatctcactctgtcgcccaggctggagtgcagtggtgtgatctcggctcactgcaaccaccacctctcgggttcaagcaattctcctatctcagcctccagagttgctggaattacaggcgcgcaccaccacacccggctaatttttgtattgttagtagagacagggtttcatcatgttggccaggttagtcttgaactcctgacctcgtgatctgcctgcctcggcctaccaaaatgctgcgattacaggcgtgagccaccgttcccggcctatacgttgtttattttggaaaaattaaaaattaagttttttttcattaaagatatgttatttccgatcaagagatcaagaccatcctggccaacatggtgaaaccccgtctctactaaaaacacaaaaattagctgggtgtggtggcacacgcctgtagttccagttactggggaggctgaggcaggagaatcgcttgaacccgggagaaggaggttgcagtgagccgagatcatgccactgcactccagcctggggacagagcaagactctgactcaaaaaaaaaaaaaagttgtttctattaacatgtaatgggttattaatattctcttaaatgaattaatatttttaatattttgttttaatatcttttaatttatatatgataaaaattgatacaatccacagaaacaaaatttatttgggtcctcactaatttcttttttcttgttgcccaggctggagggcaatggcacgatcttggctcaccgcaacctcctcctcctgggttcaagtgattctcctgcctcagcctcccaagtagccaggattacagccatgcgccaccacgccggctaattttttggacttttagtagagacagggtttctccatattggtcgggctggtctcgaactcccaacctcaggtgatcagcccgccttggcctcccaaagtgctgagattacaggcgtgagccaccgcgcccagccaggactaatttctaagagtgtgcagagataccgaaacctaaaagtttaagaactgctgattgctgggaaactctgcagtttcccgttcctctcgtaacctggtcatgtgtccttcttcctggatactcatgacgcagactcagttctcattcccaatgggtgtcgggtttctagagaagccaatcagcgtcgccacgactcccgactataaagtccccatccggactcaagaagttctcaggactcagaggctgggatcatggtagatggaaccctccttttactcctctcggaggccctggcccttacccagacctgggcgggtgagtgcggggtcgggatggaaacggcctctaccgggagtagagaggggccggcccggcgggggcgaaggactcggggagccgcgccgggaggaggg

SEQ ID NO: 35723 - DNA, 2300 bp, Homo sapien
agggcctgagaagaggactgtcgcaccgtaagatcgccacatccggtcctcggttactatggtaacagctgcaggcacaacttcgtgccctttgacctccccccaaaagtccttgtcccgcttgggtttcccttctcgcccgcttttgcacttatgatctgtaaacctgctccttatcatcgttcccacaaggaatttgggtcccaacaggtcggcacccaggactctcagaccgccgccctcccctaaagacctctgaccgtgcccccggtgtagtccagcaacctggacgcagtctcggctttccactaaggtcaagcccggggctttgtagtatagcctcagcgtgtccacgccccctctcccctaggtagtaggccccgccctccgctccgccgccccctccaggtgagtggtaggttctcccgggagcgcaaggtagtgatgacacgcgccccccctcctccgaacgcgagttggtagcgtccgtgacggagttagcctggtcctcccacgcgcgcctccttcctcgccgccggggcgccctctcggtgccactggctctcacgtgccagtagcccaccccgcatcatcctctcgcctcgctcctggagggaagtgactatatctcccccgtccgccttccatcgccgccgcggcggtaattctgtcgggcccgcccgctgacgtcacctgctagccccgcctcctctagggtcccgggcccctgcggcgggggctgccccggggggcagtcagttgaggcggcgggagctcggcggagggcgggccaggtgactggtccgggccatgccgaggaagaagccattcagcgtgaagcagaagaagaagcagttgcaggacaaacgggagcggaagagaggtcagtgcgggagcgggaggagggggcggggctcgggcttccgcacatctggaaggaggggtgtgcccgctgcacctctggggatcgtgggagggggtcgtgggaccgcgtcaaccctcgcggcctatcgcggaggggatcccccaccccccctacatctggaaggggtggggaaggatggagagttgggggaggggaatccctccagctagcacggggcgccgtccccactgctccctgaaggagtgactccccccacgcacatccgggagggtcccaaatagggtgtctgggaggactgaacatcggaagaagttgagtgggatgaaagggagtcaggccgatgggggagagggtcttatggcccctgagagctggccagcactggcgtcaccggcccctccccgcagggcttcaagatgggctgcgctccagttccaacagccgcagcgggagccgggagcggcgagaggaacagaccgacacctcggacggggagtctgtgacccatcatatccgcaggcttaaccagcagccttctcaggggctgggtccacgaggctacgacccaaatcggtgagggtgggagggggcgctggtcccggctttcccgcctacccggaagtcagagctttgggggaaagcgggctgctactggtgaagacggtgggcctgggatgccacagttctccgctagccactcggctccccacagcgggccacagtcttcctttccagaggggctggagagagttgggcttttagaaggagaaggctgagtattgcctgaaagaaggacttgggggaagtctgacttgagagaggagacttgaacgactctggagagaatggtttgcgaagttgattgtacaagaggggagaaaataggagtttgtggccacaggattgctctggatgtctcggtccctgttcccttagataccgactgcattttgagagagacagcagggaggaggtagagaggagaaagagagcagcccgggagcaagttctacagccggtcagtgctgagttgttggagctggacatccgggaggtgtatcagcctggctcaggtgagtgagagcaagacaggcattgggctggggaaggagtttggaaaggtaaaagccgactgtgaggaaggaggggtctgggatgtactcttgaatcctgaagatttcctcacacttggactttttcctgaattcccagttctggactttcctcgacgtcctccttggagctatgagatgtccaaggagcaactaatgagccaagaggaacggagcttccaagactatcttgggaagattcatggggcttactcctctgagaaactcagctactttgagcacaatctggaggtgacagtgtactctagggacaggagtggggcatagtgacctatggtcaa

SEQ ID NO: 35724 - DNA, 2300 bp, Homo sapien
ctgagtttctcagaggagtaagccccatgaatcttcccaagatagtcttggaagctccgttcctcttggctcattagttgctccttggacatctcatagctccaaggaggacgtcgaggaaagtccagaactgggaattcaggaaaaagtccaagtgtgaggaaatcttcaggattcaagagtacatcccagacccctccttcctcacagtcggcttttacctttccaaactccttccccagcccaatgcctgtcttgctctcactcacctgagccaggctgatacacctcccggatgtccagctccaacaactcagcactgaccggctgtagaacttgctcccgggctgctctctttctcctctctacctcctccctgctgtctctctcaaaatgcagtcggtatctaagggaacagggaccgagacatccagagcaatcctgtggccacaaactcctattttctcccctcttgtacaatcaacttcgcaaaccattctctccagagtcgttcaagtctcctctctcaagtcagacttcccccaagtccttctttcaggcaatactcagccttctccttctaaaagcccaactctctccagcccctctggaaaggaagactgtggcccgctgtggggagccgagtggctagcggagaactgtggcatcccaggcccaccgtcttcaccagtagcagcccgctttcccccaaagctctgacttccgggtaggcgggaaagccgggaccagcgccccctcccaccctcaccgatttgggtcgtagcctcgtggacccagcccctgagaaggctgctggttaagcctgcggatatgatgggtcacagactccccgtccgaggtgtcggtctgttcctctcgccgctcccggctcccgctgcggctgttggaactggagcgcagcccatcttgaagccctgcggggaggggccggtgacgccagtgctggccagctctcaggggccataagaccctctcccccatcggcctgactccctttcatcccactcaacttcttccgatgttcagtcctcccagacaccctatttgggaccctcccggatgtgcgtggggggagtcactccttcagggagcagtggggacggcgccccgtgctagctggagggattcccctcccccaactctccatccttccccaccccttccagatgtagggggggtgggggatcccctccgcgataggccgcgagggttgacgcggtcccacgaccccctcccacgatccccagaggtgcagcgggcacacccctccttccagatgtgcggaagcccgagccccgccccctcctcccgctcccgcactgacctctcttccgctcccgtttgtcctgcaactgcttcttcttctgcttcacgctgaatggcttcttcctcggcatggcccggaccagtcacctggcccgccctccgccgagctcccgccgcctcaactgactgccccccggggcagcccccgccgcaggggcccgggaccctagaggaggcggggctagcaggtgacgtcagcgggcgggcccgacagaattaccgccgcggcggcgatggaaggcggacgggggagatatagtcacttccctccaggagcgaggcgagaggatgatgcggggtgggctactggcacgtgagagccagtggcaccgagagggcgccccggcggcgaggaaggaggcgcgcgtgggaggaccaggctaactccgtcacggacgctaccaactcgcgttcggaggagggggggcgcgtgtcatcactaccttgcgctcccgggagaacctaccactcacctggagggggcggcggagcggagggcggggcctactacctaggggagagggggcgtggacacgctgaggctatactacaaagccccgggcttgaccttagtggaaagccgagactgcgtccaggttgctggactacaccgggggcacggtcagaggtctttaggggagggcggcggtctgagagtcctgggtgccgacctgttgggacccaaattccttgtgggaacgatgataaggagcaggtttacagatcataagtgcaaaagcgggcgagaagggaaacccaagcgggacaaggacttttggggggaggtcaaagggcacgaagttgtgcctgcagctgttaccatagtaaccgaggaccggatgtggcgatcttacggtgcgacagtcctcttctcaggccctctggcccgagagcctgttgactctgtgacacactctgaggagctggttgtggtgttttccagcgagggaaga

SEQ ID NO: 35725 - DNA, 2300 bp, Homo sapien
aaatcagcaaatatacaacttctctccattcatttagggatggaatccctgatcttttatttttaagtccttcctgggttttatcccctcccttgctgtcttctctacgacctaatacaaggatcagggccccttcctcctcacctgacttagggtcgccaggttttccattggccatggggggagggcccagaaggctgggtggtcctaagagcagacatgaaaatatggtcatcagaatggattaaaggactgatgattctgttcttaggtgtttttcttgtattacttatttcttaattcaaccagtaaagtcaggtatattttcagcagtcttgggagttctcaccccatctatctgcccttttttctgcaaagctgtttcagggtttgcaaaaagtagatattcaatcaaaggggataatgcaggaaaagatactgacaactttttttcttcaccgtaccgtcgctatccaaaacaacctaagtgtctccagacatgaaccaatccctcaccttaactgctggccagaggactagtttagagaaagctgcacctgtaccttttcagtcaaagtctggatacaaactgtcatcccagtcatcgcaatctgcaacatctctactacccctttcccctactgttctgcggctgcgcaaaagagctctttattctctccacccccgccttctccagaaaggtctggggccgtattgaggttgatggttccagtaagagaactcctggttcaaggctccatttgggagagccccacttccatccctccccagcgcgtgcgcccttcctccttccgttacagccccctccttcgcaccttattagcccctagccccttgcccggacgggcttgacaggcatgtgcacatccctcccagacccctcaccgatgggactcccatcctcctcatctccagtctcttcccgctcgggcagcgggggctgctgctgtgtcggtggctggtgatgattctgcttctttcgtttcggcatcgtgtctgcggcaatggctgcagcgggatttggagggtagtgaggaaggggcacgcggggattctgtttccgcttccggggggtcggtgggcagcaatgctgaggctcccgccattccacttccggaaggttgcggagaacatctgcggcggccgcattccggagccaactgcctccctccgtctctgccaggcatggcggcaacctcacaccttccctttgctgcgtttctataaatgctttgaaaaaattactcttttcttccctcgctggaaaacaccacaaccagctcctcagagtgtgtcacagagtcaacaggctctcgggccagagggcctgagaagaggactgtcgcaccgtaagatcgccacatccggtcctcggttactatggtaacagctgcaggcacaacttcgtgccctttgacctccccccaaaagtccttgtcccgcttgggtttcccttctcgcccgcttttgcacttatgatctgtaaacctgctccttatcatcgttcccacaaggaatttgggtcccaacaggtcggcacccaggactctcagaccgccgccctcccctaaagacctctgaccgtgcccccggtgtagtccagcaacctggacgcagtctcggctttccactaaggtcaagcccggggctttgtagtatagcctcagcgtgtccacgccccctctcccctaggtagtaggccccgccctccgctccgccgccccctccaggtgagtggtaggttctcccgggagcgcaaggtagtgatgacacgcgccccccctcctccgaacgcgagttggtagcgtccgtgacggagttagcctggtcctcccacgcgcgcctccttcctcgccgccggggcgccctctcggtgccactggctctcacgtgccagtagcccaccccgcatcatcctctcgcctcgctcctggagggaagtgactatatctcccccgtccgccttccatcgccgccgcggcggtaattctgtcgggcccgcccgctgacgtcacctgctagccccgcctcctctagggtcccgggcccctgcggcgggggctgccccggggggcagtcagttgaggcggcgggagctcggcggagggcgggccaggtgactggtccgggccatgccgaggaagaagccattcagcgtgaagcagaagaagaagcagttgcaggacaaacgggagcggaagagaggtcagtgcgggagcgggaggagggggcggggctcgggcttccgcacatctggaaggaggggtgtgcccgctgca

SEQ ID NO: 35726 - DNA, 2300 bp, Homo sapien
aatctcagctcactgcaacctccgccttccaggttcaagcgattctcctgtctcagcctcctcagtagctgggattacaggcacacaccaccatgcccggctaatttttgtatttttagtagagacaggggtttcaccatgttggtcaggctggtcttgaactgctgacctcgtgattcgcccgcctcggcctcccaaagtgctgggattacaggcgtgagccactgtacccagccgcaaatttatattttctaacggagttcaatttatcaatctttcctttatggttagtgtgtatacgtgcatttcttgtctgtttaagaactcttagctactcttagaaaatacatttactttctagaataattattctcttaccttttatacttagatctacagtccatttgaaatagatctttgtatatgattatgagtgcaaggtgaaattccatttttttcacatgaatatccaattgatccaatatcatttattgaaaagaccaacttttcagttccatcttcatcataaatgaagtgtccacacatgtatgggcctgttattggactcttcgggacataagtcctattgacttatgtctatcattgtttccaaactgcatcgttgtaactattgtagctttatagtaagtctttttttcttcttgtatttagagacaggatctcactatgttgcccagagtggcctcaaaaactcctgggctcaaaggatcctcgcacctcagcctcctgagtaactgggactacaggcgtgtgccaccatgcccagcttacaaatcttgatattcatagtaagccctcccacttcaagattgtcttgatagtcgccttgatattttgcatttccctataataatgtgtatttccacaaaaacattatgggtgttctgacttggaatgcatgaaatctgtttatcaatttgggaagaagtgacatttttacaacattgagtttttaaatcagcaaatatacaacttctctccattcatttagggatggaatccctgatcttttatttttaagtccttcctgggttttatcccctcccttgctgtcttctctacgacctaatacaaggatcagggccccttcctcctcacctgacttagggtcgccaggttttccattggccatggggggagggcccagaaggctgggtggtcctaagagcagacatgaaaatatggtcatcagaatggattaaaggactgatgattctgttcttaggtgtttttcttgtattacttatttcttaattcaaccagtaaagtcaggtatattttcagcagtcttgggagttctcaccccatctatctgcccttttttctgcaaagctgtttcagggtttgcaaaaagtagatattcaatcaaaggggataatgcaggaaaagatactgacaactttttttcttcaccgtaccgtcgctatccaaaacaacctaagtgtctccagacatgaaccaatccctcaccttaactgctggccagaggactagtttagagaaagctgcacctgtaccttttcagtcaaagtctggatacaaactgtcatcccagtcatcgcaatctgcaacatctctactacccctttcccctactgttctgcggctgcgcaaaagagctctttattctctccacccccgccttctccagaaaggtctggggccgtattgaggttgatggttccagtaagagaactcctggttcaaggctccatttgggagagccccacttccatccctccccagcgcgtgcgcccttcctccttccgttacagccccctccttcgcaccttattagcccctagccccttgcccggacgggcttgacaggcatgtgcacatccctcccagacccctcaccgatgggactcccatcctcctcatctccagtctcttcccgctcgggcagcgggggctgctgctgtgtcggtggctggtgatgattctgcttctttcgtttcggcatcgtgtctgcggcaatggctgcagcgggatttggagggtagtgaggaaggggcacgcggggattctgtttccgcttccggggggtcggtgggcagcaatgctgaggctcccgccattccacttccggaaggttgcggagaacatctgcggcggccgcattccggagccaactgcctccctccgtctctgccaggcatggcggcaacctcacaccttccctttgctgcgtttctataaatgctttgaaaaaattactcttttcttccctcgctggaaaacaccacaaccagctcctcagagtgtgtcacagagtc

SEQ ID NO: 35727 - DNA, 2300 bp, Homo sapien
ttgaaccaggagttctcttactggaaccatcaacctcaatacggccccagacctttctggagaaggcgggggtggagagaataaagagctcttttgcgcagccgcagaacagtaggggaaaggggtagtagagatgttgcagattgcgatgactgggatgacagtttgtatccagactttgactgaaaaggtacaggtgcagctttctctaaactagtcctctggccagcagttaaggtgagggattggttcatgtctggagacacttaggttgttttggatagcgacggtacggtgaagaaaaaaagttgtcagtatcttttcctgcattatcccctttgattgaatatctactttttgcaaaccctgaaacagctttgcagaaaaaagggcagatagatggggtgagaactcccaagactgctgaaaatatacctgactttactggttgaattaagaaataagtaatacaagaaaaacacctaagaacagaatcatcagtcctttaatccattctgatgaccatattttcatgtctgctcttaggaccacccagccttctgggccctccccccatggccaatggaaaacctggcgaccctaagtcaggtgaggaggaaggggccctgatccttgtattaggtcgtagagaagacagcaagggaggggataaaacccaggaaggacttaaaaataaaagatcagggattccatccctaaatgaatggagagaagttgtatatttgctgatttaaaaactcaatgttgtaaaaatgtcacttcttcccaaattgataaacagatttcatgcattccaagtcagaacacccataatgtttttgtggaaatacacattattatagggaaatgcaaaatatcaaggcgactatcaagacaatcttgaagtgggagggcttactatgaatatcaagatttgtaagctgggcatggtggcacacgcctgtagtcccagttactcaggaggctgaggtgcgaggatcctttgagcccaggagtttttgaggccactctgggcaacatagtgagatcctgtctctaaatacaagaagaaaaaaagacttactataaagctacaatagttacaacgatgcagtttggaaacaatgatagacataagtcaataggacttatgtcccgaagagtccaataacaggcccatacatgtgtggacacttcatttatgatgaagatggaactgaaaagttggtcttttcaataaatgatattggatcaattggatattcatgtgaaaaaaatggaatttcaccttgcactcataatcatatacaaagatctatttcaaatggactgtagatctaagtataaaaggtaagagaataattattctagaaagtaaatgtattttctaagagtagctaagagttcttaaacagacaagaaatgcacgtatacacactaaccataaaggaaagattgataaattgaactccgttagaaaatataaatttgcggctgggtacagtggctcacgcctgtaatcccagcactttgggaggccgaggcgggcgaatcacgaggtcagcagttcaagaccagcctgaccaacatggtgaaacccctgtctctactaaaaatacaaaaattagccgggcatggtggtgtgtgcctgtaatcccagctactgaggaggctgagacaggagaatcgcttgaacctggaaggcggaggttgcagtgagctgagattgcaccactgcactccagcctgggggacagagtgagactgtctcaaaaaaaagaaaaaacaaaatacaaacttgccaaataataccattaagaaattaacaggaagccatacaatagaagatatttgcaataaatataacaaataaagatcctgtatctataatatataaagaactcttccagacaagccatttgaaaaattgacaaaaacacaggacaccttattaaaatggagatctaaatgaactaaaggtctaaatgaacaagtactcaatatcattaattgtcaagtaaatgcaagataaaaatataccactttgaaattagaactcttgtgtactgctgctgggattataaaatggtgaaactactatagaaaacaatatgaagaggttcctcttaattaaaaatagaactaccagatgacaaaaaaattaaaaatagaattaccccagaactcctgcttccaggtatatatcaaaaaaaaaaaaatggaaagcagggtcttgagatatttgcagactcatgttcatagcagcagtattcacaataacaaagaggtggaagcaaccc

SEQ ID NO: 35728 - DNA, 2300 bp, Homo sapien
agccaggatggtctcaatctcctgacctcgtgatccacccatctaggacttccaaagtgctggcattacaggcatgagccaccgcgccccagcccaggtcatccttttaaaatgtaggttggatcacatcactctgctcagaactctgcagtgacttccatttaaatcaacagaagaagccaaaatccttaagataatttaaaagacctttcccaatccagaccctgctttacttctcttttcacctttcccacaactctggctcactcgtgccactccagcccctcttgcctccttcctgtttgttccccatgtatgtccgaacactcctgtcacagggctttactccagctgtttcttatgctagaaaggcccttctcctggaaatccatgtggccaaaactaatcttctttaatgatttgcttgaatttcactttactgaggcctcatttaagactaaaatctgtcctcttgatacttttaaacttgatccatattttcttttatctataggatcatctcccctgctggaaacctaatcagagatctttattttattcagtagtatcccaagagcgtagaagagtgcctggcacatactatacactcaataaatatatttgttgaacagatgaatgaaaaaatgaggcagacttagctggctgatggattgattaggggaggaggaatggagaaagaggatgatgacctttcagttttggcccaaataactgaatgacctgtggtgcaatttcttgatggggaagcctggaagagacaggctttaggagtaagaacaagagctccattttgtacgtatgagagagatttattaaagatctcagagaagatgtcccataagcagttgaattcatgagcctggagctcggggcagaagttgggggccagcaagagaagtttgggaatcttcattggttatagatggtatttaaagtcaggaggtgataggtgataagtctagattaaggagagtgtcaaagatttagccctgaggcacttcaacatttagacttcaggagaagcccattagatgcaaaggaaacctatagagagtagtgtccctgaagaaaacaaaggagggagggagcgaccaagtctatcaaacattgatgggagagtgagtaggatggccccagatctgttgactttggcaagtgtgaattcagacaatggtggcaacaaaagcatgattgtagtggtttgagagctgacagaactacaggagcaccttgctcaagctcccatattaagtggtagagttagaagtgaaccaaagtcttgattgtggtgatagtttactgggtttatgcaggtcaaaacttatttaagtgatactttgcagtttattttgggtgccattttattttgtgtacagtttattgtatgtcaattatatctcagtaaagctgttaccaaaaaaaataaatgaaccgaagctccactgcaccgtgacttctgcatgttgggctccagttccctgtttacaattgtacacttcgggattttgtgacacatttcaacactggaccgatcagacctctcccttagccattggtctgcactgtcttttctgcccatgacccagtcagtctcgcgccccatgaccctctcctaaaacacgcgcagtctcctctctcttccccttcctctcgtgtcttccttgcctaccagcctcacctgatgggctcgtgttctctccgtccccgatccactcgggctccggcagctgctgcttgggcgccttcggcatcgcggtggcagaactagaaacgagttacagatagaaactagaatatgctttttaaaaaaacaaaaaacaaaacaaacaaaaaaacagtatgcctcaactccttcatactagtaggaaattattatgttcattccttgagtctcgcggcgtcgggaggtcacggcgtcaggcttcccagacagtcgtaaacgccatgtgtttacgcgactggagcaagcggacgccggccccgctccgtcattgcaggccacgcctccactgaaccagggccacgcccccgagatgacggcgaagctcgcacgtgcgcagcccgggggcggggttggccgcgccagcttggagagccagccccatcggggttccccgccgccggaagcggaaatagcaccgggcgccgccacagtagctgtaactgccaccgcgatgccgaaggcgcccaagcagcagccgccggagcccgagtggatcggggacggagagagcacgagcccatcaggtgaggctggtaggcaaggaagaaacgagcag

SEQ ID NO: 35729 - DNA, 2300 bp, Homo sapien
ttaaaatgttaatcactcttttgcttttaaatacctatgcaatctgcaacaattataagacattctttacctccccaactattatcttgtatgtactggcactaagattatattttgtcctaagtgtcttgcaatctttattcctagattgccacctattttaaccacacaaatataccccaagcaaattacattaaaattgagaggatttaacagtcatttaaaaagttatagcgagctattacttctctctgcccatctccttaccctgcaatctttatgtacagattgcttattaatctggcaaattgaaaggcaccctgcttgtctcacacacaaagaagtggtacttctgggccacaagatccaccatctcttgtatgtgagctcattaacccttttgaagactgctgctaaccagaggaaggtaaccattcctccttatataaacacatatggctttggcagtctggaaattggctggattaccaagggttaaccatcaaaatcctcacttgctggccctccctccaccctctctttgcctgcagcaaggcagggaagagataggtggtaggggagagagaacaagactgtttagacccacaggccctttttaatggagattaagtgaccagattggtccttctccagttctctatttgttctatggtctcatttcttcctctcattatttttggtttcacaacgggaaacgttgatttcttgttgcaaggctggtttttgaaaattcgacacttactatccaatttttttgcgacgtcagcacctcgggctcaggggggagggggtaaaattttggaggaaaaaaaataaaacaaccaaccaggacccaaaactcaattatttagggggcctcattggatcaaaaagtcttttaaaaaataaaggccaactcagtattcatttcccccccacccaactccatttagggaggggggtcgcagaaaaaagttctgagtggattcaaaaaagtaaacgctggatgagtgaatttgggtggtttgggaagggagggtggttgattatttttgaagttatgtagtgacggtccttcggccacagatttcaagtcccaagcagcgtgggctggtggggtgggcaagataggtgggaaggggcagaagacacaagtggttgggctggtggctgctgttttccctttcccccctctctcaggatcctttcaagggcttagatgttgctgcggcttgtttctgttttcctcgtggccggcctgtctttctccgagaaaattcaaacctgggataaaaggaacacaagggagaaagatgtaatcagtacgggttgcttcaaaacactcacaaatgccatctttgttgtccccaaacaaacctgtgtcccatcctgatcgcaaccgctttaagccgtggctctcaaatgaacccatccatccctatcccgcttcccagatccaacgctctccgcaaaattttacccactagacgacaaagtaggcaaacttacctctaaacgaaccccagaatggcggccgcccgctcgggtggagtcttttatacccggacgccgcccaacgcgcccaaacgtgctagtgaaacgcccttgtcgcgagacattatacgcgaggcgtgaactcattggtcaacccaaatgacaactcgccaactgattggctactctcacttcacctttgctccgcccctttccctggcactctcttccgcctccttcctgcctccctgtcgcgtgcgcgtgaccaggagcctagcacctccctttcctctgcttccgccacttccgccctggagaacatttctcacccaggattggtagaaacctaagagcgcatgcgcactgagaggataccgctaaaaatcgccttcaaaattgcttaaaaggcaaactttaacaatgcgatctaagagtcgtagtgactggccaaaaaaaaccgcaattttggggtctaattcgattgtgacgcagttgaaattagcttctcccccatgccttccctttcacgcttccgtcctgacgcaaacgtggggccgccttccgcactgcgggcttgtccttggccctgccctactcagtttcctgaagcatgcgcagttgcctttccgtcaattcctgtcctgggcgtacgtcaagatggcggcgtctgtattaaacaccgtgctgaggcggcttcctatgctatctctcttccgaggttctcacagagttcaggtaactcttcgaaagacattttgcacaacctcaagttggttataccttctcgaggttgtcgctccactgtc

SEQ ID NO: 35730 - DNA, 2300 bp, Homo sapien
tttaaattgacataaatcaacaaccactctccttttctacaattggatcctgaaagaaaagctaagttaggggatatatgcctaaaaaacaatcttatttcagaagacaaataaaaagtctagtacaaggccgggcgcagtggctcacgtctgtaatcccagcactttgggaggcccaggcaggcggatcatgaggtcaagacatcgagaccatcctggccaacatggtgaaaccttatctctactaaaaatacaaaaattagttcggcgtggtggcatgcgcctgtagtcccagctactcgggaggctgaggcaagagaatcacttgaacccgggaggcggaggttgcagtgagccaagattgcgccactacactccaacctggcaacagagtgagatttcgtgtaaagaaaaaagaaaaaaaaatctagtacataaaaggtattcttgctttttggaaataaattgactctggtggaagaataaagtaagaggaaggatatctaggttcttggaactaagatgtgtggtggggaggggatgcagaagacaggtgagtctccaaatcaatccaatgaagtcactgagttgcccattttcataaaagctgaaggtcaacattctacagggcagaacaaacttgagtcctaacgctagttttaaagctaccaaggctgttattatttctgtgttgacctctgtcaccactcttcagtcccactttagggagtggcagctgggcaagccttcctatctcaccgtgccccaccaagaacctccagagaggtgagtacacaagactggagggaaacctcaattcaaaggacggagttaagctctcataactccgataagaaactgatttaataaagagagctgagaaactgtcctcaggtcgtaagaatatatcctgaccttattgagaaatagcaaggttggtagaaattgggatccctaatttccccaaggacattccagagcaacacagatttagtcaccacttgcatagttaacagctggttgtggcgctcgcttggggagtacatatgttatgctaaaattgcaacgatacagagattagcatggccccttaattagttaaataatttttaaaaagctggttatgcatgactgagggtggacaggggtcaattccatcacttaagttattttactgaaatggcattttggaaaaaggatgatacctaaccctggcgtttagtcctcggctcgggattagaaaatgcgcggggtgtggggggggggttgcaggaagtactgcctagacagctaagacacacgtgggaaggtctccactcgtggattcctgacagtggagcgacaacctcgagaaggtataaccaacttgaggttgtgcaaaatgtctttcgaagagttacctgaactctgtgagaacctcggaagagagatagcataggaagccgcctcagcacggtgtttaatacagacgccgccatcttgacgtacgcccaggacaggaattgacggaaaggcaactgcgcatgcttcaggaaactgagtagggcagggccaaggacaagcccgcagtgcggaaggcggccccacgtttgcgtcaggacggaagcgtgaaagggaaggcatgggggagaagctaatttcaactgcgtcacaatcgaattagaccccaaaattgcggttttttttggccagtcactacgactcttagatcgcattgttaaagtttgccttttaagcaattttgaaggcgatttttagcggtatcctctcagtgcgcatgcgctcttaggtttctaccaatcctgggtgagaaatgttctccagggcggaagtggcggaagcagaggaaagggaggtgctaggctcctggtcacgcgcacgcgacagggaggcaggaaggaggcggaagagagtgccagggaaaggggcggagcaaaggtgaagtgagagtagccaatcagttggcgagttgtcatttgggttgaccaatgagttcacgcctcgcgtataatgtctcgcgacaagggcgtttcactagcacgtttgggcgcgttgggcggcgtccgggtataaaagactccacccgagcgggcggccgccattctggggttcgtttagaggtaagtttgcctactttgtcgtctagtgggtaaaattttgcggagagcgttggatctgggaagcgggatagggatggatgggttcatttgagagccacggcttaaagcggttgcgatcaggatgggacacaggtttgtttggggacaacaaagatggcatttgtgagtgttttgaagcaa

SEQ ID NO: 35731 - DNA, 2300 bp, Homo sapien
aggtccatggaggggtcaggggaaaggggtcattaggtaaagccaatccttcccaatctacccctctgtcaccatatggaagcagttgtgttctattatttactgtgccttaaagaacaagatatttttctccccacaggagtctgtgtgaagcagcacaagcggttgacccaggccatccagaaagccagggatcatggtgagcatgagacggggcacacagcagttttgtttaggtataaggaagatgacttagggctagaaaatggatataaatgctcacacctgttcaagatggtagcacccagcatgttcttcctgacgttacattgtcccctgtcctttctcctgagtgtcttactttatcattgtcctgtctccttgttctttgtctttccatccttttccctcctattttacaactgctggtctcaatgccttaggaagttctttatataaatgtctggccctggactacatggcactgctgcataagttagtaaaaagtatacccctctgctagggcagatgcagcttcatagtccttgttcagcactgcacagctttgtaagcaagagccccagcagtatgtcagcccacacttgccctctgggccggtcacctgtttgcagtatacaacatgcataaatgtacctggtggctctgactggtccttccctttataatcctttttcttacttcatctaaaccaccctcctcattgcctcttaaatttcttttcttttttaatcccttaggtctcctcatttaccacatcccccaggttgaaccacgggaccttgacttcagtacctctcatggggctgtgagtgctactccgccagcccccaccctggtctcaggtgacccctggtacccatggtacaactggaaacagccaccggagagagaactgtctcgccttcgccggctttaccagggtcatctccaagaagagagtggccccccacctgagtcaatgcccaagatgccccctagaacaccagcggaagcctcctccactgggcagacaggccctcagagtgctctgtaggagctgtagactgggaagagaggccaggcgtggtggctcactcctgtaatcccagcactttgggaagccaaggtgggctgatcacttgatcccaggagtttgagaccagcctgggcaccatggtgaaacctcgtctttaccaaaaaatacaaaaattagctgggtgtggtggtgcacacctgtagtctcaactattggggaggctaaggtaggatcacttgatcccaggaggcggaggttgcagtgagttgcagtcacacccctgcactccagcctgggtgacagctagaccctgtctcaaaaaaaaaaaaaaagactgggaagagagctagagggactaggagataatgtgtatgtaggtttatgtgatgggatatcaccctgaagagttgtgtcttttgtggccagtgacaaatccaggaaatgaatgttgctgatagggataaatcttgaggctgagggcgggtggtacagatgtgtatgggaaaccccaacccctatatattgtaaatagatgggctgggctaaacattgttgccgtttcatacttctaccaactcagcttttacacaataaagctctactgtctctggtttgctttgggctgtttccgatgaatgccattagcggggggtgggctgagtgatggtcttttcatataagcaattgggtgatgctgtggggagataagtggtcaggcttaagccagccttgcctgtgacgcctgggactagaagccggggatgggcagctgtgccactctgtcaagatgccttgtgggcccccactccacagcatggcccactgttcactgaggggataaaaggttggacagtgagacactgggccaaggaagactacgttgccatggcactcactgccgtgggatgcagggatggaaaggagtggcactgctaggggcacagctggtttggcaagaaaaacgggggccctgtcagttgccaggacgctagggggcaaggtctacaggcggggctcctggaaataaagactccgagaggcggtgcggcgagaggaggggcggaagtgacgtcgtgtggggcgggtccgaccgcgcacaatgggccatggagttcccgttcgatgtggacgcgctgttcccggagcggatcacggtgctggaccagcacctgaggcccccagcccgccgacccggaaccacaacgccggcccggtgacagctcaaacccaccctctggcccttttctcccggttcctctccaaa

SEQ ID NO: 35732 - DNA, 2300 bp, Homo sapien
ccaagatgtcaaagcttaccaacatctctggatccactaattacctcctgcctcctgtattcgtcttcccactctgattacctgacgtctgctccactaaaccgctggatctctctcaagacaaacccttacctccattgagagtgcaacacagtctgtcaccctatttacagaggcccccttccttttcctcctaaattcaaaattcagccttgtcacttcctatttccctctggtctaaggaatctttttttttttttttgagatggagtcttgctctgtcgccaggctggagtgcagtggcacaatctcagctcactgcaacctccgcctcctgggttcaagcgattctcctgccttagcctcccaagtagctgggattacagaagtgcaccaccgtgcccagctagtttgtgtatttttagtagagacagggtttcaccatgttggccaggttggtctcgatctcctgatcacgtgatctgcccgtcttggcctcccaaagtgctgggattacaagcctgagccaccgcgcccagcctggtctaaggaatcttatagttaaggtaaccctgttttccaaaccaaacaccagagtacccgatccaacacatttttgaccacatgtgagtctgttcttctgacatgatttggatcacacctagccatagatttaacacattacctcaactagaaagaatagagcaataaatcagaagcactccagaaaatcttgggtataaaatgaacttcccccgcccttttctggggcacagctttgattaaaacctgttaggaatgataattacccccttctctttgttcctgtgctattccttttactcctctcctctgattcctccatacccacccatctttcatccagtagcctcctccccatcatctcccatttcttctacagggggactcccccaggtctggtagcccaaagctgctgctacagccgccatgggggggtgaattcctcatcccccaatacaggtaagtattcactcctccctaccctcaaatcaagtaggccacattcactgtctactcctgccttcccattcacatgcctgatatttccacaggcaaccaagactccaagcagggagaacaggaaacaaagaataggtgaggtctaaacccctcccctaacagcctcccaccaccatctgactcccttcctaacatcattctcagtcacttcctactcttaaatcttattgtatgaactggacaccagctcctcccacaattccttctaccttacatcctgcaagcccctttcccccacaggttcaactctggtacttccctttggaatacggattctctgagaggttttaaatttggacatagcactaatggttccagcttcatacccatcatgtgtcctacattaaaacctggcccgagaccttgaagagtctgtaatcttaatttcctctttagtattcctataacccactctccatctccccacctaccaggtctgccagtgaggagcaggccttgtcacaggatgggtctggggagaagcccatgcacacagctcctccacaggccccggccccgccagcccagtcctggacagtgggtggggacatactcaacgccaggttcattcgaaacctgcaggaacgtcgcagcaccaggccttggtgaccgcagccccgtcaaacatcttcaaagtattatttctccctcactacaggaaagagccaaagcccaaccctcataatagatggatacattcattcattcattcattcagcaggcttatcagattcaagtcatttgtatcttttaaccagaccaataaaagtatttatttttatcacaagagctgttgaaaaatttgactcattatttcagccgcctcacccctcactgtcgttgcacccattcagccttcagccctgtttttgctcagctttttgctcaaaggcctcagctgtgaatacagcgcttgggggggcgggggaggctgtaacttgcgcaagcgcactcaggcagtctccgagcccgcgggcgcaggcgcgcttacagccgacagagcgcttcagccgcttccctcgagcctgcagtgcgcaagcgcgggacatctccgtttccctccctcagccccttccccccctacccccccgccccggcctcctttccccttcacgaagccggctctggggcgcgctcacccctgtgaggaggccggaggtcggactcaggaggctccttctccactcccggaagatcatgtaccagcccagccggggtgcggcccggcgtctcggccc

SEQ ID NO: 35733 - DNA, 2300 bp, Homo sapien
ttctcctgccttagcctcccaagtagctgggattacagaagtgcaccaccgtgcccagctagtttgtgtatttttagtagagacagggtttcaccatgttggccaggttggtctcgatctcctgatcacgtgatctgcccgtcttggcctcccaaagtgctgggattacaagcctgagccaccgcgcccagcctggtctaaggaatcttatagttaaggtaaccctgttttccaaaccaaacaccagagtacccgatccaacacatttttgaccacatgtgagtctgttcttctgacatgatttggatcacacctagccatagatttaacacattacctcaactagaaagaatagagcaataaatcagaagcactccagaaaatcttgggtataaaatgaacttcccccgcccttttctggggcacagctttgattaaaacctgttaggaatgataattacccccttctctttgttcctgtgctattccttttactcctctcctctgattcctccatacccacccatctttcatccagtagcctcctccccatcatctcccatttcttctacagggggactcccccaggtctggtagcccaaagctgctgctacagccgccatgggggggtgaattcctcatcccccaatacaggtaagtattcactcctccctaccctcaaatcaagtaggccacattcactgtctactcctgccttcccattcacatgcctgatatttccacaggcaaccaagactccaagcagggagaacaggaaacaaagaataggtgaggtctaaacccctcccctaacagcctcccaccaccatctgactcccttcctaacatcattctcagtcacttcctactcttaaatcttattgtatgaactggacaccagctcctcccacaattccttctaccttacatcctgcaagcccctttcccccacaggttcaactctggtacttccctttggaatacggattctctgagaggttttaaatttggacatagcactaatggttccagcttcatacccatcatgtgtcctacattaaaacctggcccgagaccttgaagagtctgtaatcttaatttcctctttagtattcctataacccactctccatctccccacctaccaggtctgccagtgaggagcaggccttgtcacaggatgggtctggggagaagcccatgcacacagctcctccacaggccccggccccgccagcccagtcctggacagtgggtggggacatactcaacgccaggttcattcgaaacctgcaggaacgtcgcagcaccaggccttggtgaccgcagccccgtcaaacatcttcaaagtattatttctccctcactacaggaaagagccaaagcccaaccctcataatagatggatacattcattcattcattcattcagcaggcttatcagattcaagtcatttgtatcttttaaccagaccaataaaagtatttatttttatcacaagagctgttgaaaaatttgactcattatttcagccgcctcacccctcactgtcgttgcacccattcagccttcagccctgtttttgctcagctttttgctcaaaggcctcagctgtgaatacagcgcttgggggggcgggggaggctgtaacttgcgcaagcgcactcaggcagtctccgagcccgcgggcgcaggcgcgcttacagccgacagagcgcttcagccgcttccctcgagcctgcagtgcgcaagcgcgggacatctccgtttccctccctcagccccttccccccctacccccccgccccggcctcctttccccttcacgaagccggctctggggcgcgctcacccctgtgaggaggccggaggtcggactcaggaggctccttctccactcccggaagatcatgtaccagcccagccggggtgcggcccggcgtctcggcccttgcctgcgcgcctaccaggctcgaccccaggtgagcggaggagaagagggagggaggagagggggcggggagagaccctcctcaaagccggtgcgtggggcggagcgcgcgctgggttccgcgcaggcgcagagacacccgccgccccttcccacctgtgccctgcagcgcgtggacaggctaggggtcgcgggagcgggagggaggcgctgccgggcctgtcgcgcaaggacgtcggtcctcccaggtttgagggcggtcaggcggggtcaaggccaggcagcggggcgcgtctgcgttgcgcccgactctccgcggttacctgtgcctagaggtgatttgaaggg

SEQ ID NO: 35734 - DNA, 2300 bp, Homo sapien
cctgagtatctgggaggtgcacaccaccatgcccatattaaacattttttgtttttttttgaggtggagtcttgctctgtcaccaggctggagtgcagtggcgcgatcttgactcactgcaacctccacctcctgggttcaagtgattctcctgcctcagcctcctaagtagctgggactacaggtgcgtaccaccacacccagctaatttttgtatttttagtagagatggggtttcaccatgttggccaggatggtctcaatctcctgacctcgtgatctgcccacctcagcctcccaaagtgctggagttacaggtgttagccactgtgcctggcctgaaatttttttttttttttttttgagacagagtcttgctctgttgcccaggctggagtgcggtggcatgatcttggcttactgcaacctctgtctcccaggttcaagcgactctcctgcctcagcctcccaagtagctggaaatacaggcatgcaccaccatgctcggctaattttttgtatttttagtagacggggtttcaccattttggccaggctggtctcgaactcccaacctcaggagatccgtctgcctcggcctcccaaagtgctggaattgcaggtgtgagccactgtgcctggtcaaaattttgaatttttaatttttttgtcacactatgttgcccaggctggtctcgaactcctgagctcaagccatcctcccacctcagcctcccaaagtactaggattacaggcatgagccactgtgcccagccttcctgcttttttaccttagctggctctgtctcagctaatctgttcttttccagctcaagtctagcagagtcatgaacttaattacccagagctgggtgaggaccccctttgagggccctaggtctgtcatcctatctatttgcccttcttttctggttttcagcatctgtcttttcctccttttctcctgcctggtttttacaacttctttctctgaaatgtacctggtcccagggtgcatatttagtaaagggcaaacttcttcttttttctttgtcattcagggttatacaaacaagggtatgaagattgcctgcacccaaccccggagagtggctgccatgagtgtggccgcccgagtggcccgggagatgggtgtgaagcttgggaatgaggtgagatttctagggaaccggggggtagagtctggggtctgtgactcagtctacagttccctcaggtccctacagcagaagtcttggtgctgccccacttcacctttccccaagttcctttcagggcacaccagcccacacttggttgctaatggttcccttgaccaggttggctacagcatccgctttgaggactgcacatcagagcgaactgtcctccgctacatgacagatgggatgcttctccgggagttcctctctgagcctgacctggcgagttacaggtatctctaatctctggcctttctctcccttcttcccacccagccaattcagccattgtcttctgattaatccacccgttcttgaatctttgtggttcaaatggtccttgaactgacctccaggtaccacggagatggggctggaggacagaagagattgtagagaaagcctcttctttccccattcatctccagggtttagaaaacaaccaggatagcagagcattgctgccgagacttgaaataccgtgtgaagaccatttgaaaacacttggaatgctcagctcagagggagaaacaggaagcatcctggttccctctaaatatgtgaaggctgttacatggaaagaaggatcagattgttttatgtgaccctacacgacatagctaggagccatggggaggttacagggagacagattccaactcaataccaatggctgagtaaccctcagagtggtggagattgcagggcctgtcagagtggttggactctgggtcttggccctccacacaagtcttgggtagcttggtctgtgaataatgagctcttagtgctggaaatggccaagcaggggttggttgaacatgtgttgagggggaaaagggattcatgaatgtaatgggggtggggtcaggccagctgaacaatatgtgcctttttgactcttcagaggctgtgaatttctggtcttggaagatcacagtggagcaattggacagataggattttatccttcatatcccttgcaaaagatctctaagaacccatggagagccagccagcgcaagagtgtctgatgcagatgtttttgcccatcgagccagcctgctttgtggaat

SEQ ID NO: 35735 - DNA, 2300 bp, Homo sapien
agttgtgacccaggaaaacagagttaggaagctccgaggtgccaggggtgctcacagtccatctcagaaacagaaaacaatgcattcaagaggtcaggccaggtgtggtggctcatgcctgtaatcctaacactttgggatgccaaggcgggtggactgcctcatctgaggagtttgagaccagcctgggcaacatgatgaaaccccgtctctactaaaatacaaaaaattagctggacgtggtggcacgcacctgtagtcccgcctactcaggaggctgaggcaggagaattgcttgaacccaggaggtggaggctgcagtgagccaagatcacgccactgcattccagcctgggcgacagagtgagactccgagactccctttccaaaaaaaaaaaaaaaaaagtcagtgatgtagatccacttgtggctattaataagaacaatgtttcatttcctaacagtagtgcctggtaactgcaattaatcacaaaagtatgatgcaggatcaaacaaatcagacagcagagcatcgagtaacaaattcagctttttgttttgtttgttttttttttttgagcatagtcttggtctgttgcctaggttggagtgcctgacctcggctcactgcaacctctggctcctgggctcaagagattctcctgtctcaggcccagtgcggtggctcacgcctgtaatcccagcactttgggaggccgagacgggcggatcatgaggtcaggagtttgagaccagcctgaccaacatggtaaaaccccatctgtattaaaaatacaaaaactagctgggcgtgatggcatgtgcttgtcacacttgtaattccagctactcaggaggctgaggcaggagaatcacttgaacctgggaggcggaagttgcagtgagccgagatcgtgccattgcactccagtctgggcaacagagcgagactctgtctccaaaaaaaaaaaaaaaaattctcctgtctcagtctccagagtagctgggactacaggtgcacacctccacacctggctaattttttgtagagatggtggggtctcaccctgttgcccaggctggtctcaaacccctggtctcaagatatcctcctgcctcagcctcccaaagtgctgggattacagcaagagccactgcacctggccttgcttacttttaaataagcagccaccagtgattttctcaagctgttaagcaaaaatgcagaacacagtttgcctgttccttagtttggagattttgtctttaacaactttccccagttccccagtttcttcctgcctagaggtcttcccttatacctgacctgtcttcactcctgctgcaggcaaaccagtcctagcaacggtcacttttttgtttgtttgagacagagacttcctctgttgctcaggctggagtgccgtggtgggatctcggctcactgcaaactctgcttcccatgttcaaatgattctcctgcctcagcctcccgagtggctgggactacaggcgcacaccaccacgccaggctaatttttatatttttagtagagacagggtttcgccatcttggccaggctggtctcgaactcctgacctcagataatccgcccgccttggcctcccaaagtgctgggattacaggcatgagccaccgcgcccggccaacaatgctaatatgttttatgagcatggacccgatcttccaatctgaaatagaatttcattcctcccttactttgtatagtttttggctctataaaatttccatactttctttattatgtatcctgtccctcccccaccgcaaaatgtaaatttggtaaggaacttttgatttgtcctctgctatatcccagggacggaaagcaatgagcacacattaggcatccattaaattaatttcacttgttgaatgaatgcgtgagcgaagcactcacagactgaccatcagggggcgtcagagaaactggacagaggcgaaatgaagaaaaaagaattaccccgagttttcaggtatggttccgcgaggtttgaactcgctcggccaccgtagtgcttagaggccgaaaaagtacagccccttccgggctccgcggtacgggaagacagctttgggatgtcggaagatcctagaggtcccaaggtagctgacttgcgaagctgaggctccagccgagggctccaggcctctgaccggcccagcagtgagcgcggctgcccgacgcttcagggccgggagcagggagcgtgagtcgccatggcgacgccggcgggtctggagcgctgggttcagg

SEQ ID NO: 35736 - DNA, 2300 bp, Homo sapien
gaacgcgctggcagccctgacgcccgggttccgaaagtctcgggggtggctatttcccccgacccgcctcgggggcggagtgcggggcagaggggtgggggctggggagaggcgtggcccgagcggtgctggaagcggagccgggacctttggggcccgcgctgagacgcgcccggctgctgccgccgccctcctttcccctcttccctggtttcccttctcctctagacctgttcgctctccgcccctccttgcctccccaacaccccctcaggtcccgttgcctcctggtcctttcagggattcctggtccttccttcccacactagcctccctggggtatcgctgaggcagcctggcctgcacccaggttcccctcacccctgccacatttctctcttctccctcacgccaactttccttttcgcccttctctctctttctcacatcctagagacggtctttaatacgcattaaccctgtgctgccacatctggctcctgccctcattgcctccaatccggactcttcctctcacatcacccccaccacccccaacttgggctcacaacttctcttcactttttccatttccccagttctctgccttccgtctttccctctgtcctcatccttagcccctctgccctgctttgtgtcccacctctccccctccacttcctctcctcccaccctcagtctcacccccgggctgtctcactctctggagcctctccttcctgttctctgtccccagtgctccctaccctcacctcaagacgaccatggccaccatcccagactggaagctacagctgctagcccggcgccggcaggaggaggcgtccgttcgaggccgagagaaagcagaacgggagcgcctgtcccagatgccagcctggaaacgagggctcctggagcgccgccgggccaagcttgggctgtcccctggggagcctagccctgtgctagggactgtagaggctggacctccagacccggatgagtctgcggtccttctggaggccatcgggccagtgcaccagaaccgattcatccggcaggagcggcagcagcagcagcagcaacaacaacggagtgaagagctgctagcagagagaaagcctgggcctctggaggcccgggagcggagacccagccctggggagatgcgggatcagagccccaagggaagagagtcaagagaagagagactaagtccgagggagaccagagagaggaggctggggatagggggagcccaagagttgagcctgaggcctctggaggctcgggactggaggcaaagcccaggagaggtgggagacaggagctcccgactgtcagaggcatggaaatggaggctgagtcctggagaaactccagagcggagtctgagactagcagagtctcgagagcaaagccccaggagaaaagaggtggaaagtagactgagcccaggggaatctgcctaccagaagttgggcctgacagaggcccataaatggagacctgactccagagagtctcaggaacagagtttggtacaactggaggcaacagagtggaggctgaggtcaggagaagaaagacaagactactcggaagaatgtgggagaaaagaagagtggccagttccaggggtagctccaaaagagactgcagagctgtccgagaccctgacaagggaggcccaaggcaacagttccgcaggagtggaggcagcagagcagaggcctgtggaagatggcgagaggggcatgaagccaacagaagggtggaaatggaccctgaactccgggaaggctcgagaatggacacccagggacatagaggctcaaactcagaaaccagaacctccagagtcagcagagaagcttctggaatctcccggtgtggaggctggagaaggggaggctgagaaggaggaggcgggggctcagggcaggcctctgagagccctgcagaactgctgctctgtgccctcccccctcccaccagaggacgctgggactggaggcctgagacagcaggaagaggaagcagtggagctccagcccccaccaccagcccctctgtctcccccacccccagccccaactgccccccaacctcctggggatcccctcatgagccgcctgttctatggggtgaaggcagggccaggggtgggggccccccgccgcagtggacacaccttcaccgtcaacccccggcggtctgtgccccctgcgaccccagccaccccaacctctccagccacagttgatgctgcagtcccgggggctgggaagaagcgg

SEQ ID NO: 35737 - DNA, 2300 bp, Homo sapien
cttagacaaagcggtcgccgcccccgcccggccccctggtctctgtctccgtccctcctcctttgctgcctctttccctcctcctctccctccctcctcccctccctccagtctccggatctccctcggtccctctctcctcctcttcctctctctggacgcccggctcctccgcaccccctcccccgggggtcccgcggcctgtgagttgactgaggggctcagacttggggagtgggtgtctcctcgcccctgtccttgctcccgtccctggcccggaccttggctgtctcctctttgtgccgagattgtcagtctgtgcggctacagcggggtggagacggccggctctgtcacggcttcatgagagcggggacggggcgcaggacttgcaggcgccggggagaagagacatggagccggcccttggcactctggggtcgcgtggggcagtcggtgggggaggcaggcggtggtgacaggacagggtgggggtggacgccagggttctgggaacgcgctggcagccctgacgcccgggttccgaaagtctcgggggtggctatttcccccgacccgcctcgggggcggagtgcggggcagaggggtgggggctggggagaggcgtggcccgagcggtgctggaagcggagccgggacctttggggcccgcgctgagacgcgcccggctgctgccgccgccctcctttcccctcttccctggtttcccttctcctctagacctgttcgctctccgcccctccttgcctccccaacaccccctcaggtcccgttgcctcctggtcctttcagggattcctggtccttccttcccacactagcctccctggggtatcgctgaggcagcctggcctgcacccaggttcccctcacccctgccacatttctctcttctccctcacgccaactttccttttcgcccttctctctctttctcacatcctagagacggtctttaatacgcattaaccctgtgctgccacatctggctcctgccctcattgcctccaatccggactcttcctctcacatcacccccaccacccccaacttgggctcacaacttctcttcactttttccatttccccagttctctgccttccgtctttccctctgtcctcatccttagcccctctgccctgctttgtgtcccacctctccccctccacttcctctcctcccaccctcagtctcacccccgggctgtctcactctctggagcctctccttcctgttctctgtccccagtgctccctaccctcacctcaagacgaccatggccaccatcccagactggaagctacagctgctagcccggcgccggcaggaggaggcgtccgttcgaggccgagagaaagcagaacgggagcgcctgtcccagatgccagcctggaaacgagggctcctggagcgccgccgggccaagcttgggctgtcccctggggagcctagccctgtgctagggactgtagaggctggacctccagacccggatgagtctgcggtccttctggaggccatcgggccagtgcaccagaaccgattcatccggcaggagcggcagcagcagcagcagcaacaacaacggagtgaagagctgctagcagagagaaagcctgggcctctggaggcccgggagcggagacccagccctggggagatgcgggatcagagccccaagggaagagagtcaagagaagagagactaagtccgagggagaccagagagaggaggctggggatagggggagcccaagagttgagcctgaggcctctggaggctcgggactggaggcaaagcccaggagaggtgggagacaggagctcccgactgtcagaggcatggaaatggaggctgagtcctggagaaactccagagcggagtctgagactagcagagtctcgagagcaaagccccaggagaaaagaggtggaaagtagactgagcccaggggaatctgcctaccagaagttgggcctgacagaggcccataaatggagacctgactccagagagtctcaggaacagagtttggtacaactggaggcaacagagtggaggctgaggtcaggagaagaaagacaagactactcggaagaatgtgggagaaaagaagagtggccagttccaggggtagctccaaaagagactgcagagctgtccgagaccctgacaagggaggcccaaggcaacagttccgcaggagtggaggcagcagagcagaggcctgtggaagatggcgagaggggcatgaagccaacagaagggtggaaatgg

SEQ ID NO: 35738 - DNA, 2300 bp, Homo sapien
tccccttctgcaccgctggcttccactccaagaaggtggaccagggtctgcaagttcaacggtcatagctgtccctccaggccccaaccttgcctcaccactcccggccctagtctctgcacctccttaggccctgcctctgggctcagaccccaacctagtcaaggggattctcctgctcttaactcgatgacttggggctccctgctctcccgaggaagatgctctgcaggaaaataaaagtcagcctttttctacatatggcatgcagtctgtcagtgtctcccaagctacagggctgagtttgggaaagaaagccagagggagcctgggagcaccgaactggagtctgggcagccaccacgccctctggcaaccgctggggttcggccacccccgcagacccgcccccactttgccagagcggccgggtccccattcccattccttcaaatcccctttttcccggcagccgacctgtagacccaagggagacaggttgaagctagaaagagtcggggcagcagctctggtaggggagggagcatccaaaacctctggcttctgagcgcctctcctgccgcccatccacaaagccccccacagcctggcggctgccctcgaccccgcaaaacaaaggacttcagaggctggacctacagacccagatgagaaggcaaaagcgtagggaggagcggcaggagatgggaagggcgggccccgctcggagcagctgccgcttcctcccaaagtcccacgaggggcctgagtcacgggccaccgccctgggtcggcgagctgggggaagggatctggacacctggcgtgtccgggcgggaagctggtgagggcccctggggacagagcggaggaccagtggttggggcgagaagagggcagtcccgcagcgagtcccacgcggggtgggagggatctaggccccgccctctcctcggctccgccctgcgcccccttccctctcctcattgtccttagacaaagcggtcgccgcccccgcccggccccctggtctctgtctccgtccctcctcctttgctgcctctttccctcctcctctccctccctcctcccctccctccagtctccggatctccctcggtccctctctcctcctcttcctctctctggacgcccggctcctccgcaccccctcccccgggggtcccgcggcctgtgagttgactgaggggctcagacttggggagtgggtgtctcctcgcccctgtccttgctcccgtccctggcccggaccttggctgtctcctctttgtgccgagattgtcagtctgtgcggctacagcggggtggagacggccggctctgtcacggcttcatgagagcggggacggggcgcaggacttgcaggcgccggggagaagagacatggagccggcccttggcactctggggtcgcgtggggcagtcggtgggggaggcaggcggtggtgacaggacagggtgggggtggacgccagggttctgggaacgcgctggcagccctgacgcccgggttccgaaagtctcgggggtggctatttcccccgacccgcctcgggggcggagtgcggggcagaggggtgggggctggggagaggcgtggcccgagcggtgctggaagcggagccgggacctttggggcccgcgctgagacgcgcccggctgctgccgccgccctcctttcccctcttccctggtttcccttctcctctagacctgttcgctctccgcccctccttgcctccccaacaccccctcaggtcccgttgcctcctggtcctttcagggattcctggtccttccttcccacactagcctccctggggtatcgctgaggcagcctggcctgcacccaggttcccctcacccctgccacatttctctcttctccctcacgccaactttccttttcgcccttctctctctttctcacatcctagagacggtctttaatacgcattaaccctgtgctgccacatctggctcctgccctcattgcctccaatccggactcttcctctcacatcacccccaccacccccaacttgggctcacaacttctcttcactttttccatttccccagttctctgccttccgtctttccctctgtcctcatccttagcccctctgccctgctttgtgtcccacctctccccctccacttcctctcctcccaccctcagtctcacccccgggctgtctcactctctggagcctctccttcctgttctctgtccccagtgctccctaccctcacctcaagacgaccatggccaccat

SEQ ID NO: 35739 - DNA, 2300 bp, Homo sapien
ggccctgtgttgtgggaggctcgggctgagccatgggccacctgggtgccgctcctctgctttgtgctccatgtcatctcctggctcctcatctttagcatccttctcgtctttgactatgctgagctcatgggcctcaaacaggtgaggctccgagatccctacctatgacctctgacccattttagaactcctcgttccctttcaagggtttccctcctcccatgctcttctactgtctccctgcttctccctcgtggcccttccctttgactttccctcgtaagggcagcaagcatgggcctcctgggcctggggaaggtacatggatcagaagtcaggatcagggatccaagtctcagaaggggggttcctgggcctgagttctagaagggtggtgcctggaagaggaggaaagaagtgcccaagatgagaaaagggcttgactccatttctaagctcttctccctctcttaggtatactaccatgtgctggggctgggcgagcctctggccctgaagtctccccgggctctcagactcttctcccacctgcgccacccagtgtgtgtggagctgctgacagtgctgtgggtggtgcctaccctgggcacggaccgtctcctccttgctttcctccttaccctctacctgggcctggctcacgggcttgatcagcaagacctccgctacctccgggcccagctacaaagaaaactccacctgctctctcggccccaggatggggaggcagagtgaggagctcactctggttacaagccctgttcttcctctcccactgaattctaaatccttaacatccaggccctggctgcttcatgccagaggcccaaatccatggactgaaggagatgccccttctactacttgagactttattctctgggtccagctccataccctaaattctgagtttcagccactgaactccaaggtccacttctcaccagcaaggaagagtggggtatggaagtcatctgtcccttcactgtttagagcatgacactctccccctcaacagcctcctgagaaggaaaggatctgccctgaccactcccctggcactgttacttgcctctgcgcctcaggggtccccttctgcaccgctggcttccactccaagaaggtggaccagggtctgcaagttcaacggtcatagctgtccctccaggccccaaccttgcctcaccactcccggccctagtctctgcacctccttaggccctgcctctgggctcagaccccaacctagtcaaggggattctcctgctcttaactcgatgacttggggctccctgctctcccgaggaagatgctctgcaggaaaataaaagtcagcctttttctacatatggcatgcagtctgtcagtgtctcccaagctacagggctgagtttgggaaagaaagccagagggagcctgggagcaccgaactggagtctgggcagccaccacgccctctggcaaccgctggggttcggccacccccgcagacccgcccccactttgccagagcggccgggtccccattcccattccttcaaatcccctttttcccggcagccgacctgtagacccaagggagacaggttgaagctagaaagagtcggggcagcagctctggtaggggagggagcatccaaaacctctggcttctgagcgcctctcctgccgcccatccacaaagccccccacagcctggcggctgccctcgaccccgcaaaacaaaggacttcagaggctggacctacagacccagatgagaaggcaaaagcgtagggaggagcggcaggagatgggaagggcgggccccgctcggagcagctgccgcttcctcccaaagtcccacgaggggcctgagtcacgggccaccgccctgggtcggcgagctgggggaagggatctggacacctggcgtgtccgggcgggaagctggtgagggcccctggggacagagcggaggaccagtggttggggcgagaagagggcagtcccgcagcgagtcccacgcggggtgggagggatctaggccccgccctctcctcggctccgccctgcgcccccttccctctcctcattgtccttagacaaagcggtcgccgcccccgcccggccccctggtctctgtctccgtccctcctcctttgctgcctctttccctcctcctctccctccctcctcccctccctccagtctccggatctccctcggtccctctctcctcctcttcctctctctggacgcccggctcctccgcaccccctcccccgggggtcccg

SEQ ID NO: 35740 - DNA, 2300 bp, Homo sapien
gggagaccaagtgtgggaggggtgccgtggattggaggggcaaaatatgggttcaggaggagaattgaggaactaatctcagcttccattcctccacagcacatatcctactttttatcaagaagggtgtacttgtccttccctaagcacaagatatgcttctcacctctgcaactttgtttatgtcctgcttgagatcccttctcttcagtcctaccctttcttcaaaaccacttccctaggtctgaagagaaggccttgtctgtcttttcactgggtggttggcacaggctactactttgcgtagctatcaggtcaccccatctattctataagttctcagggtagagacaggccatccttacatctttgggacctcacccagcacgcaccctccacatggtgaatatttggtggtgatgcttaggagagaggtgggggagagttgcaggctagcctgtggtgggggcagatctgggtctgggtctcccaaggtcgggcagactaggccactgggatacccagccccttatccttccacagctggtgatgcggtactgggagcccatacccaaaggccctgtgttgtgggaggctcgggctgagccatgggccacctgggtgccgctcctctgctttgtgctccatgtcatctcctggctcctcatctttagcatccttctcgtctttgactatgctgagctcatgggcctcaaacaggtgaggctccgagatccctacctatgacctctgacccattttagaactcctcgttccctttcaagggtttccctcctcccatgctcttctactgtctccctgcttctccctcgtggcccttccctttgactttccctcgtaagggcagcaagcatgggcctcctgggcctggggaaggtacatggatcagaagtcaggatcagggatccaagtctcagaaggggggttcctgggcctgagttctagaagggtggtgcctggaagaggaggaaagaagtgcccaagatgagaaaagggcttgactccatttctaagctcttctccctctcttaggtatactaccatgtgctggggctgggcgagcctctggccctgaagtctccccgggctctcagactcttctcccacctgcgccacccagtgtgtgtggagctgctgacagtgctgtgggtggtgcctaccctgggcacggaccgtctcctccttgctttcctccttaccctctacctgggcctggctcacgggcttgatcagcaagacctccgctacctccgggcccagctacaaagaaaactccacctgctctctcggccccaggatggggaggcagagtgaggagctcactctggttacaagccctgttcttcctctcccactgaattctaaatccttaacatccaggccctggctgcttcatgccagaggcccaaatccatggactgaaggagatgccccttctactacttgagactttattctctgggtccagctccataccctaaattctgagtttcagccactgaactccaaggtccacttctcaccagcaaggaagagtggggtatggaagtcatctgtcccttcactgtttagagcatgacactctccccctcaacagcctcctgagaaggaaaggatctgccctgaccactcccctggcactgttacttgcctctgcgcctcaggggtccccttctgcaccgctggcttccactccaagaaggtggaccagggtctgcaagttcaacggtcatagctgtccctccaggccccaaccttgcctcaccactcccggccctagtctctgcacctccttaggccctgcctctgggctcagaccccaacctagtcaaggggattctcctgctcttaactcgatgacttggggctccctgctctcccgaggaagatgctctgcaggaaaataaaagtcagcctttttctacatatggcatgcagtctgtcagtgtctcccaagctacagggctgagtttgggaaagaaagccagagggagcctgggagcaccgaactggagtctgggcagccaccacgccctctggcaaccgctggggttcggccacccccgcagacccgcccccactttgccagagcggccgggtccccattcccattccttcaaatcccctttttcccggcagccgacctgtagacccaagggagacaggttgaagctagaaagagtcggggcagcagctctggtaggggagggagcatccaaaacctctggcttctgagcgcctctcctgccgcccatccacaaagccccccacagcctggc

SEQ ID NO: 35741 - DNA, 2300 bp, Homo sapien
atattttaacatgtttattctcgtggttactaatcaacaatctctggcactattacaacaaacctttcagtatttacagagaagttatttgccattcttagcaactggccagtcaacaactcaactttatagtaagttacagaatttattctgtatattgtattctgtacaatgtattccatacattaatttattttgtggtaaaacagtaacttttcattttagatgggaaaactagacgagctgagattcaacccacgtgagcggctgcagagccgctacccttaacagctctctctcgggattctaacattcccttctgtgacggagagacagcaggccgggacacgcatcccaggacggatccacagctggatggggaaggctgcgccaggcgggccggaagcctggcggtggcgtgcaggagccccgccctcctgggctggattcagccgggggcggggccgcgggcggggcctgtggcagcgggaatcccgaccccgcccctttccccacccctccatttctcgccatggcccctgcactgctcctgatccctgctgccctcgcctctttcatcctggcctttggcaccggagtggagttcgtgcgctttacctcccttcggccacttcttggagggatcccggagtctggtggtccgggtgagcgggagggatcgaggatgaactgggaggaggaaggtggagccgtaggagagggattgagggcggggcttggaaacaaatgacaggggaagtccaagagagggaactcgaaccttgaaagcggccgagaagctacaggggagggagacctgagttctaaattaggaactcaaggattagagttttggagaggcgggagagtgaggactgagggagccgaaaagggcggtgaccggagtattctaagtaaagtgttttgtagagaggactgttgagaggagagtgttaaaaagaaggagcatttggagaaccgaagtaagaggggcaatccagcgtggcctctccagccatgctttttgcaactgcctaacatgtggtgttctataaatcctcttccccaggtttgcaggaggcctagggaagagggcagaaactagggatggaaaagtgagatgggcacagcctagagaggaagcattaaggctcttgaaagcagtaagggacatggcctggggatccaagaggagatgagggtgggggaaacattctgccactgtttcgatcttttgtctctttttccctcaacttcctgtagatgcccgccagggatggctggctgccctgcaggaccgcagcatccttgcccccctggcatgggatctggggctcctgcttctatttgttgggcagcacagcctcatggcagctgaaagagtgaaggcatggacatcccggtactttggggtccttcagaggtcactgtatgtggcctgcactgccctggccttgcaggtatgaggccctggccttgcaggtatgaaatcctggcagttgagtccccaagggagaccaagtgtgggaggggtgccgtggattggaggggcaaaatatgggttcaggaggagaattgaggaactaatctcagcttccattcctccacagcacatatcctactttttatcaagaagggtgtacttgtccttccctaagcacaagatatgcttctcacctctgcaactttgtttatgtcctgcttgagatcccttctcttcagtcctaccctttcttcaaaaccacttccctaggtctgaagagaaggccttgtctgtcttttcactgggtggttggcacaggctactactttgcgtagctatcaggtcaccccatctattctataagttctcagggtagagacaggccatccttacatctttgggacctcacccagcacgcaccctccacatggtgaatatttggtggtgatgcttaggagagaggtgggggagagttgcaggctagcctgtggtgggggcagatctgggtctgggtctcccaaggtcgggcagactaggccactgggatacccagccccttatccttccacagctggtgatgcggtactgggagcccatacccaaaggccctgtgttgtgggaggctcgggctgagccatgggccacctgggtgccgctcctctgctttgtgctccatgtcatctcctggctcctcatctttagcatccttctcgtctttgactatgctgagctcatgggcctcaaacaggtgaggctccgagatccctacctatgacctctgacccattttagaactcctcgttccctttcaagggtt

SEQ ID NO: 35742 - DNA, 2300 bp, Homo sapien
aagtgctgggattacaggcgtgagccactgcacccggctccttttttttttgttgttgttgttgagatggagtcttgttctgttgcccaggctggagtgcagtggcgcgatctcggcttactgcaacctccgcctcccaggttcaagcaattctcctgcctcagcctcccaagtagttgggactacaggtgtgtgccaccacacccggctaatttttgtatttttagtagagacggggtttcgccatgttggtcaggctggtctctaacccctgacctcgtgatccacccacctaggcctcccatagtgctgggataacaggcatgagccaccgcgcccagctcctttttttttttttttgagacggagtctcactctgtcacccaggctggagtccagtggcgagatctcagcttatcgcaacctccacctcccgggttcaagcgattctcctgcctcagcctcccgagaagctgggattacaggctcctgccaccacacctggctaatttttgtcttttaagtggagacgaggtttcaccatgttggccaggctggtctcaaactcctgacctcagatgatccaactgcctcggcctcccaagtgctgggattacagctgtgagccactgcgcccagccagagaccttgatttcttaccatacctgctgtctgtagagcaccatgtagcactcagctacactccctcttcatgagtggtactatttaaatgcctcaggttaaacatctagagattagggatcttttcttacacttccttgtattttatttatttatttttttgtttgagacagaatcttgctccatcacccagtggattctcctgcctcagcctcccaagtagctgggattacaggcgcataccaccacacccagctaatttttaaaattttttagtagaaatggggtttcaccacgttggccattctggtctccagcttctggtctaaagtgatccacccacctcagcctcccgaattgctgggattacaggcgtgagccaccgagtctggcctcttacacttccaatgaaccccatagcttgtagcacattgctttgtgtggtaagtgtctctattcatggtcctagcaggaaatgaatagcacagtgaaattaggataatttgggggagagtttaataaagtgataattacaaagaagtaggcagggtgtagggaaatcagaaagaatagtgcagtgccttagtacccacagctctgttgtgatcacctccaagctcaaaaagatgaggacagagcagtcgtgtagagaggactttctttttttttttttcttttctttttttttttttttttttttgagatggagtcttgctctgtcgcccaggctggagtgcagtggcgcgatctcggctcactgcaagctctgcctcccgggttcacgccattcttctgcctcagcctcctgagcagctgtgactacaagcgcccgccaccgcgcccggctaattttttttgtatttttagtagagacggggtttcaccgtggtctcgatctcctgacctcgtgatccacccgcctcggcctcccaaactgctgggattacaggcgtgagccaccgcgcccggcgagaggactttctcaataaaaactgtgactttcattgataccgtccatttgggacaacttactgaagcagaaagcagggtggagactgaattcaagggaaaacataagatgtctggtacagcatacaacagcattgattcagaggagggtgggagtactgagcccaggagacggagaaggaatgtaaagcctgcgagaggctgctcagcaattatctggtcccttagcctacaggattagcagcttcctaactcaggcaattatctctctggacctgtttcttctatctataagttgatggaattagtctaatgatatctaaggtccctactatgtgtacgtctactgtgacaaggtccttagctgcatgatctttaattctgacaaaggttactatcacaaatattttaacatgtttattctcgtggttactaatcaacaatctctggcactattacaacaaacctttcagtatttacagagaagttatttgccattcttagcaactggccagtcaacaactcaactttatagtaagttacagaatttattctgtatattgtattctgtacaatgtattccatacattaatttattttgtggtaaaacagtaacttttcattttagatgggaaaactagacgagctgagattcaacccacgtgagcggctgcagagccgctaccctt

SEQ ID NO: 35743 - DNA, 2300 bp, Homo sapien
cgttactggtggcgcgcgcggggacttaaagtaggtgagttctaggggcctggcccacggctccccgggagccatcttggttcccccagaaggcgggaggggcgtaccttgggtgcgactgggcggaggtgacttggaagttcgcttctcggactgtaatactcatccttacctggcgccccgctccgagtttaggtatgaagacacagggagacgtcgggccacaagggaacccactgaggtggggaccaaagatggtggctctttgaattggagccaagcgtggtgggcacccgctgagttggcctgtcataaagacggagttgacactttatccatggggcatcctactttccctacctgtcaacagtttccctctagagtggcatattttcaggtgaattccatttatgctattttctttccatctcatttgttccttcatcagtaggctcggtgatgagccttcccgagggcagggtcgatttcatgtttggttcacagatgtataccaaatacttcaaacaggtataccataaccattgaatgaatatgatggaccctaggggaaagacacggttcccctaatccagtcctggaggtgggtgagtgtgaaggcagaaatggaaagtaatggttacaatatagcgagagatcttagagtaagcacaaatccattgaccactgtggaacaggcaggatacaccaggaacacgagaaggcagggaacacgccaggaaagggtttgctgagaaagtgacatttgaggccgggcgcggttgctcactgctgtaatcccaacactttgggtggccaaggtgggcggatcacctgaggtcaggagctcgagaccgtggtgaaaccccgtctctactaaaaatacaaaaattagccaggcgtgatgccgggcgcctgtaatcccagctgctcgggaggctgaggcaggagaatcgcttgaagcctggaggcagaggttgcagtgagccaagatagcaccactgcagtccagcctggacgacagagcgagattccatctcaaaaaaaaaaaaaagaaagaaagtgacatttgaactgaatcttaaaggatggtagaagttggaccagaaaactaggtgggaaaaagccaaggaattgggctaaggcatgaagatgtgggaagacaagaacagtgtgttcgaagactggggaaaatgtctggctgaaccataggcttttgcgggcgaggggtaggcgttacaagatgtgaagttcagatcatggagggtctcgctaaggagtttagattttattctgtgtgcacgaaaaaccatcaagattttagaggagagacatctgagtgatttggggcaagtcttaaccttatatatgcttatgtatgtttcaaggagatctgaaaatcttaacccagctatgttgcagtttctttatctgaagaaatggaagatagtaatactactttacaaggttcttgtgaagattaaatgagtcagagtcgatataaagtaattagaacagtgcttgacacataggaagcttctatatatgtcatcttttattatcattttttgcagttgcatctgatcaaactgaggtggtctggtaaaagtataaaaagcatgggctaaaaaagaaagaaaaacaacggggcgcagtggctcacgcctgtaatcccagcactttgggaggccaaggtgggcggatcacccaaggtcaagagttcgagtccaccctggccaatatggcaaaaccccatctcttctaaaaatacaaaaattagccaggcatggtggcaggtgcctgtaatctcagctacttgggaggctgaggtgagagaattgcttgaaacccgggaggcagaggttgccgtgggcccaagatcttaccactgcatgccagcctggggagcagaacgagactccatcacaaaaaagaaaaaaatgttttaagtgcttcagaaggttaacaacagaaagattggtggaaagagaagcatcaacgttcataatgatccagtttaccccctagttttcagtctgataactctgatgctgtttgtgtgaaccaataatgaggataattgataatgtgtatccttcccagatcatggaggacacccaggctattgactgggatgttgaagaagaggaggagacagagcaatccagtgaatccttgaggtgtaacgtggagccagtagggcggctacatatctttagtggtgcccatggaccagaaaaaggtcagagggtattggatgttcaagtattgatatagatcttttatttttgtggtaaggtatt

SEQ ID NO: 35744 - DNA, 2300 bp, Homo sapien
tatttgatagttactatgtatccaccaaattaggagctatggttacaaaatgattaagaattagctccctgtcctccaggatgttgcagtctggtgagaagcatacaatcaataaaatgtggtaaccactcagaaatgtagtatcaagtcaacgtcattgttaattcacattcgatcacacagatcaatgtatttcttttttttttttttgtatttttagtagagacagggtttcactgtgttagccaggatggtctcgatctcctcacctcgtgattcgcccgcctttgcctcccaaagtgctgggattacaggcgtgagccaccgcgctgggcagatcaatgtatttctaagttgccttctaaatgagggaacatcaacttgtgtaagccctctctacccacttaaaatataatgctttacgttttagggaaatgaacacagtcattttgtgggagtagaaataactcaaaatacacaatcagataacttgtttcaatttgtctctatattagctgtaggatcctaggaaagtcctttaactttgcagggctccagctcctcgtttgtaaaatctgcttatttgactgttgtgcacagaattgagataaccaacagaaaggactttatgaattatgcaagtgttatagttaccattttcttcatgtcttattgtgagataaaataggccgggcgcagtggcttacgcctgtaatcccagcacattgggaggcccaggcgggagaatcacctgaggtccggagtttgagaccagactgaccaacatggagaaaccccgtctctactaaaaatacaaaattagccgggcgtggtagcgcatgcctgtaatcccagctactcgggaggctgagacaggagaattgcttgaacccagaaggcggaggttgcggtgagtcgagatcgcgccattgcactccagcctaggcaacaagagcgaaagtccgtctcaaaaaataaaatatagatggccgcatgcggtggtttacgcctgtaatcccaccactttgagaggccgaggcgggcggatcacctgaggtcagaagttcgagaccagcctgaccaacatggagaaaccacgtctctactaaaaatacaaaaataagctgggcgtggtggcgcatgcctgtaatcccagctacttgggaggttgaggcaggagaatcgcttgaacctgggaggcagaggttgcggtgagtcgagatcgcgccattgcactccagcctgggcaacaagagcaaaactccatctcaaaaaatagataaattagttaattaaaaaataaaaataaatgattttatgatccttccctcgcccctcgaaaggtggggacagcctttaagacagagagcaaaccagttttctctgttcgactacagatctttaggatcttggatttaagaaaatgacctcaaaatgtccgtcagagacgtattcccaggaagaaagatattacttctactacaaaccaaatcaaaaggaaatgaaattccaatgcaacaggagtgaactgccacgcctacgggctgttctccaaactgcagcctccagccacgactgcaacgcgcaacccactttcatttctcatgagtcagcggacaccatgtctaggaggaccgaggaaaggcgctctggccttaccagacacgtcggacgtctatgacacagcccctctatccgttgccggcagctggcgccagactctctggtcgcggtttggaactgcgcgggaagtgggtggtgggcgggcaagcggtagtgggttgtcccttggagctgcccaatcgacgtgcattattctgttggcgcacggcggccttcaattaccgtctcattaactgatctcagcagcctgggagacaccacctatttgaactctaagggggcggggctttgggtgtgcctccgctcgactggctgcggttgtgaaagacagcggcagaagccaatcagcaaataagctctttttcggcacacgcagtcgctccacctgggtcgcgaccgttactggtggcgcgcgcggggacttaaagtaggtgagttctaggggcctggcccacggctccccgggagccatcttggttcccccagaaggcgggaggggcgtaccttgggtgcgactgggcggaggtgacttggaagttcgcttctcggactgtaatactcatccttacctggcgccccgctccgagtttaggtatgaagacacagggagacgtcgggccacaagggaacccactgaggtggggaccaaagatggtggctctttgaattggagccaa

SEQ ID NO: 35745 - DNA, 2300 bp, Homo sapien
ggtctcgaacttctgacctcaggtgatccgcccgcctcggcctctcaaagtggtgggattacaggcgtaaaccaccgcatgcggccatctatattttattttttgagacggactttcgctcttgttgcctaggctggagtgcaatggcgcgatctcgactcaccgcaacctccgccttctgggttcaagcaattctcctgtctcagcctcccgagtagctgggattacaggcatgcgctaccacgcccggctaattttgtatttttagtagagacggggtttctccatgttggtcagtctggtctcaaactccggacctcaggtgattctcccgcctgggcctcccaatgtgctgggattacaggcgtaagccactgcgcccggcctattttatctcacaataagacatgaagaaaatggtaactataacacttgcataattcataaagtcctttctgttggttatctcaattctgtgcacaacagtcaaataagcagattttacaaacgaggagctggagccctgcaaagttaaaggactttcctaggatcctacagctaatatagagacaaattgaaacaagttatctgattgtgtattttgagttatttctactcccacaaaatgactgtgttcatttccctaaaacgtaaagcattatattttaagtgggtagagagggcttacacaagttgatgttccctcatttagaaggcaacttagaaatacattgatctgcccagcgcggtggctcacgcctgtaatcccagcactttgggaggcaaaggcgggcgaatcacgaggtgaggagatcgagaccatcctggctaacacagtgaaaccctgtctctactaaaaatacaaaaaaaaaaaaaagaaatacattgatctgtgtgatcgaatgtgaattaacaatgacgttgacttgatactacatttctgagtggttaccacattttattgattgtatgcttctcaccagactgcaacatcctggaggacagggagctaattcttaatcattttgtaaccatagctcctaatttggtggatacatagtaactatcaaataagtgaataataaatctatgggaagaagcagatggactccgtcttgaacccactcaatttttcccccatcaattacccctctctcgtttttcaatactgggtctcttgcagagttgcagtggcggccacctggtcagtgaaatcagcgaattgaaaaaccactgacttcattaacatgtctaaagaggcaggctgaaaaaactgaaaatctatcaggcatctcattccatagttccctgtttgacaagaagaccaaggtgtcttcaaagtctgccctaaggtccagatctcctacccacgtaggagacttctagtttcacaaatccccgatgtcggtttctctaaactattttattctttgaacatactctccagacaacatcgctatcctgaaaagcccttgctgcaattttgtttctctttcaaaacaatggctcgaaaatttccaaggaaatagcaagagggcgattcccttcttgaagtatttgagggagcagaagcttactgaagttcatgccttgggtcaccaaaggccaggggaggcagagcacggtgccagacttctccccatttttcgctgaactaagcaatcctttctcccctagaggtactgcagctgggagctttcagggcgtgtcttccccaccacccaacttctggaaccccagacttctcaattcctgtacccccaagaactgctcactttttgtacaaaaacctcaggcatagaggaaaggaatcttgcgcaaggtcgtttttcatttacaaaacaaaaaccccatgaaaaccaaaccggtacccacccattcgtcacttcattttgcagcatggacaacaataggggactacaactcccaaagaggactgcgctcgtccactggctcagaggccaatggacgcctggtacatgaccggcatcgactaatcagggccaggctcgatgaggctttgtctccctaccgcgcgcggggccgattctcccgcctcccagccccggcgcacgcgcgccccgcccagcctgctttccctccgcgccctcccctctcctttctccctctcagaaccttcctgccgtcgcgtttgcacctcgctgctccagcctctggggcgcattccaaccttccagcctgcgacctgcggagaaaaaaaattacttattttcttgccccatacataccttgaggcgagcaaaaaaattaaattttaaccatgagggaaatcgtgcaca

SEQ ID NO: 35746 - DNA, 2300 bp, Homo sapien
gcctcgacatgtgcctgcagcccgggatctcacccacccccactcacgactcacacactcacaacgtgcagttgggcgcctaggattgtgcatgtcaagtctccacccactccctttgtttaatcgtcggaatttccagcccgctgctgccaaccgctccccagctgcgggaggaggagttagaaggacccgcccaattttcaggagcacataaattacctctgccggcagccgaccctcacttggccttacactccgctcggctcaccatgtgtcactctcgcagctgccacccgaccatgaccatcctgcaggccccgaccccggccccctccaccatcccgggaccccggcggggctccggtcctgagatcttcaccttcgaccctctcccggagcccgcagcggcccctgccgggcgccccagcgcctctcgcgggcaccgaaagcgcagccgcagggttctctaccctcgagtggtgagtatcgccgaagtgggcattcgcggggtgcgctgccctggagtcactggggaacgacccgactccagaggcctcgacctgacctgtctcctgttttgtctccccttaggtccggcgccagctgccagtcgaggaaccgaacccagccaaaaggcttctctttctgctgctcaccatcgtcttctgccagatcctgatggctgaagagggtgtgccggcgcccctgcctccagaggacgcccctaacgccgcatccctggcgcccacccctgtgtccgccgtcctcgagccctttaatctgacttcggagccctcggactacgctctggacctcagcactttcctccagcaacacccggccgccttctaactgtgactccccgcactccccaaaaagaatccgaaaaaccacaaagaaacaccaggcgtacctggtgcgcgagagcgtatccccaactgggacttccgaggcaacttgaactcagaacactacagcggagacgccacccggtgcttgaggcgggaccgaggcgcacagagaccgaggcgcatagagaccgaggcacagcccagctggggctaggcccggtgggaaggagagcgtcgttaatttatttcttattgctcctaattaatatttatatgtatttatgtacgtcctcctaggtgatggagatgtgtacgtaatatttattttaacttatgcaagggtgtgagatgttccccctgctgtaaatgcaggtctcttggtatttattgagctttgtgggactggtggaagcaggacacctggaactgcggcaaagtaggagaagaaatggggaggactcgggtgggggaggacgtcccggctgggatgaagtctggtggtgggtcgtaagtttaggaggtgactgcatcctccagcatctcaactccgtctgtctactgtgtgagacttcggcggaccattaggaatgagatccgtgagatccttccatcttcttgaagtcgcctttagggtggctgcgaggtagagggttgggggttggtgggctgtcacggagcgactgtcgagatcgcctagtatgttctgtgaacacaaataaaattgatttactgtctgcagtcttgagtgtatctttgcaagcgccgactccccactcctcccggccttcagatggcaaggaccggcgggaggcgccgtggccgagtccccagcccgcgcacctccctgggcccaggagccccttttcctggagtcacagaacccagcatccggttgccggatgtagtctttcattgcccagtctgcggttttcccaggtagttgccccgcggcgaatccgagatgtggcaatcacccttacgccagggtgccaggcggaggtcaagtccctcacccgggggcggagcgtggcgcggcgtgggcgggattcccggctcaagaagggcggtgactggggcggcagggatgtggccctccccgggctaaccaggcagcccggctgggcccgagagccagcgggcgggcgggctgcggactctagcggggcctgccgggaaaggggcgggccgagcgcactgggccgaggcggggcgaagtgggggtgcttagtccgttgcggggggcggggtcgcgtctgccgcagcaacggggtgcggcagggtggggaacgcgggagcggggccagctcccaggaaagctggtctgcgagcggcccctgcccggctcccaggtccctgcgcgaccccgcccttcccgagaccccagccgggctgccgcccgcgtcccggaaggtgagtgggggaggggagatggagcctggggctgccgag

SEQ ID NO: 35747 - DNA, 2300 bp, Homo sapien
agttcaagaccagcctgggcaacatggcaaaaccctggctctacaaaaaattttatatatatatatatatatatatatatatatatatatatatatatatatatattagccaggcatggtggtgctcacctgtggtcccagctactcaggaggctgaggtaggagtatggcttgagccaagaggcagaggttgcagtcagccgagatcatgccactgcacttcaacctgggcgacaaagccagatcctgtctcaaaacaaaaaaaaaaagttaaattctgtgtccatgagcagctgtctgtaaggaagttatggaaatgtgaatctgctttaagttgagtaattaccattactgtaacatttgtataatgtctcacaatttagaatgtttgtcccataaatttggttgtttgacttacagcaaggggcaaatctgggtggctgctaacctattgcctttgtatttgtggccctctgcaccagcctttatgtgaatatttctgcacgctcctaagagagtagttttgctgaactgtccctatacagtctttgcacctttactgtgtacatgtgtgttggtaggtgtacgtggtatgttttcctttttttccaggattgcattctttttatggctgaataatatttaattgtgtattgttgttgttgttgttgttattttatagtgacaaggtctcactatgttgcccaggctcctgagctcaagtgatcctcccaccttagccccccaaaatgctaggattacaggcaagagccaccatgccccaccattgtgtattacttttttaatctttctatccttccctccctccccaacttttattttaaattctggggtatatgtgcaggtttgttacctaggtatactgcatgatgctgaggtttggggtatgaatgatcctgtcacccaggtactgagcatagtacccaatagttagtgtttcaacctttgccttactccctccgtccttcttctactggtctcaagttgctattgttgccatctttatgtccatgagttcccaatgtttggttcccacttataagtgagaatgtgtggtatttggttttctgttcctgagttaatccgcttaggataatggccaccagccgcatccatgttgctgcaaagcacataattttgttcttttgtatggctacgcggtgtgtgtcttcatgtgtgctcaggcaggcaggtttgtgtctgtgtgtgctagtgtgttcatttctcccttaatcttgactatttctgtaacaatttccttcttggggagtttatattctaaggatacctacaagtgcatgaatgcgtgcatataactgggtcagtattgcagcaggatggcctgatctccaataaaaagccctcttggcagggcacggtggctcacgcctgtaatcccagcactttgggaggccgaggcgggcaaaccaaataccatacattctcacttataagtgggaaccaaacattgggaactcgtggacgtaaagatggcaacaatagcaacttgagactactagaagaaggacggagggagcgaggcagatcacgaggtcaggaaatcgagaccaccctggccaacagggtgaaaccccgtctctactaaaaatacaaaaattagctgggcgtggtggcgcgtgcctgtattcccagctactcaggaagctgaggcaggaaaatcgcttgaaccagggagtcaggggttgcagtgagccgagatcgcgcctctgcattccagcctggcgaccgaacgagactgctccatctccaaaaaaaaaaaaaaaaaaaggcctgtgagggatcctgtggctaaagtgagcccctctccaggtgccacatgcctcgacatgtgcctgcagcccgggatctcacccacccccactcacgactcacacactcacaacgtgcagttgggcgcctaggattgtgcatgtcaagtctccacccactccctttgtttaatcgtcggaatttccagcccgctgctgccaaccgctccccagctgcgggaggaggagttagaaggacccgcccaattttcaggagcacataaattacctctgccggcagccgaccctcacttggccttacactccgctcggctcaccatgtgtcactctcgcagctgccacccgaccatgaccatcctgcaggccccgaccccggccccctccaccatcccgggaccccggcggggctccggtcctgagatcttcaccttcgaccctctcccggagcccgcagcggcccctgccgggcgccccagcgcctctcgcggg

SEQ ID NO: 35748 - DNA, 2300 bp, Homo sapien
actggcgaagacaatctactgagtccacaatgctaatctcacctagaaacaccctcagagacacaccaagaaatgttatttaatctgggcaccctgtagtgcaacacaatcaaattgacacataaaattaatcattgaattttataccctaaaaatcgcaacatctaatccatttccatttttgatgcagataaaaaatccatgagatcagttcaggaagccataaaaaggtgatcaaaaagaagatggagtcaaggaagatgtcaagcaggaaagagcagaaagtccttttttttttttttttttttttgaaagacagagtctcatttgtagcccaggctggaatgctggaatgcagtagtgcgatctcagctcacctccacctcccagcctccaggaaggtgggattacaggcatgtgccaccacacccggctaatttttgtatttttagtagagatggggtttcaccatgttggtcaggctggtctcgaactcccgacctcaggtgatccatccgccttggcctcccaaagtgctgggattacaggcgtgagccactgcatccagctacttctatcttttaaaaaaatgtttttatataaataaaacatacatacagagaagtgcattaattttaaatgtacagctcaaagaactttcgcaaacagcatatgcatgcaaccagtgcctagattaaggaaaggacattcccaggatgccaggggccccctcctgtgccttttagttactaccctccccaaaggacaacctctctcctcactactaccattttgcctggacctgagctttatataaatggaatcatacaatgtgctctttcacagctggcttctttcactcgactttatgtctgcagatttgcctgttatcacatgcagttataggaacattcattttcagtgctgagaaatattccactgcatgcatatgccacaattttcctcccctttctcctgctgaaggctatttgggtcattcccactttaggcagtgtgggctccagtgcttctctattgggagcagctctgctcctcctgtccctcaatgagtgccactcactgaggacaccacggagagtgtgactgggcaccacacagtgcccccaactcaggggcaccaggtcccctttggctcaaagacgaagcaagacagagctttctgtctgaccccacaaacctgtctgccatttctgccacctccccaggactcagcccagggacccctttctctaatacccacaaatgtgcacattgttattatggcccctctgccccaccagcacaagggaacccctttctgttggaaggtgaggggatggttgttcttagtgtccatttctcctaaatacctggcctatgtcataaatcctttcagttcccatgaggtctcatgtttgaaatttatgaggcagaagatgctgcttggctctgctttctgctgactgcccaccctcctaccccaactgctagaagggctggggagtgggaggggaggagggagagatacagatgaaataaatcagaagttgtttttttttttttttctagagatgaggtctctctctgtcacccaggttggagtacagtggcaaaattgcagctcactgcagcctggaacccctgggctcaagtgatcctcctgcctcagcctcccaagtacctgagattacatgtgtgagccaccgcacctggccagagaatatttcaaaatgttagccctccacatttacaacggaaaggatttggaccaacccacttctgccatctctcttgggcaatggacactgatggttagggatgcccttacttgttcccagcgggcttctcatactctaacaaacacacagaaaggcatccagctccacagtgtctcagtctgtgtcattggtttgtctggggctccaaatgtcccacttcttctgggcatccattatcttccctggaatagagtgcaaaggcccctcagctcagtggtcttccctcagagcctggaagccccttcattatggtggctggatactttcttgagatattaacatgtgtttttttgttcttcctgttttgtcactgttctaccccattccaggaagcgtttgcacatcctggccccagaagattttgcgtagcctcaccaagagaagaagttggaaagaaaaaaaaagaagttggcaaggcatccagaggagaccccgccagcacctgggttctctgccaggggagagaggtaagcacactggactgaaggaggcaaaagctgctcaagggagtggggggtgggg

SEQ ID NO: 35749 - DNA, 2300 bp, Homo sapien
agggtgtttctaggtgagattagcattgtggactcagtagattgtcttcgccagtgtggtgggcatcatctaatctgctgagagcctgaacagaacgaaaagaggaaagagaaattcactactgtttcttcccgcctgcgcgctggaactggaatatcagtcttcttctctccttggactgagatttgtactattagctcccctggttcctctggtccacaagattgtggacatagactggaattatattactggctttcctgggtctcagttcgctgatggcagactgtgggactttagagcctccataataatgtgagccaattcctcattctatctatcaatctatatatcgattgattgatcgatcgatagatcgatctatctaatctatctatctacttatctatctatcatatcatctactgatttctctctctctcttcttttttttttttttgagacaagatctcactctgttgcctaggctggagtgcagtggcacaatcctagctcattgcagccttgacttcccaggctcaagcaatcctccagcctcatcctcctgagtagctaggactacaggtgcccaccaccatgcccaactaatttttaaactttttttacagatgaggtctcactatgttgcccaggctggtctctaactcctgggctcaagcgatcctctcacctcggcctcccaaagtgctaggattacaggcatgagccaccgtgcctggccctgatttctcctattgggtctgcttccctggagtaccctaatacagatgggtttgtgttattgagagccctatttgctgcctccttcacaagatgctagctgaactcttgagcatgggcatcagcattggtaaatctggcagtaaggcctgtgggctgctcacatcagccaggcagacatttgattaagtttgagatcttgatgtcttcaccagagccactaagttttatatatgccattgttgaagccaaccccaactcacctggcaatcagctggaggaaggggactacttctattcattgcagatttaaaagttggctacatatcctttgctacttctcccattgggaggtggggaccccttaaatctgggtggctgtgtggctgctcgagcgacacaaattgttggaagtgatgctaaaccagcttccagcacaggattcaatagcaccttccacctcctgtctcctggagcattctctgggagcctgaatcaccatgtaaaaagttcaaaatcaggctgggcacggtggctcacacctgtaatcccagcactttgggaggctgaggcgggcggatcatgaggtcaggagttcaagaccagcctggccaacatggtgaaatgccgtctctactaaaaatacaaaaattagctggatgtggtggtgcgcacctgtaatcccagctactcagggggctgaggcaggagaattgcttgaaccccggaggtggaggttgcagtgagctgagattgcaccactgcactccagctctgggtgacagaacaagactctgtctcaggaaaaaaaaaaaaaaaaaaaaaagtttcaaattcaggctgggcacagtggtgctccgtaatcctagaactttgggaggctgaggcagggggattacttgaggtcagaagttcagaccagcctggtcaacatagtgagagtccatatctacaaaaaagaaaagattagccgggaatggtggctcacgcctgtagtcccagctactcaagaggctgaggcaggaggattgcttgagacctttaaggttgtagtcagctatgaccatgccattgcacaccagcctaggcaacagagcgagaccctgtacccctcttccccccaaaagaagaagttcaaattccctgccactgcctgctggagtggccgagtatggtactctggccaaccactagcagagcccagctgtccccacaaaggtgacaaaaatgtgaaggaagctgtcttgaacactccagaccagccagctgccgaagatggcattgagtgactccagttaacatcaagcagagtagaattgctgaactgacagacacaattttttatgtaaggaagtggctgttgttgtaagccactaggtttgggatggcggttgctcagtgatagataactgaaacagctgtatctgcacctggaccagagctttcatgcccagggtgagtagcttcttggttctgtaaggctctgtctccttcaactcactttgccgggttgcggctacagcattacccagctcttcattccattacagttcatcaaa

SEQ ID NO: 35750 - DNA, 2300 bp, Homo sapien
ggaccgaccctggaccgaccgctaagcctggtgagtcctgcctctgcggaagcccggccttgataaacttatcggagtattctttaggccttatggtccggacagtgaacaggaaggccacttgggggcgcttgctgcacaggtgaccaactccaattactggaaaatggaaggaaagtgaaagcggccaggaaagagattcaggcttgggcagggaatggcaggaagcaccccaaagcagcagacccaagagagaggtcagaaaggctgactggaagcccagggcagctgcggggctatttagggtacaatgacctaatttgcacatataggagatgttgtcatttataggcagaatgttagaatcttcactttctcttttctattgtcctttgctaaaaagcctgtggaattctcagcagcgtcttaggatccctgagccttgctgtgagccaggctctgctctcagcgctttccagagccatctcatttggcccacacagcagttctgtgatgtggcattttgaaacatgcccacttagggtagaaactgagagttagaaaagttgctctccatccccatcccccatacacacacagtaaatggcagatctggaattcagatctcagttgtttgtttatttgttttatagagacaagctctctgtcacccaggctggagtgcaggggtacaattataactcaatgcaacctctcaagccatcctcccacctcagcctcccaaatagctggggctcaggcaccatcatgtcctgttattttttatttttatttttttgagacagagtctcgccctgttgcctaggctggagtgcaatggcacgctctcggctcactgcaacctctgcctcccgggttcaaacgattctcctgcctcagccttgagagtagctgggattatacgtgcccgccaccacacccagctaatttttgtatttttagtagagacaggatttcaccatgttggccaggctgatcttgaactcctgacctcgtgatccgcccgcctccgcctcccaaagtgctgggattacaggcatgagccaccacgcccagccattttttgtttgtatgtagagattggtagagatagggtctcaccatgttacgtaggctagtctcaaactcctggcctcaagcgatccttctgccacagcctcccagtgtaatgagattacaggcgtgtgccacaatgcttggcccaaatctgagtctttttgattacagagccaaagctaggctggaggatctcagccaccattctttttccaactctagaggtctataatacattcttatcctttctctctagtccttgaacatcttggaacattgtcattaactcctctaacttcttttatctcccaagaacactggtggcccaaattattcttgtgtacaaaaaatgtacagagatccaaaaatggtaaatgcttacctcaaggtcaccctggaagtcaaggtcagtgctaggatagtgttctcaaactgaggtctctggactcctgaggactcgtgaatacctgtgaaaactattaagttccatgtctaactttccttagtagcatttgaaaagtgttataagcatgttttgggtcatttgtaactgatcctggccctgcttgtgagtacctgcatttgcatttacctatttatagctttaattgtcttggtcgcatttgtaccaagtgaaggccaggagacaagttctaacaaagatttcttagtaatttgaacagacatgagaaggggaagaattgagtcatcgccaggcacacagtggaatattgtgccaagtgcggaagaaccttcatcaggcagtacatggtctgttgccagcagcaacttcatttcagaaaaacactatttattacattaatgttaaacttgtctttatacttttgtttgtacctatggctactttgctttggttttataactgcttaactactgaagcataaggaattcatagttagttgtgtttccacacatttaaattataaaaataatttaagtccatgaaaattgttttccttccaaaaaggtccatccatacattactcaagttcttgctctcacagtaggtataaactaaacctgggccatcaagagtctccaaggaaaacttgcaatgatggagtccctgttaaaggtcaaaaatctccccgaccctcaagatccagtgcaagtgaagcagccagttgtctggggtaaatacccggggtttgccatcccatgccaggaaaatgtaggacacggacacacgcgaggagtcgcga

SEQ ID NO: 35751 - DNA, 2300 bp, Homo sapien
gtggcatcaggtctgactcacacccaaagccttgtacactccttcaccctgccccccacccgtcgcttcttactctccccagctgctgacccagcctgctcctccagaggcagctgcagctcccggaaggggactgcagctagtgtatgtgtgggggcccatctggtccgtcctctcgctcgctggtcgtgctgggcttccctcctgtggccaggtggtctgcaggcctgaagctgccttctcccctctcctacgtgcctctcctcacattttttcagctgtttcccatcctctccttcctgggcagcaggctgccactggcttgaaggggagggaagcccaggatgggaggggatggtagagggtcatttgggggttctcagggacacagggggcctctggggttcggagtgatgcaggagatgtggaatgggctctggggaccacggatgggtaatcaggccctcttggtctttggtgctgctctctgggccccaggatggctgggatttccctctcaggcccctgggaatctcggctccgagtcccgcattccagctggctccagctccctttccgttgtcacttgactccactgggccccagccttgcatccctcccactcctccagcctagagctggggcgaggtgggcatcaccactaggaatttctcctgaggcagtgagaagaggggacaaaggtttcaggactctctagctccttctgctctccccagtggacccctctgtctggcactgccatgccacttagctggggtcagcgtgggcctggggtgtggaatgtcccaccagggtatgacgggctgtagcttgcctggcaggcctgttggggctttcccagagcacagctcctggaaggaggggctgtgggctgccaggtgaggtgacttgggaagccttggccccacccccaggctggccccacccccagtccagcgtctcctgggcctagattccccagctgctgttctctggaggggtaggtgttctgggggaatgaatccctgggggcttggtgggacaggaaggcgggaagaagctgctcttcgagtgaccctggggctgtctgttagcaggtccctcagccgttggaacgtccttgggcttctgaactagtgcccatgtgtgcctcggcctttcccaagggccagcttcttcctggtagtgcttttgtgtacttgtctggttgggacttcgtgtttctttcttgggattgttgtctgggactgcaagcagggtatgtttttatctactgtgaggttcctggggcggagatgtgcagtggagcgagaacttcctgtgaccgtgacattgtctaggtggtgagcaggtgtgggggtgtggagagaggtgaggggctgaggtagtgctgagtggggaaaaagcacctcccaccacaagctgttctgtcccgctccatcctctgcccagtagctctctcagttgctttgcctactcagtctcactgtttcatcttccctgggtctcttggtccccttccttttgactgtgtgtgattttcagtgtgcctccatccttctcctgctcctcttcttcctcctcccgaccactcaactttgtcctggcctcatttttggcctcttctggccagtgatcagaccctctggcccactacggccagagctggctgggcctgagggaggcttgccctgaggactcctgagtccccctcccactccactccgttgggagcccaggggaatcagggcctgggcgtctggacccccgggtcccttagaacgcccttcagagagaggaactgagaggagaaggagaagagagtgggcccgccttcagggtctggggccttccaggttgggtcgtaggggcgggagcgcacaggctgcgagagaggagcaaaggttggtggagggagaagagcagtctggggcctggctggacaggtgagccctgagacctgagctctgctcccttctctgggctaactcccgcagctgggctgggccgagcctgtgggaacctgcttcttcctctgtgccctggggctgctcccctttgcctctcccaccaggaaccgatcccagaagtaggaggggcgtcttcccctcgtgggccctgagcgggactgcagccagccccctggggcgccagctttggaggttctcgtttggggaagcgggggtgggctgcgagtgggtggagggggctgggcgcggagccggccggaggcagcggcgcgggcggctgggcggcctgggagcgcccaggcgggcttggcgggcgggttacctggggga

SEQ ID NO: 35752 - DNA, 2300 bp, Homo sapien
cagctccctttccgttgtcacttgactccactgggccccagccttgcatccctcccactcctccagcctagagctggggcgaggtgggcatcaccactaggaatttctcctgaggcagtgagaagaggggacaaaggtttcaggactctctagctccttctgctctccccagtggacccctctgtctggcactgccatgccacttagctggggtcagcgtgggcctggggtgtggaatgtcccaccagggtatgacgggctgtagcttgcctggcaggcctgttggggctttcccagagcacagctcctggaaggaggggctgtgggctgccaggtgaggtgacttgggaagccttggccccacccccaggctggccccacccccagtccagcgtctcctgggcctagattccccagctgctgttctctggaggggtaggtgttctgggggaatgaatccctgggggcttggtgggacaggaaggcgggaagaagctgctcttcgagtgaccctggggctgtctgttagcaggtccctcagccgttggaacgtccttgggcttctgaactagtgcccatgtgtgcctcggcctttcccaagggccagcttcttcctggtagtgcttttgtgtacttgtctggttgggacttcgtgtttctttcttgggattgttgtctgggactgcaagcagggtatgtttttatctactgtgaggttcctggggcggagatgtgcagtggagcgagaacttcctgtgaccgtgacattgtctaggtggtgagcaggtgtgggggtgtggagagaggtgaggggctgaggtagtgctgagtggggaaaaagcacctcccaccacaagctgttctgtcccgctccatcctctgcccagtagctctctcagttgctttgcctactcagtctcactgtttcatcttccctgggtctcttggtccccttccttttgactgtgtgtgattttcagtgtgcctccatccttctcctgctcctcttcttcctcctcccgaccactcaactttgtcctggcctcatttttggcctcttctggccagtgatcagaccctctggcccactacggccagagctggctgggcctgagggaggcttgccctgaggactcctgagtccccctcccactccactccgttgggagcccaggggaatcagggcctgggcgtctggacccccgggtcccttagaacgcccttcagagagaggaactgagaggagaaggagaagagagtgggcccgccttcagggtctggggccttccaggttgggtcgtaggggcgggagcgcacaggctgcgagagaggagcaaaggttggtggagggagaagagcagtctggggcctggctggacaggtgagccctgagacctgagctctgctcccttctctgggctaactcccgcagctgggctgggccgagcctgtgggaacctgcttcttcctctgtgccctggggctgctcccctttgcctctcccaccaggaaccgatcccagaagtaggaggggcgtcttcccctcgtgggccctgagcgggactgcagccagccccctggggcgccagctttggaggttctcgtttggggaagcgggggtgggctgcgagtgggtggagggggctgggcgcggagccggccggaggcagcggcgcgggcggctgggcggcctgggagcgcccaggcgggcttggcgggcgggttacctgggggaggccgggccgggcgctagcgcgcggggtgggcgtggcgggcgcggggcctggagctcggcgccgggcgtgggagccactgggactactgggtccgggagggggaagggagggctgcgagcccgaacgcgcggcgagaaggccgaggggagggaggggagcgaggagcgggaggaggaagggagggagccgaggcgagggggaggcggcgcctgggcccgagccgccccagccctggctcctctccccggaacaggcccccgacagctgctctcgggagccgcctcccgacacccgagccccgccggcgcctcccgctcccggctcccggctcctggctccctccgcctcccccgcccctcgccccgccgccgaagaggccccgctcccgggtcggacgcctgggtctgccgggaagagcgatgagaggtagggagagcggcggcggaacccgcgggcggaggcctggggctcttggggtgggggcgcgcggcggcgcctgcagggcgaggggcgggggaggcaggacgtcccgagccatgcttggtcgtccagctcttctaagcc

SEQ ID NO: 35753 - DNA, 2300 bp, Homo sapien
gaacaagagccccgctgttcccgagagaggtggggttggagagcggcacccaggaattccaagccagtctcctgggactctggcagcctgctccccggcgctggaccctaagggaccaggcgtgatgccttctggttctagcctctgagtgccccccacaactcagtcgtccccctcagctgctgcttcagagctctggggtctcagctgcctcttacattcctgccctagtgcattgtgggagcagctggaggaggacaaagggatgggggagtatcccccactcctcctacctcctggggtgacctgccttccttgtctttagacccgccctcgtctccaaggcaactcagcctttcctcagtccctcagaggcagccaccttctggaagtgggaactggggggactggatgtctgggtctcaggaaggcagagcagggataactgggcccaagatgccctgaacctgataagaggtggcagtcgagtccctcaggactccagggcctggagacttcagtacagggctctgagaccagtacaggttaggatagcttttcctgcagcaggggaggggagagtagttacttgggtttgtaaggagatgccatttagaatagttttatgtggggtaagcttcctgggcctgaggaacagagtagggattttcaaactttaatgggcacaggtcacctgggaattgtgttaaaaggcagattttgattgagcaggtcaagggtgagcctgagattctgatttcttccatgcttccaggtattgctgatggtccagggaccaccctgggcctagagggctataggggacagtaagactagaaggtgctggggtcccctctgcccttctcttagaattctggactcctatgtgggagggcagcagggtgagctggtccaggcttatctgatgtttaattctatcatatcctcaacaaggaattgcccaacctttcctgggacatatttattttttaaaagtcaaaatgattttcatattcttttacatatcttatgattttacataaatgcatttatgttacaagatttagaaaaatagtacaatcaacctgtctttttaaatttgcttttcttttgccccgttcatgttaactcttgttatattgtattctattgttatattctattatatattctctccttctagacgtacacacaggtatatatacaaacatgggtgcttgtttattctattttcaaaaggtgggatattttttatacttctgttgcttgcttttcatattcaacagatatacatggaaatcacacaaagttaggaatatattgcctctttgttacttttcatagctgcatagtagtcaataaaccttattttttttaattccagcctgtcccctgtgggcattcacatatcttacagatttatgtcttacaaaaggtaccataataaacatctttgaaatcttcttttttatttttatttttcactttttttaaagagatggggtctcactatgttcaccaggctggtctctaactcctggcctcaagtgatcctcccatctcggcctcccaaagtgctggggttacaggcatgagccaccagacccagacctgcacatatgttcttacttcctggtgcttctctctcgagggaatgctgggtcgaagaggatgtgcatttttaattataatagacattgctagattgctttccaaatagaagataacactcatttctgccattgagcatggtgcctcccttttcatcactttctaccacttttatatgttacagccttaaaaaaatatcttgtcagtctgcttggtatttccctgaggctggtgaatttgaccattaaaaaaaatgtttgttggcaatttggctttgcttttctgtgaaatgactattcacattctttggctgtttctttattgggttacttatatattttttcttgtcagttcctaaggggccttagtttattgtagttattaaaccttttcctgttgtatgtgttataaacattttttgcacacttgttgtttgttctaagccgttgtttatggggatattttgcccattcctgattggagaaatggggctttaggaagttatttaactgatctctgccctagtttcttcatgtgttaaatatggatagtaatagtatctaccttatgaagtgactgtgaagataaaattatggattctgtttaagggtttaggccagtgtctggcacaggggaagcattctaaaaatatagctgatgctgttaaacaatgactgttgttgttgttt

SEQ ID NO: 35754 - DNA, 2300 bp, Homo sapien
ggcatgccgggggcctgggcaaggagttctcccggagctaccggctgcgttactcccgggatggtcgccgctggatgggctggaaggaccgctggggtcaggaggtgagactggcaggggcagcacccagaggaggttggctctcctcacttccagctgtactttaaacaccacctatacgctgacgactctccagtttatatcatctccagactaagcctctcagctgagctccaaacaatattgtaaacctggccaccttttggatttctccacttagatgtctttttttttttttctaatagatggggtcttgctgtgttgcccaggctggtcttgaactcctgggctcagtgatcctcccaccttagcctcccaaagtgctgggattacaagcactgtagccagccacctagatgtctaataggcatctcaaacgtacgtttaacttcccaagctgaatttgattcccattcccagcctaaacctgctcctcccctggcattctccagctcaggaagtggtatcaccattgcctggttgcctaggctataagttaagatgatatccttgattcctttttttctctcacctccttccaaagcatcagcagccccgtctgttctacctccatagtgttcctgagtccagtcactcctcaccactccacctctactgccctaggccacctgcccgccatctccagcttagatgagtgcagtagatgccaaacgcgtctccctgcttctgcccttttctgcctggagtcaaatctccacctgggggggcggcatccagtggaccttagagcatgtaaatcagatacgtcacacctagctgacacccccatgctggctttccactctgccagaacaaaagctgagtccctagctggtgcaggatgctcagcctgacctggctcctgcctgcatcacttgtttcttggcgcctccttggccacgctgcctttcttcttgttgctggaacaagccagggctcgttcccacagcttctggacattttctctgtgcctgcaaagctcctcccctaaataaccacaggctctccctcactccattcagttctctgccaggtgtcacctccttagagagccttttctggccacccacctcactgctctgtccatacttcctgcctcttgttcttcgcagctgttttccctgctgggatctcagtcctacaagggtggggagtgacgttcaccactgagaacgcgcctggcacagagcgggcactcagccaacttctgctgaatgaacagagggaatgggctgaaatgaaggggaagctgaggcaggggtgcagggctgtgaggattggggagaatctgggcacaatgggatgataggcttggagacaaatggatggagccaggcaaggagaagagggcagctgagcctgaagtctgaggatggaacatcagagctgcgacagagccagaggtctcagctgcagatcttcatttcacccatgcctggctgcgccccacagtgctgtgtgctcggtgccacccctcatgggtctctaagtggccactgtgggctgggccagggagcagctggtgggtgggaagtaagatctgacctggactccatcccacccaccccctgtttcctggcccacaggtgatctcaggcaatgaggaccctgagggagtggtgctgaaggaccttgggccccccatggttgcccgactggttcgcttctacccccgggctgaccgggtcatgagcgtctgtctgcgggtagagctctatggctgcctctggaggggtgagtggctcagcttcctgggaatctgtttcctgagcaggggactggagggtggggagtgtggagaatgggcatccaggatcccttctcctgctgggaagctgtcactctgaggagggggctagccagcattgtctcctccatgccaatgagccagtggagagatacaagaagggacctgaaacctgcccaggcctgatgcagggatgggggatggagccttagtgcctctgacccccatcctctcaccctgccccagatggactcctgtcttacaccgcccctgtggggcagacaatgtatttatctgaggccgtgtacctcaacgactccacctatgacggacataccgtgggcgggtaagaaaggcccctgcaggatatggagtttggggtgggagggaggactgtgtgtgtgtgtgtgtgtgtgtgtgtgtgagagtgtgtgtgtgtaggggggctggtaagtagggtggggagtgagatggaagagctgagaagagggat

SEQ ID NO: 35755 - DNA, 2300 bp, Homo sapien
tcagcctcttgagcagctgggaccgcaggagagcacaccactacacctagctaatttttgttttgttttgtttttgtagcgatagagtttctgtataatgcccaggctggtctggaactcctgagctaaaatgatccaccttctttggcctcccaaagtgttgggattacaggcctgagccaccccgccaggcctctttcttttctttttcttttcttcttctttttttttttttaagctgctccttgctgagcagggctaactagtaagcagtggtctgtcccaatctttctattatgtttctttttcttattgctttgtaacagctttttgtattttgtttatttcatcaaccatttcttcctagattgtaaattgtctttcaaccttacctaaagtttgccataaagaagctctgtcaatttttagcttttctttgaagattttaaaacattaattgctaaaaagacagggacaacagaaaacatgggtgggctacaaagtataaaaagtcttgcatagtcattaccattttgatccctggttgcttgcaaatgtgcttcaaatcccagcttgggcacttcctgtctgattgtagggattttttttttaatttttttttttttagagatgggcatctcaggttgggctcagtggctcatgcctgtaatcccaacactttgggaagctgaggcaggtgggtcacctgaggtcaggagtttgagactagcctggccaacatgttgaaaccctatctctactaaaaataccagaattagccgggcgtggtggcacacacctgtagtcccagctacttgggaggctgaggtaagagaatcgcttgaacccgggaggctgaggttgccgtgagctgagatcatgcaactgcactccagcctgggtgacagagtgagagactccgtttcaaaaaaaaaaaaaaaagagagagagaaatgggggtctccctctgtcacccaggctggtgcgatcatagctcactgtagcctcaaactcctagtctcaagcgatcctcctgcctcagcctcccaagtagctgggggtcacagctctgagccacctcgccaggctgcaggcaaatttcttaatcttgccgggctccagtcttccagtctataaggtgggaataacaaaatttgcatataggaatttggggaaacgtgtagttctgggtttgggtgaagacctccacttttgtagtaggttcataaatcaaatcagagcaaatagttggtgtcttaaaaactgtatttatctgggtcttctaagtaaacggtttgaggagtggtggaggcagaaattaagatttactgagtacttagggtcaagtaaggtgcactggatcgtgttaatcgttaactcgtggaaaccgcccagagtgtgtacgctttctttcttttctttccttttctttttttttgagacggagtttcactcttgtcgcccaggctggcgtgtaatggcatggtcctggctcactgcaactccgcctccagggttcaagcgattcacctgcctcagcctccagagtagctgggattacaggtgcccaccaccacgcccggctaatttttgtatttttagtaaagacgggggtttcaccatgttggccaggatggtctcgaactcctgacctcgggtgattcgccgcctcggcctcccaaagtgctaggattacaggcgtgagtcaccgcgcccggcctggagtgtgtattatcccaattttatggggagtaattgtgctcactcggctcaccaccaagtcgccagagcgcgcctccgcaaggaagccctccaggcacttctactttcccggacccgcctcccgctccagccggttacacgcgccgttagcagcgtgggcggagttggttctgccttcgcggaaccaactggtccagcttctggtgtctcccctcgctcaattaaaagccagctcctctcctttcggcttccccacggtgcctttcgggatttgtagtcagacgcgcttcagccggctctaaggagagcaaaggcaagactccaattcccagcatcccccgcgcccggagagtgcagcgtctattctcatcctcttcacttttccactcctccccttacctcccttctcttctgaattctccattctgggctcttgcctgtgaaatctttctttgctttccccatcttttcctcgcattttttcaccatctttccctcaatctccaggagccaatgcgagactttggctccgattaagcgacggcccgagactcggggtgcgcgaggaggatcgacag

SEQ ID NO: 35756 - DNA, 2300 bp, Homo sapien
tcattgtcgtggaaaccaattaccgactgtatgcctacacgggtgaggcgggacagagggcccctggaagaggaggttgggggtgagggaatgccagtttatgttcgtgtttacctggcagtctacagagctctctgacatttctcatgacacttgaaagaagggcttgagggagtctgggtgtgggggtggcctcctcatcctctttctatccctggctcagagtcggagctgcagattgccctcattgccctcttctctgagatgctctatcggttccccaacatggtggtggcgcaggtgacccgggagagtgtgcagcaggcaatcgccagtggcatcacagcccagcaggtattcccacttgggagaggtggagcaggaagacaggctgcacttgggctgcgggggacaggggtcacattatggaaggctagctctgagtctgttataataggtggtggtgagttgtctgtgtttgaagagaaatgaaggctttgggtgtgagaataggtagacccttgaggggaaaaaaacatggagggaggaggtatagatctggatttgtgcctcggcactgccacatcctaactgcgtaaactagacatagttgttttgcctctgtgagcctcagtttcctcatctagtaaatgacagttcttacctcagggttgccgggataattcattggaagaataggggcaaagcattgagctcagcacctgtcatgcaataaatgctaaaaaaagaaaatagtagctgctgctattttaaagaaagaaaaacaaaacattactggaaagggcgaatgtgccagaaaaggaatatcccacgttgctgggagcagcaacgtgggataacagctgaactgggatgggtggagttgatgacaggagttatgagtttttagaataagctgatgttccagtgacattaggtgacagctcagatggctttcctgccttcttgctggagccctcatgccattcttgtctgttttcctagataatccatttcctaaggacaagagcccacccagtgatgctcaaacaggtatagacaggctccaagatgtcagaggctggcagctggtgatgacatgatggaaaagaaaaaggggcatccaaatctggggaagaaacagagggccgggttgtctggggcagtattctgagtccctacagtcaacccttgctccttgcagacacctgtgctgccccccaccatcaccgaccagatccggctctgggagctggaaagggacagactccggttcactgagggtgagtagcttctggtggccaagtcttggtcattggccagagaaagggcagacagttcagtctgcattttattttttacttcatggactaggagagaaaagctggcaagacagttttttgttgttttggggtgagtcggtagtaaacaaatcgtcccaaatcaatgcactttggatttggctaggtgagggaataattcacagtaatttgtattaggcctttctgaatatggctggatcacactggtgttaagatgaacccctgagcagacaagcatagagaattagtttgtaaaattgcggtgggggcaagcccagaccgcgtccagggctgccaccaaggagctggggggattcccaataggagctccgagcttcactttctcgtcttctccccgcgcccctcccgtcctgccgaccccaggtgtcctgtataaccagttcctgtcgcaagtggactttgagctgctgctggcccacgcgcgggagctgggcgtgctcgtgttcgagaactcggccaagcggctcatggtggtgaccccggccgggcacagcgacgtcaagcgcttttggaagcggcagaaacatagctcctgagagcgcgggacttggacacggacctcggcgggcgggactgggcggggcggggcatcagaactcaggtgttttttatttacgcgtcagggcttttcttgtttaataaagttatgatagctagcagtgcggtcccgggcgcctccccgtggggtttgccttcgcggcggactcgctcctctggtctacagcctttggaccggtagggagagggtggggccaaagccagctgctgcgcatgcgccggccggggccccgcccccatgcgccgcgcggctccagggccacgttccagggtcgggtttggtggattcctcagtccctgccgccgcggggcgccctgggatagcggcggggcctcctggtgagcgcgcgccggggcggcctccgggaagtgggagacgctgcgggtcctgggcccagg

SEQ ID NO: 35757 - DNA, 2300 bp, Homo sapien
tcctctcttcctatagaatcttttgcctcttttaatatcttagaaaaccccatactgggtttgtaagtccatttctattagcctctagaggctagatcaatgccatcctcacttgattttcctccaacacctggcattgctgggggcatcgctgggcctggtacataggaagtgcttgggaagtgtttgctgacaaggatctctctgggcacaggaaaggtggagagatctgtgagcagctgcgagctctgggtgcctccctggactgggatcgagagtgttttaccatggatgttgtgagtgttctgtgccttggtccctgtgagtgatgggcgatgtttagggatctgtgtggggcagggaggaagcaatgcctgggtccctgagcagggtgatgggctgagaagtggctcttagaggtggacactcaggtcattccagggctcctcagtggctgtgactgaagcttttgtgcggctctacaaggcggggttgctgtaccggaaccatcagcttgtcaactggtcatgtgctttaagatcagccatctcggacattgaggtgaggcggagagagggaagcaggtttgtgagagctctgaggcagagtggtcaatgattaagagctcagactctggagccagggtgcctggattcaaatctgatgcctgcctgttacagctgtgtggcttttggcaggccgtttagtctctttaagcctcagcttcctcagtctgtaaattagagatgatggaatgcttgcatcgtgggggtgttgtaaaaattaaatgagaattcacataggtgcttggcaagatacctggccatggcttaagtgctcagtgaatatttattagaagtgtgactgcacgagcattgggtgagggcagagggaggtagctcccgaatcctccaaatggcttttagatggattgcagggaggctgggcagatggatgagtggcagagtgaagcctgggcatgagccttgcagaaaggctgccctctgacccagctttctcggtgcctccaggtggagaaccggcccctgcctggccacacacagcttcgactgcctggctgccccacccccgtgtcttttggcctcctattttctgttgccttccccgtggatggagagcctggtgagcatagtactctgcagggtcacccgtttacctccatttttcctgttttctgaagcccatgttgggctgctaggaacccatcagtccatctctcacatgtaccttggtagtgttcacctcagcgtgggcacttacccagggtcttctgggggatgtacaaaaagtgcatgtggtcactgccctttgagagtgtggtgtgattcttcaggagtgcgctacccaggaaagagatcagttctaaggtatgttttgttttgtttgtttgtttgtttgttttgagacagagtctcactctgtcacccaggctgcagtgcaatggcacgatctcggctcctgcaacctctgcttcccaggttcaagcgattctcctgtctcagcctcctgagtagctgggattacaggcgcgtgccaccaggcctggctaatttttgtatttttagtagagacggggtttcaccatgttggtcaggttggtctcgaactcctgacctcgtgatctgcccgccttggcctcccaaagtgctgggattacgggcgtgagccactgcacctggcctctaaggtgtggtttttacggtaaatgttctgaagagctcagagaaagggaagacagatgagctggaattgtcagtggaagcttcttgtaggagctggtgctccccctgaggaatgtacagcatttgtgattaggacactgagaatccccagtgtcctctgggcacccagcaagaattctattatagttgctttaattaatgctgcccccatttcttccatgcaaattatcagggaattctttagcaccagagaccctctcagacctctggtcatcagcttatgggaaaccctgggttcctataaacactgctcctacttttttctagtcactcctgggggcctcttccaccttgactactccctgccccttcccctttccagttctactgcctttagctatgttggcagtgagaggtgaggatgatgaccagctgtaagtgtttaaatgtttatcttcagatgcagaggttgtggtaggaaccacaaggccagagacgctgcctggagatgtggctgtggccgttcatccagacgactcgcgatacacagtaatacccagtgcgctcctgcactctggcccgccccgccaatggcct

SEQ ID NO: 35758 - DNA, 2300 bp, Homo sapien
agcttcgactgcctggctgccccacccccgtgtcttttggcctcctattttctgttgccttccccgtggatggagagcctggtgagcatagtactctgcagggtcacccgtttacctccatttttcctgttttctgaagcccatgttgggctgctaggaacccatcagtccatctctcacatgtaccttggtagtgttcacctcagcgtgggcacttacccagggtcttctgggggatgtacaaaaagtgcatgtggtcactgccctttgagagtgtggtgtgattcttcaggagtgcgctacccaggaaagagatcagttctaaggtatgttttgttttgtttgtttgtttgtttgttttgagacagagtctcactctgtcacccaggctgcagtgcaatggcacgatctcggctcctgcaacctctgcttcccaggttcaagcgattctcctgtctcagcctcctgagtagctgggattacaggcgcgtgccaccaggcctggctaatttttgtatttttagtagagacggggtttcaccatgttggtcaggttggtctcgaactcctgacctcgtgatctgcccgccttggcctcccaaagtgctgggattacgggcgtgagccactgcacctggcctctaaggtgtggtttttacggtaaatgttctgaagagctcagagaaagggaagacagatgagctggaattgtcagtggaagcttcttgtaggagctggtgctccccctgaggaatgtacagcatttgtgattaggacactgagaatccccagtgtcctctgggcacccagcaagaattctattatagttgctttaattaatgctgcccccatttcttccatgcaaattatcagggaattctttagcaccagagaccctctcagacctctggtcatcagcttatgggaaaccctgggttcctataaacactgctcctacttttttctagtcactcctgggggcctcttccaccttgactactccctgccccttcccctttccagttctactgcctttagctatgttggcagtgagaggtgaggatgatgaccagctgtaagtgtttaaatgtttatcttcagatgcagaggttgtggtaggaaccacaaggccagagacgctgcctggagatgtggctgtggccgttcatccagacgactcgcgatacacagtaatacccagtgcgctcctgcactctggcccgccccgccaatggccttctcttctcttgggttttaaatggtggctctttctctcttgcttctacttccttttcctgagacttctctcagtggttctgattggactccctcctcctcttatagtttttctgtagctcaggggttgacaaactggcccatggtcctaatccagcttgcggcctttttttttgagacagagtctcgctctgtcaccaaggctggagggcagtggtgtgatcttggctcactgcaacctccacctcctgggttcaagcaattctcctgcctcagcctcctgagtagctgggagcgtggcaccatgcccggcacgtgccaccacacccagctaattttttgtatttttacaaaaattagtaattaattttttttaagtaatgtaatttttaagtaatgttatttagtagagacggagtgtcactgtgttagccaggatagtctcgatctcctgacctcgtgatctgcccacctcggcctcccaaagtgctgggattacaggcgtgagccgccgcgcctggctgcttgcagcctttatattatctatggctgctattatataccctctccagctctgctgcagtggcataatagagtaattgtgctgagaatgaatttgtctctaggcccaaaagcctaaaatatctacattctggccccttaagagtttgctgaccttgctctagcttgctaccttccactttctaccttcttattcctggggttctcacgccccagcccagacccttccaaccctcacaggtgcctgtccttgatccctctcccttcccttcagcatctacacgggcgacagcttcgtcaccccttgatggggcagcctcttcccctcatcacagactatgctgttcagccacatgtgggcacgggtgagtggaagtcaggggagggagagaaagttgggggtcctggaggagaggggagggaaccaggaggaagaggaaggtgggagtgggagatcctcatatagggtggtctgagtggggaatgggagggaggcacagacagagaaagtcgcaggggctggggcggtgcaggtgatgatg

SEQ ID NO: 35759 - DNA, 2300 bp, Homo sapien
atattatctatggctgctattatataccctctccagctctgctgcagtggcataatagagtaattgtgctgagaatgaatttgtctctaggcccaaaagcctaaaatatctacattctggccccttaagagtttgctgaccttgctctagcttgctaccttccactttctaccttcttattcctggggttctcacgccccagcccagacccttccaaccctcacaggtgcctgtccttgatccctctcccttcccttcagcatctacacgggcgacagcttcgtcaccccttgatggggcagcctcttcccctcatcacagactatgctgttcagccacatgtgggcacgggtgagtggaagtcaggggagggagagaaagttgggggtcctggaggagaggggagggaaccaggaggaagaggaaggtgggagtgggagatcctcatatagggtggtctgagtggggaatgggagggaggcacagacagagaaagtcgcaggggctggggcggtgcaggtgatgatgatacatctggaaaagcaaaagccaaggtcaggttcagtactcaccatggctgtgctccccaaggggcagtgaaggtgactccagctcacagtcctgccgatgctgagatgggggcccgacatggcttgagccccttgaatgtcattgcggaggatgggaccatgacctccctctgcggggactggctgcaggtggtaccaccctatgttaccccatcctttgggggctctctgtccccctaatcctcctcctagtttcttatttctctagaggccttcagtctttactcttgccgctttttctccagggtcttcaccggtttgtggcccgggaaaagataatgtctgtgctgagtgaatggggcctgttccggggcctccagaaccaccccatggtactgcccatctgcaggtaacctcattttaactcctttactaagggctaccccaaaagggaatgtatggagcttaagggtgacaataggatgggctctgcacccctccgttagaatacgagctccgtgtcggttttattcgctattgtatcctcagtaccaagggcctggcatggcatggggtcttgtgcccctgggagaagtcacagggccggaagagcagtggactcaccctgtctctctttcagccgttctggggatgtgatagaatacctgctgaagaaccagtggtttgtccgctgccaggaaatgggggcccgagctgccaaggtgaggctgcagtgtaggaaggactggggccaggggttgggggagctccctgagaattggaatgaagaaatgggaagcaggagacctcctgccctgaagacctctccagctgtggtaactgagaggatgtgtgggatggaggctgggcggcccagcaagggctggctcatatccttactcaagcccagaatcttggcaagaggcttgggaggtcctttctgagttttaaaatgacctcagaggccactcgtcctatctgtggaggtgcggccgtgcaggaagggcaacattgtctaaagtcccctttctctccaggctgtggagtcgggggccctggagctcagtccctccttccaccagaagaactggcagcactggttttcccatattgggtaagggtagggtaaggggagctcttgtggagatggggaggggggactgactggttattctaagacttcacgaatgtcctcccggcagggactggtgtgtctcccggcagctgtggtggggccatcagattccagcctacctggttgtagaggaccatgcgcaggtgggtaggaagaagcacccggagggccgagtgtggcacagagcacctagcccaggagtcagagctccgcagggccaagtcccgctcctgcctggtcatgtgcttcatgctcatagtcatgtaaccttctgcgcgatcaaggctccctgaagtggcatttctttatctcacccctgggggaacctggccactctaagaccacatgaggacgtgaaaaccaagtgacatttacacctgtcagctgttcttcctcactctccccaaccccttcctacttttgcagggagaagaggactgttgggtggttgggcggtcagaggctgaggccagagaggtagcagcggaactgacagggaggccaggggcagagctgaccctggagaggggtgagtgcctgagctggggagggatgtacaggggagcgggggcctgggcatctgggcctttgaggggaacagatcccaagatacagaaggtagggtcaggaaagtt

SEQ ID NO: 35760 - DNA, 2300 bp, Homo sapien
acagggccggaagagcagtggactcaccctgtctctctttcagccgttctggggatgtgatagaatacctgctgaagaaccagtggtttgtccgctgccaggaaatgggggcccgagctgccaaggtgaggctgcagtgtaggaaggactggggccaggggttgggggagctccctgagaattggaatgaagaaatgggaagcaggagacctcctgccctgaagacctctccagctgtggtaactgagaggatgtgtgggatggaggctgggcggcccagcaagggctggctcatatccttactcaagcccagaatcttggcaagaggcttgggaggtcctttctgagttttaaaatgacctcagaggccactcgtcctatctgtggaggtgcggccgtgcaggaagggcaacattgtctaaagtcccctttctctccaggctgtggagtcgggggccctggagctcagtccctccttccaccagaagaactggcagcactggttttcccatattgggtaagggtagggtaaggggagctcttgtggagatggggaggggggactgactggttattctaagacttcacgaatgtcctcccggcagggactggtgtgtctcccggcagctgtggtggggccatcagattccagcctacctggttgtagaggaccatgcgcaggtgggtaggaagaagcacccggagggccgagtgtggcacagagcacctagcccaggagtcagagctccgcagggccaagtcccgctcctgcctggtcatgtgcttcatgctcatagtcatgtaaccttctgcgcgatcaaggctccctgaagtggcatttctttatctcacccctgggggaacctggccactctaagaccacatgaggacgtgaaaaccaagtgacatttacacctgtcagctgttcttcctcactctccccaaccccttcctacttttgcagggagaagaggactgttgggtggttgggcggtcagaggctgaggccagagaggtagcagcggaactgacagggaggccaggggcagagctgaccctggagaggggtgagtgcctgagctggggagggatgtacaggggagcgggggcctgggcatctgggcctttgaggggaacagatcccaagatacagaaggtagggtcaggaaagttgggaatggagccaaaggggacagccctggtctctgggggtgggggttggcctagaatggtggcagcagtggtctgaggtcctagaagccaaggttccaactgtccccattctttttctgtttcccagatcctgatgtcctagacacatggttttcttctgccctgttccccttttctgccctgggctggccccaagaggtgaggtgggttgagagggcgaaagtgaaggggaaacgataaggaagggatggctgggcccccacagaggcttgaggggggcctggggcctgggcctcttactgctcctcttccccctagaccccagaccttgctcgtttctaccccctgtcacttttggaaacgggcagcgaccttctgctgttctgggtgggccgcatggtcatgttggggacccagctcacagggcagctgcccttcagcaaggtaagagcccttcagtgccctgccgctttctgtgactccagtgttccccaaaccttgtcctcccttctaacccctaatgtggtcctttccacgttgctgattcctttttcctaattcacttcctaccctacccccaaaagtatggaggccagagatcccaaggcacctccaaggaaacccccctctgttgacccctccctgcccccaggtgcttcttcatcccatggttcgggacaggcagggccggaagatgagcaagtccctggggaatgtgctggacccaagagacatcatcagtggggtggagatgcaggtgaggacgaagcacccactagagggacaaggtttgcagggtttgcaggagagaggaaggcaggctgagggaggagtgaggccagcaggtgtgacccttatagaggcagggccttcgacctgggtcgtgaattgcccccttccatccccaggtgctgcaggaaaagctgagaagcggaaatttggaccctgcagagctggccattgtggctgcagcacaggtgagtcatcgctgcctgccccccaccagctctagctcaccacctctggcttcctctgcaacccaggtcctggccctgcagccacaaaggcatctgccacccttcttcttcctctggttgcagaaaaaggactttcctcacgggatccct

SEQ ID NO: 35761 - DNA, 2300 bp, Homo sapien
gttcctagaagtacaaccgttggaagtcaggacgtatgagtccctcagggaagcaggatttggaagctggggttgtaggggaaccatgagggtctaggactgcatctgaccttctggaaacctaagagtgggctgggaaggtcaatacctgagccgtgtctcacctagatggctgcagctgacagagctttccattcctttgacagggaaggggaaaggggagataaggggcaccaaggaagacacgtgtcatgtttggggacagtgtgatatggaaggtcagaccccagctctggagccagacagccctgaatcctcagaagctcagtaccagggctgagtccactgcactggaatccaccactgctgagctgtgcattctctggcaagtcacaaggcctaagtcttaatttcacctctaaaatcggggtaatctagtacctacttcacaggcgcttatgcgctataaaggaatacttagtgatgagcctagcacatggctgtagaaagtgtgggggaggccaggtgcggtggctcacgcctgtgattccatcactcagggaggccgagggggtggatcacctgaggtgaggagttggagaccagcctggccaacatggtgaaaccttgtctctactaaaaatacaaaaattagcctgctgtggtggcgggtgcctgtaatcccagctactcgggaggctgagccaggagaagattgcaccactgcaccccagcctgggcgacagggatgagacgctgtcaaaaaaaaaaaaaaaaaaaaaggaaggaaaggagggagggagggagggaggaagggagggaggaagggagggagggagggagggagggcccttactcttctccgaggaagatctctctgtgttcccaattctacctcctgctcgtccctcctgtgcctgctgctcttctcctccatgctttcttcccactgtggtcttcctgttgtcctgtgcaagtctgggagtcattggttgcctcactttacacttacagtgcagaccaggcctctatctctgtttccccatcttgcttttgctctccccacctctgcccagtgctctctctgcctctgtctctctgtgctcagtcccgctggctttggggaaggtggagaggctgcatagggaagtggcagataggaagatgctggcctgtgcccttgtgtgttcaagcaagtttccatggctggtgtgtctctttgtctggctagagggatgggttctaatctctctgctacttgttggctgggtgaccttagcaggtcacttaccctctctgtgccttactttcctagtttctaaagagggtcagtaactccctctgcacatctgtcctgtgcttgcctgtcccagcgcttgcctgtaggcatctcggccgggagtaggtgggtgtccccttttcatgggtgcacaaggcaggagtgagaggatgtctgaggaaactcgtgtctccccctgacaatccaggatgcgttagagcaagtaaaacagaatgttcagcaatggaagttcccatgaccagatttctcatctagaaagccaccaaggctggggaagcagtgttcacagtccattatagacccaactccttgttctactccttctactcttttcactactgcacttgactagtgtttaaaaaaaaaaaacctgagggagcaggacacctgggttctggaagaaacttggcttaatccacccctcccttttgggcccacattcctgagcccttcggtgtcaagaatgatgaaaattagctgcagttaataattaatctctaaagatccttgggaggcccgggcatgggtgggggcccagacacctgcaggagggacgcctccctggtccccgcttccctctccatttccctgtctgtaggacccgcactcactccctcaaacctggagacacaagggaggggtgggacacagagtggaaaagaggggacttccttctattttccccaaaagcacagtgaatggtcctctcctgggtcctctcttactgggagaactggaaaatccagttgaccagattcctcctcccatttcccctcaaacacttatgctaaggcttgagtggggtgtagaaacaggcctgttaaggagaggccaccgggacttcagtgtctcctccatcccaggagcgcagtggccactatggggtctgggctgccccttgtcctcctcttgaccctccttggcagctcacatggaacaggtgagggctagagggcaggactcctgggtccctgtggcaagaagaggccagagaaaaggg

SEQ ID NO: 35762 - DNA, 2300 bp, Homo sapien
agacctttggaaaagtccatgagtactttggataagacaagtaccagctcacataagactacaacttccttccacaactcaggcaattcacagaccaagcaaaaaagcacatcttttccagaaaaaatcacagcagcctcaaaaacaacatacaagaccacaggaaccccagaagagtcagaaaaaactgaagattccagaacaacagttgcctcagacaagctcctgacaaaaactacaaaaaacatacaagagaccatatcagccaatgagctcacacaatctctagcagagcctacagaacatggaggaaggacagccaatgagaacaacacaccatccccagcagagcctacagaaaatagagaaaggacagccaatgagaacaccacactatccccagcagagcctatagaaaatagagaaaggacagccaatgagaacaccgcaccattcccagcagggcctacagaaaatagagaaatgacagccaatgagaataccacactattcccagcagagcctacagaacatggagaaaggacagccaatgagaacaccacaccatccccagcagagcctacagaacatggagaaaggacagccaatgagaacactacaccatccccagcagagcctacagaacatggagaaaggaccccatttgccaatgacaaaaccacatcatcctcagcagagtctacagaacatggagaaaggaccccactggccaacgagaacaccacaccatccccagcagagcctacagaaaatagagaaaggacagccaatgagaacaccacaccatccccagcagggcctacagaaaacagagaaacgacagccaacgagaagaccacactatccccagtagagcctacagaaaatagagaaacaacagccaatgagaagaccacaccatccccagcagagcctacagaaaatggacaaaggaccccatttgccaatgagaaaaccacatcatcctcagcagagcctacagaacacggagaaaggaccccactggccaatgagaacaccacaccatccccagcagagcctacagaaaatagagaaaggacagccaatgagaagaccacaccatccccagcagagcctacagaaaatggagacaggactcctttggccaatgagaagaccacgccatctctagcagagcctacagaaaatggacaaaggaccccatttgccaatgagaagaccacatcatcctcagcagagcctacagaacacgaagaaaggactccactggccaatgagaacaccacaccatccccggcagagcctacagaaaatagagaaaggacagccaatgagaacaccacaccatccccagcagggcctacagaaaatagagaaatgacagccaacgagaagaccacactattcccagcagagcctacagaaaatagagaaaggacagccaatgagaagaccacatcatccccagcagagcctacagaaaatggacaaaggaccccatttgccaatgagaaaaccacatcatcctcagcagagcctacagaacacggagaaaggaccccactggccaatgagaacaccacactatccccagcagagcctacagaaaatagagaaaggacagccaatgagaagaccacaccattcccagcagagcctacagaaaatagagaaaggacagccaatgagaacaccacaccatccccagcacagcctacagaaaatggagacaggactccattggccaatgagaagaccacaccatctctagcagagcctacagaaaatggaaaaaggaccccatttgccaatgagaagaccacatcatcctcagcagagcctacagaacacgcagaaaggactccactggccaatgagaacaccacatcatccccagcagagcctacagaaaatagagaaaggacagccaatgagaagaccacacaattcccagcagagcctacagaaaatagagaaagcacagccaatgagaagaccacaccattcccagcagagcctacagaaaatagagaatggacagccaatgagaacaccacactatccccagcagagcctacagaacatgaagaaatgaccccattggccaatgagaagaccacactatccccagcagagcctacagaaaatggagaaaggaccccatttaccaatgagaagaccacaccatcctcagcagagcctacagaacatggagaaaggaccccactggccaatgagatcaccacaccatcccgagcagagcctacagaacatggagaaaggatagccaatgagaa

SEQ ID NO: 35763 - DNA, 2300 bp, Homo sapien
cccatttgccaatgacaaaaccacatcatcctcagcagagtctacagaacatggagaaaggaccccactggccaacgagaacaccacaccatccccagcagagcctacagaaaatagagaaaggacagccaatgagaacaccacaccatccccagcagggcctacagaaaacagagaaacgacagccaacgagaagaccacactatccccagtagagcctacagaaaatagagaaacaacagccaatgagaagaccacaccatccccagcagagcctacagaaaatggacaaaggaccccatttgccaatgagaaaaccacatcatcctcagcagagcctacagaacacggagaaaggaccccactggccaatgagaacaccacaccatccccagcagagcctacagaaaatagagaaaggacagccaatgagaagaccacaccatccccagcagagcctacagaaaatggagacaggactcctttggccaatgagaagaccacgccatctctagcagagcctacagaaaatggacaaaggaccccatttgccaatgagaagaccacatcatcctcagcagagcctacagaacacgaagaaaggactccactggccaatgagaacaccacaccatccccggcagagcctacagaaaatagagaaaggacagccaatgagaacaccacaccatccccagcagggcctacagaaaatagagaaatgacagccaacgagaagaccacactattcccagcagagcctacagaaaatagagaaaggacagccaatgagaagaccacatcatccccagcagagcctacagaaaatggacaaaggaccccatttgccaatgagaaaaccacatcatcctcagcagagcctacagaacacggagaaaggaccccactggccaatgagaacaccacactatccccagcagagcctacagaaaatagagaaaggacagccaatgagaagaccacaccattcccagcagagcctacagaaaatagagaaaggacagccaatgagaacaccacaccatccccagcacagcctacagaaaatggagacaggactccattggccaatgagaagaccacaccatctctagcagagcctacagaaaatggaaaaaggaccccatttgccaatgagaagaccacatcatcctcagcagagcctacagaacacgcagaaaggactccactggccaatgagaacaccacatcatccccagcagagcctacagaaaatagagaaaggacagccaatgagaagaccacacaattcccagcagagcctacagaaaatagagaaagcacagccaatgagaagaccacaccattcccagcagagcctacagaaaatagagaatggacagccaatgagaacaccacactatccccagcagagcctacagaacatgaagaaatgaccccattggccaatgagaagaccacactatccccagcagagcctacagaaaatggagaaaggaccccatttaccaatgagaagaccacaccatcctcagcagagcctacagaacatggagaaaggaccccactggccaatgagatcaccacaccatcccgagcagagcctacagaacatggagaaaggatagccaatgagaaggccacaccatccccagcaaagcctacagaacatggagaaacgacagtcaatgaggacaccacaccatcctcagcagagcctacagaaaatggagaaaggaccccactggccaatgagaacaccacaacatccccaacagagtctacagaacatggagaaaggacagccaatgagaagaccacaccatccccagcagagcctacagaacatggagaaaggacaccatcagccaatgagaagaccataccatctccagcaaagcctacagaacacgaagaaatgaccccatcggccaatgagaacaccacaccatccccagtaaagcctacagaacatggagaaaagactacattggccaatgagaagatcacactatccccagaagggcctacagaacatggagcaaaaactacgtcggccaatgagaagatcacaccatccctagcaaagcctacagaacatggagaaaggaccacatcacccaatgacaagatcacctcatctgcagcagagtctacagaacatagagatagggctacatcagccaatgtgatcacaccagccccagcagagcctataaaacatgcaaaaaggaccacattggcccatgagaagatgacacaagtcacagaaaagtccacagaacacccagaaaaga

SEQ ID NO: 35764 - DNA, 2300 bp, Homo sapien
aattttttttttacaataatctttcatgaagttaacaaacaagaaggaattaaaatacttgatgatattagggtatgatttgggagatgggtaatacgaattaaaatgttctgaggtctttgtgttattttgatagcgagtaaagatattaattacattaggctctgataagtatgcgcgctacaattttcagagtaccctctaaaaggtgaaatttggacttgaatccaggatctcagtttctaaataattctggaagaagaaaattcttagagtgctattggcttttcagctgcagaatactggcacatcagaagaattgctgggagtccaggacccaacctgtcactgagcgttcccgcatacctgaccctctggaacttcccatcacagccactaggcagactcacttctgagcctttcccagcacaccgctgaccctttctgtttctccagctcactcattcagagctccttcatgtcttcagccacctcctgcttgccagcttccttctaacagaacttgcatgtcaggaaagctcgttcgcctacaaataaactatctgagagactgtgtcttccaggaagcttctcgtcattgttgggggaaatgcagacaactcactttggtcattgcaatggtttggatgtggttgttaaaccctgccaagtctcatgttgaaatttgattcccaatgttggaggtggagcctggtgggaggagtttgggtggttgaaacagatccctcatgaacagctcggtgccattctcaaccagtgagttctcactcttagttcccacaagaactggttgttgaaaagatcctgtcacctcctccattccttctttccagcttcctctctctcgctatatgatctgtgcaaaccggctccccttctccttcggccacgagtggaagctttttgaagccctcaccagtgcagacgttggtgccatgcttctcatacagcctgcagaaccgtgaggcaaataagcctcttttctctatgtcacccacagtcagggattcctttatagcaacaccaatggactatgacagaaaatacagactgtatattggaaccccatcagcctggtcacagatgccatctcagacctccccaaaccctctgctcatttgggtctcttcagtcacgctcttttagctgactgtttcccctctgctggccatacccaagtgtccagaccaaattcaagcctcctccaggacttggactgttgatctccctcctcccatcagactgtgtcccgatatggcactgtgtctctccctaaggtgtgtactctcctgagagacgcttccttggaactgatgctaaggcacatcagaaggatctcagggtggaaaggctcctatacagccgtctgaaaacaaaaacaaaacagaggggagctcctatggttgagggtcagaaggagaccctaccttccttctcctgctatgagtctgacagggggcgtattcaatactctcccacaccctcagttctcatgccccagagaccccaaacatgttttcattatctctcttcattatgtcttctggatctctcttcccctgttccttcaatgtgcattgttgagtgcttactgcatactcagtaatactccatttgtcttctgcccataacccaggagcccagagtcctagttactggtctcttttgcgtcacctattactgtttgctgtagagatgtgaggtcctactctcttggctcagttcattagggcttctttcatgctaaagcaggcccacaggacttcctgaccagaaaacaaattcttgagctgcaacaggtttctaacccgatccctgcttcaaagggtgggtcccttccactctgacaaccatgatctcctcatcccattctacttcctgctgcaacccagccaagcaccctgcctagtgtggtcatgtcattctcctttctcaccttcctcttgacccctgctctattccgtcccaggcttggtatcgttctctcacctgcctgtagttggcagactgtcaggtcaactgccccacccctcctcagaccatatgaagctataaaggcccctgcagctctttcacaacagagaaagaggcaactacattgcctggaggaagcctaaggaacccaggcatccagctgcccacgcctgagtccaagattcttcccaggaacacaaacgtaggagacccacgctcctggaagcaccagcctttatctcttcaccttcaagtcccctttctcaagaatcctctgttctttgccctctaaagtcttggtacat

SEQ ID NO: 35765 - DNA, 2300 bp, Homo sapien
acttgaatgcatatagtcacctggcttcttgttgtacatgcagactcctgggccccatctcaaattctaattcatttagtctggaatgatttgcttaagaatattttcaacatgctcccttaagtaattctgaaataagtgtgttctgaatattattctgagaaatattttccaagaaggaagcaatactacttaagaaaaaaattgatcagtatatactagtttcacctagtcctataattcttttataatactttatatctgtattgtatcttgcatagcagaatgtggaaaaaggttagctaccagtgaaactagatgatgtaactctggcattgtgggtgggtggttgacttagcttagtctccacaagtgcagatttagtagcctgggttcagtttcctgttccaccactcactagctgtgtaaacttgggccagtgtcaacttttttttattttttatttttgagacggagttttgctcttggcacccaggctggagtgcaatggctcgatctcgactcaccgcaacctctgcctcccgggttcaagtgattctcctgcctcagcctcccgagtagctggaattaatgcccggctaattttgtatttttagtagagatggggtttctccatgttggtcaggctggtctcgaactcccaacctcaggtgatccgcccaccttggcctcccaaagtgctgggattacaggcgtgagccaccgtgcccagcccagtatcaacattttgaagcctcaatttcttcatctcagctggtgataataatagcatctatgttatagcaccatagtgagcattaaataaaattatgtaatgaatttagccaagcaataagcagaaagtatatacacacaatatatatttgtcattatatgatttcttcagcaacaaattccaatgagactagcacctctgccaacactggatccagtgtgatctccagtggagccagcacagccaccaactctgggtccagtgtgacctccagtggggtcagcacagccaccatctcagggtccagcgtgacctccaatggggtcagcatagtcaccaactctgagttccatacaacctccagtgggatcagcacagccaccaactctgagttcagcacagtgtccagtgggatcagcatagccaccaactctgagtccagcacaacctccagtggggccagcacagccaccaactctgagtccagcacaccctccagtggggccagcacagccaccaactctgactccagcacaacctccagtggggctagcacagccaccaactctgactccagcacaacctccagtgaggccagcacagccaccaactctgagtccagcacaacctccagtggggccagcacagccaccaactctgagtccagcacagtgtccagtagggccagcactgccaccaactctgagtccagcacaacctccagtggggccagcacagccaccaactctgagtccagaacgacctccaatggggctggcacagccaccaactctgagtccagcacgacctccagtggggccagcacagccaccaactctgagtccagcacaccctccagtggggccggcacagccaccaactctgagtccagcacgacctccagtggggccggcacagccaccaactctgagtccagcacagtgtccagtgggatcagcacagtcaccaattctgagtccagcacaccctccagtggggccaacacagccaccaactctgagtccagtacgacctccagtggggccaacacagccaccaactctgactccagcacaacctccagtggggccagcacagccaccaactctgagtccagcacgacctccagtggggccagcacagccaccaactctgagtccagcacaacctccagtggggccagcacagccaccaactctgggtccagcacgacctccagtgggaccagcacagccaccaactctgagtccagcacagtgtccagtggggccagcacagccaccacctctgagtccagcacgacctccagtggggccagcacagccaccaactctgagtccagcacagtgtccagtggggccagcactgccaccaattctgagtccagcacaacctccagtggggccaacacagccaccaactctgggtccagtgtgacctctgcaggctctggaacagcagctctgactggaatgcacacaacttcccatagtgcatctactgcagtgagtgaggcgaagcctggtgggtccctggtgccgtgggaaatcttcctcatcaccct

SEQ ID NO: 35766 - DNA, 2300 bp, Homo sapien
gcctgggcagcaagagtgaaactctgtctcaaaaaaatatatatagtattgtaccaacaataacttcttagcttctataattgtatatataatctctcagtttctataattgtactatgtaagatattgacatgaggaaaagctaggggaaaaatatacgggaactctgttaattatttttgtaattctctgtaagtctaaaattatctcaaaatgaagttttaaaaattctaaaacaaagccaaaccaaaaaaattctattgacctgtacatgaaaaagggtgaattttatcatatgcaaattatacctcttgacttagaaaatcagatattttccttactatactcttttgaaatctattcattagttatactaaatacatacaaattcttttgagtgtgtttaaatactatgtttgaaaatgttgctgggtgatgtggctcacacctgtaatcccagcactttgggaggctgatgagggaggatctcttgagctcaggagttcgagaccagcctgggcaacatagtgagaccttgtctctactaaaaataaaaaaacaatcagctgggcatggtggtgcatgcatatagtcccagctactccggaggctgaggtggaaggatcacttgagcctgggagatcgaggctgcagtgagccgtgatagcaccactgcactccaacctgggcaatacagcaagaccctgtcaaaaagaaagaaagagagagaaagagaaagagaaagaaggaaagaaagaaagaaagaaagaaagaaagaaagaaagaaagaaagaaaggaaggaaggaaggaaggaaaagagaaaatatttaatacattcaaataatactagtagttaacatagtcagttacatgtggtaaactagccattcattaaattgattttcaggaaatcagctgccttctaagagaggaacaattcccggcccacctgcaatttcacactcctcttttagttagaaggacactgggaaagagagaggccccacaaatggtgagagacatctctgaatgaagatgggaaccaacaatgatcttctaaagagtgggcaaggcagggataagggtcagagaaggaggaaaagatgtgggtattctcattcaggcctgacctcaccacaagtggactaattttgtgcagtgatatggcttggctctgtccccacagaaatctcaacttgaattgtagctcccacaattcccctcatgctgtggggagtttttctcttttcgccaatcatctttctcttgctattctcatgactgtgaataagtctcatgagatttgatgggtttatcaggggtttccgcttttgcttctttctcattttctcttgccgccactgtgtaagaagtgccttttgtctccctccgtgattctgaggcctccccagccatgtggaactgtaagtccaattaaacttctttttcttcccagtcttgggtatgtctttatcagcagcgtgaaaacagactaatacatgcagtaattgagaaagctcactggggtgagggcactcgagcagggggagcaaggagagagatccgtgggctggagagaagccaaggaagaggatttgggtggatgattgagcaaagagtgaggttttaagagacagagagattgggtgttttagccccctcatgagtgttcctctccttctgttggaggaccttctcttggtccttaccaaatgtcctctaccctctgacacccagctctcctcctgccaagcatcatcccccaggcaggcctggcctatgccctccttggtcatcctgactttactgtggccacctgtgggaaggaaggccgaggccctccctgagcactgaaacaccgggtggaggatggttttcaactaggctccacatcagaaagcagtgcactcacgctgacaggcttgatcccctgtggctgctcgactctgggctctggtccaaagctgagagccccccttcccctcatgacagcctcttctgccctgcccggccactcctttgagtgacagggggtaattgagaagctgctcctccctccaggaaggaagacccggagctctggcttccctcggcaaagcacatataaacccacagccactgcgggtggaaggagaagggcagggtggaaaaagtttgagagaaggagggaggaaaaggtgtcctggctagcaccatgtggattctcttgagatgagaagaaaatgccccgctacgtcccccttctgctgctcctgcttctcctgaggtgttcagaacggggtggaggagttaattttgg

SEQ ID NO: 35767 - DNA, 2300 bp, Homo sapien
agaggcccagcctgtggcagaacagagctgccggtggtctctccatcttcacactccctgctctgctggggtccagagtgagagtgtgagcaacatggctctcaggtgagggctgagaaggcagagtgccccagtgggaaagaggagtcgcttccactggagaagagagagaaagtggagtgtgtggtggggtccatgcgacttaagtcctgagacaggcagggagaggctgaggcggacgaagttcccgcatcccaaggagggcagagtggattgtgcttgtccctgtaggagccccaccccccaccccaggccacctctcagagcctctgcttggctgcaaaggaattcacccctactgtagcacttaacccattccctcctatcagggtggtgctgtctggtcctgaatttagaactgttgaaactccaagtctggaatcagcaaaaatgtattacattgaccagaaagggattgaatcacccttggtccagcatctggcccctgatctgcagccaatggcaggaatcgaggtcctcagatgcttcatgaatgggaattgcagggagagaaggctctctgatgtggtgtttcctcgagtctcctgctgtgctccaaattaaaagcttgtgtaaaactcatgcatgtcatccaaaaaggcctctgggctccatccactgccagttctggagaggagctcttcactcctccagtggttaagccagcaggggcaggtggggaggacacagcagtagaatcagccaacagctcatgtttagaccttgggcagccagggaagcctactcctggggcctcccggaagccatggagagaacaaagccattgcatttttataataaaatttgcaaacatatttaaaagccaacaaactgttaatgaatctctacattctcatcgcccagcttcaacaaggatcaagtcctggccatttgacagcagcatttaaaggctctcctctactgttacttggaaatagccactttctcccaaggtttcttatactctatggcacatctgaccaccagtagcaggcagaatgatgtcttcaaccccaacaccatcaaagatgtccacatcctaatccctggaacgtaggaattaggttacatggcaaagggaaattaaggttccagatgggattaaggttgctattcggctgacttcacagagattatcatggattattcaggtgggtccagtgtagtcaccaggtcccttaatgtggacatgggaggcagaagaggaagtctgagtgatacagtgtaagaaatggctgattttggctttggagatggaggaaggggaccatgagccaaagaacacaggatgcctctagaaggtgaaaaagcagggaaagggattttcccctgaggcccccagaaagaatcacagccctgctgacacctttattttaatccactgagacctgttttagacttctgatctccaaaactgtaaagtaataaatccatgttgttgtaagccattcggttcatggtaatttgtcactgcagcagcaggaattagtcagtatctcataaggatggcatccaggtccatttccctagctagatccagggtctcatgtaggagcagctcctcagatggggccacttctgcaccccagaacctcctgcaggttggggccaaggtgaaggagatatgaggatgcatgagaaaggggtgctgggaggaaacaatccagctcccaaaaagaaacaagtgtttctgttgctgagagaggcaattaagagagtgggaccccagggtggaggtccttgtgtatagagaagcagggctggggaggctggcaaccagggatgagctgtgagccaggacacctgggccaagaaggggcagggaggtcaaggaaaggagccagggcgggagacacccagcttcctctgggacattcattcaagtgacacctgttgccacagaccacattaggaatgagggtggaatgtggaggtttattgtcttcacaaccactagcccagcctgtttctgctgtcccccaccccactaccaggataaagggctggctgtcttggggctgagggagatcgggtgctgagcaggatgcagggccgcgtggcagggagctgcgctcctctgggcctgctcctggtctgtcttcatctcccaggtatggaggccgtgatgcccttgggcaggagggactggaggtcccccaggaaacaggaattaaggaaaggggtaaaggcaggagggtacacatttaggtccctgagggaaaaggaagaataggcatagg

SEQ ID NO: 35768 - DNA, 2300 bp, Homo sapien
ttgtgaagacaataaacctccacattccaccctcattcctaatgtggtctgtggcaacaggtgtcacttgaatgaatgtcccagaggaagctgggtgtctcccgccctggctcctttccttgacctccctgccccttcttggcccaggtgtcctggctcacagctcatccctggttgccagcctccccagccctgcttctctatacacaaggacctccaccctggggtcccactctcttaattgcctctctcagcaacagaaacacttgtttctttttgggagctggattgtttcctcccagcacccctttctcatgcatcctcatatctccttcaccttggccccaacctgcaggaggttctggggtgcagaagtggccccatctgaggagctgctcctacatgagaccctggatctagctagggaaatggacctggatgccatccttatgagatactgactaattcctgctgctgcagtgacaaattaccatgaaccgaatggcttacaacaacatggatttattactttacagttttggagatcagaagtctaaaacaggtctcagtggattaaaataaaggtgtcagcagggctgtgattctttctgggggcctcaggggaaaatccctttccctgctttttcaccttctagaggcatcctgtgttctttggctcatggtccccttcctccatctccaaagccaaaatcagccatttcttacactgtatcactcagacttcctcttctgcctcccatgtccacattaagggacctggtgactacactggacccacctgaataatccatgataatctctgtgaagtcagccgaatagcaaccttaatcccatctggaaccttaatttccctttgccatgtaacctaattcctacgttccagggattaggatgtggacatctttgatggtgttggggttgaagacatcattctgcctgctactggtggtcagatgtgccatagagtataagaaaccttgggagaaagtggctatttccaagtaacagtagaggagagcctttaaatgctgctgtcaaatggccaggacttgatccttgttgaagctgggcgatgagaatgtagagattcattaacagtttgttggcttttaaatatgtttgcaaattttattataaaaatgcaatggctttgttctctccatggcttccgggaggccccaggagtaggcttccctggctgcccaaggtctaaacatgagctgttggctgattctactgctgtgtcctccccacctgcccctgctggcttaaccactggaggagtgaagagctcctctccagaactggcagtggatggagcccagaggcctttttggatgacatgcatgagttttacacaagcttttaatttggagcacagcaggagactcgaggaaacaccacatcagagagccttctctccctgcaattcccattcatgaagcatctgaggacctcgattcctgccattggctgcagatcaggggccagatgctggaccaagggtgattcaatccctttctggtcaatgtaatacatttttgctgattccagacttggagtttcaacagttctaaattcaggaccagacagcaccaccctgataggagggaatgggttaagtgctacagtaggggtgaattcctttgcagccaagcagaggctctgagaggtggcctggggtggggggtggggctcctacagggacaagcacaatccactctgccctccttgggatgcgggaacttcgtccgcctcagcctctccctgcctgtctcaggacttaagtcgcatggaccccaccacacactccactttctctctcttctccagtggaagcgactcctctttcccactggggcactctgccttctcagccctcacctgagagccatgttgctcacactctcactctggaccccagcagagcagggagtgtgaagatggagagaccaccggcagctctgttctgccacaggctgggcctcttgatctaggccagtgagtcaccctgcttggctgcactccctgccctgctcccatcctctcagtcctttactctctccacccccagctccaggaacaacgcccaactggcctcctactcagctgacaggaatctggttggagttgttgtgtcccagccttcccaagcttccaggtgtcccagaaacccaggaaatcgagactcatgactcccagagaggatggcatctagaaggtgaggaatgctaatggtggaagaaaaggagtttgggtggggaggggaggggagggga

SEQ ID NO: 35769 - DNA, 2300 bp, Homo sapien
gcatcggcctcccatagtgctgggattacaagcgtgagccaccgtgcccagccgagcagcatcactttaaatggtatctctgtctcacatttgtgcctgcacctctatacaaggcaggaagggagcagaagacactctgctagcattggctgggctggagactcaggaaagggagcctggggctgtgggggtgaagctggcctatttgtctcccccagtggaaggatgaagacaggagcacctgcagggctccatttgctgggcttcctactgggggactgcaccccttgtcccatttaacctttttgataatttcccatttgatgttcacaaaaaccttgtgaaataagtgttatttaaaatacccccatttcacagatgaggagatggaagttcagaaaggtttgaagagccgcccaaagccaagaggttagctgggacttgaacccacgtcatcttcattctgaagccagtgttttttgtttgtttgtttttcccaaggcattagcccccttcaggggaccctgtcctatcccttcctctctccacagctccctcagcccctctttcctcccactcccattctgagtgtcactagcaagtcaagagcaagactagatggcagccactagctgcacgtggccaaccacatcattacaattaattaaaattaaagctccaaatctttggtggttaaacttgctccatgtggccagtggctaccgtatcggacagcacagacaggaaacatttccatcctcctgctggtctgaacttaaagggcggtcaggaggtagagggaatgggagagaccaggccaaggggcccagggacagagctgcctttgtgaggagatgaggtttgggaagtgagtttgggtgaggggagcaggggtgtctgaggcctgggggaggagagggcagcttgctggactcccaggcacctccctccgatactgatactcccgcaatactagtgagcaattaattggctggggcggggcaggggccagagcaggagggaggccaacgcaatggaggagaagccaccaccctctcagcagatggcagggctccggttctcctggcctcctttcatcctttgaggacccgggagcctgcctggccctcctcgacctgcccagagctggctgctgcttcctgctcgctcatccagcccagggccagcagatgggctatggggccaccaccttcccaattagccttcttagcctcttgctcacccttgaggtctgggttaccagccatggggaggggctgtgagtgccctgtgagtaaccaaggcccagctttgacagaggtcatcagcccaggcccctcccctggctgagccctggctcccagcacccccccacccccgccaccatgccgtccccagaggcccccagaagcgacaggtcagggagttggttttgggaatgtggtgccccatttctgagaaggagaaagttccccaggtgatggaacacgtaataggtatgtggctggcctggtacttggggagtggtgggagggggagcctgggggatgggggcagaactcatatttgaaggaggaaagtggaggtggagtgatggggtcctaaggaaggagcagatcaggggctgtgaatgggacctcattggggttgggtgggtggggctggagcgggcacccaagtgtggaagaaaaagctgaaacacccacgactgcgagtggagggcagatggagagacaggccaagctacggtaggcaggagagttaaggagccaggcagctgggtcccgtggcaagagtggccgccccagagtgggtggccgtggggcagagcgcctggttccgggttaggcaatgaggagccggggccaggcctgtcaggtggcaggatcgttagagccccgtggccatgggtaccccacactgcagccactgctgctgctgagtaggcagatgcaccgggctgattaccacgctcctcccggccacaccaacttcccctggggcacccaccccctccacctctcctcctctccccacagtgactcctgcccagggaatgtccagctctggcataaaggacccgggtgtccttgagctgccatcagtcaggaggccgtgcagtccgagatgggctcgtctcgggcaccctggatggggcgtgtgggtgggcacgggatgatggcactgctgctggctggtctcctcctgccaggtaggaggctgggggccctgggaacaggagggaggcgggagggagactccgggagaggacccagcgaaggggacaggcaggggctctg

SEQ ID NO: 35770 - DNA, 2300 bp, Homo sapien
tttttgagacagttttgctcttgttgccaggctggagtgcagtggcacaatctcagctcactgcaacctccacctcccaggttcaagcaattctcctgcctcagcctccggagtagctgaatcccagcacttttttgggaggccgaggtgagcggatcgcttgagcccaggagtttgagaccagccaacatagggagactccatctatataaaaaataaaaataaaaaacattggagggcatggtggcgtgcacccatggtcctagttactccagaggctgagttgggaggattgtttgagcccaagaggttgaggctgcaatgagctgtgatcgcaccactgcaccccagcctaagagagcgagaacctgtcctcactccccaaacaaagggaagacgcaacatgatttggtgtacattttttttcctgagggacttactggatggtcccttccagagtgaggtacacatatccacgcactgtggtcagcgattgctcccggcacccagcgcagcagatgggtgggtctaaccaggtcacttccccaggagggcataattgagcagtttccgcatcaggtccacgtgggccagcagcatgcggcaggcagcggctgtggcgcttcaggcccagggcgtccccatcagcgtacttggactgcagcagccccaggtaggcctcccacgtgttgcccacagtcttgctgcaggtgaagcagcgcacacaactcctgagctcaagcggtcctcctgtgtcagcttcccaaagtgctggcatgagccactacgcctggcctgatatatatatatatatatatatgttttttttttttgagacggaatttcactcgttgcccaggctggagtgcaatggtgtgatctcagctcaccacaacctctgcctcctgggttcaagcgattctcctgcctcagcctcttgagtagctgggattacaggcatgtgccaccatgtccggctaatatttttgtatttttagtagagacggggtttctccatgttggtcaggctggtcttgaactcccgacctcaggtgatccgcccgcttcggcctcccaaagtgctgggattacaggcgcgagccaccacaccaggcccgcgtgatgtatattttaagacctcttttgctggtggaggacaggctttgtgtgagggggagggataaacagtgggagcaagggggccaattagaagggtgttggggaggctcaggggagatggtggctcaggatgatgggctgggtttggacagggtgtggaggggcttgcaggtggatggtggaggagtgtaacgaaggtttctgggtgagccctggagggaacagatgagatcacgccattgcataataaggtgttccttactgtggggtagcggaccaggcagggaacaacctgggaggaatcaaattttattttggacatgttacttctgaaaggctaacagacttccaggcagaaaggtccttgagggaaacgttctaggggtctctctgggaggcttagatcaaggagctgagaccaaaaggagaatgggagggaggagacgagtacaatagagttggagccaaggtcctagaggcggataggtggattcctgagggaggaggaaggggctgaggttgctggagcctggcagcttcttccggagccattggcaggactgatgcaaacagctctgggtgggaagagggaaccaggatatcctcctgtgtccttccttttctgcagtcatcctgggtggctgccagatggaattccttggatatcattgcttggaggtcccctgcatgcctgaagaaggacatggtggagagcaggatgcctggatcccatgggggaagggaagtgcccaggaaagcacgaagccccagggggagctttcagtgcgggggtgagtggggaggctggggtagtagctgacactgtcccagctgcatcccaggtttgaaaagcacctcctccctcagcgcaggcatcctgcctcccaaccctgtaattacggtgcttcccaacgcccatcgcgtggtttgctcccattctttggcttccaatagttgcaagggatgaaggtggacatctctgtgattacggagatgccaagtgggtattgactgctccaggatgtggatggagggtgtgaaaaccagggtggggtgacgcaggctctgggtcatgatagggagagcaggcagctgggtcctgggctggaggactaaaataagggacgccaccttcaggggtgacacatcagcccaggccttcccaacgggtttgaccagtt

SEQ ID NO: 35771 - DNA, 2300 bp, Homo sapien
tgctgcagagcccagggcccagggcacaaggctttggccacttcagaacttgctactttcccataagagcaatgagcaggctgggcacagtggctcatacctgtaatcctagcactttgggaggccaaggtggaaggatcatttgagcccaggagtttgagaccagcctgggcaacaaagcgagacccccatctctattttatggaagaaattagggctgggcatggttgctcacatgtgtaatcctagcactttgggaagctgaggcgggtggatcacttgaggtcaggagttcgagaccagcctggccaacatggtaaaacctcatctctactaaaaatacaaaaattagctgggcgtggtggctcatgcctgtaatctcagctactcaggagggtgaggcaggagaatcgcttgaacctgggaggcagcgtttgcagtgagctgagatcgtgccattgcactccagtctaggcaacaaagtgaaactccatctccaaaaaaacaaacaaaaaaaaattgttttttcaagtaataagcaaccgttgaaaggttgttttttttttttttttgagatggagtctcgctctgtcgcccaggctggagtgcagtggcgcgatcttggctcactgccagctccgcctcccgggttcaagtcattcttccgagtagctgggactacaggcgcccgccaccacgcccagctaattttttgtattttaatagagacggggtttcaccatgttagccaggatgatctcgatctcctgaccttgtgatccacccacctcggcctcccaaagtgctggaattacaggaatgagccactgcgcccggcctgttgaaaggttttaagcagggaaataacatgattagatttgtattttatgtctaaaaaattttgtcatttatgtcccccaaattaattttattgttgtatggagacagggctagaggaggcagaccaggaagcagggtgggcactttgccctcctttccagtccatcccatgactcttggtggctctgacacccctgcaaccctttgaggtgccatgagcaaaagacacaaaattcctcctttcctggagctttccttccagtgtggtccgacagatagtaacacatacacataagcaagatatggtcagtgctaagtgctcaggaggacgtgaacagctgatggggcagagtagggtggggagggacggtattagagggcccagtgaagccaccctgaggaggggctatcgcctggggtctgtggagcaaggaggggccgctgtctggttctcagcagactccccgtggccggagcggggagcagtgggagagcctccagggtgagctcaggaggtaggcagaggccgggtcccctggcctgcaggtgtggagagacacctgggttttgttgtgaatgctgtgagaagccactgagggtttgtaaagactagttaggagatggtcgctgttgcccaggcaaaagatgagggttggtggcagtggagacggagacagagaggtgaagatatgttttgggggagatcggacaagaactcctgatgggttgtggggcagctgcggagagtgagttgccagctctccatttgctgtgcacagttggctgattggttgggtcattctctaaggtcacagaaagtgggagtgaagggaacaaggaaggcctccatgtggggtcgagcctctgctgagccccctcttctttccgcagctgtcctctttgacacaggctcacgaggaggctctttccagtttgaccagcaaggctgagggcttggagaagtctctgagtagtctggaaaccagaagagcaggggaagccaaggagctggccgaggctcagagggaggccgagctgcttcggaagcagctgaggtaggtgggcggacgccgacgggagcccagcaattagtgatgtggtggatctgcagggcgccccactgatggctgtcccattcccaccccaaccctagcaagacccaggaagacttggaggctcaggtgaccctggttgagaatctaagaaaatatgttggggaacaagtgccttctgaggtccacagccagacatgggaactggagcgacagaagcttctggaaaccatgcaggtgagggtgcaggaatgtatctgtgtgcagacttagggatcaggttgggaggcaagcgtggcccttggaggagcgtgtagagcacagcctccgggagagaaggtggtacctaaggcggcatggaggccctacagaggggctgctttcctctgcccgcagcacttgcaggag

SEQ ID NO: 35772 - DNA, 2300 bp, Homo sapien
cctattctggagcaaaatggcagaatgatatcccagtacatctgggaaaagacacatgaaacaagaataagaatgtttacagataatacgacagcatggccagctcccacagcatgtcctctgtaaaggctttcttccatcagaatgaacccacactgccacagtgctgggtctctacctctagtttgcacttcttcatcttgcctcataccatgctttaccatcagctggtggtcaatctatctcccctcttaggattttagattccttattaattacaaatttaagtcaggatttgtcttattcactattgttatcctcatccctagcacttagcacactgctttattatttatgcactgtaggaactaattgcttacataaaaatgagtacgttctggaaactagggccgaaatagggtaaggagtttattccagtgaggaagggtcactagcaagcaagcctgagaaaacggcgtggatggatccctacctgcctctccgccctggctcctgcctgtcactggaaacatcccgttcccacatggtcacttgaggtctctgggtgtctagccgcctctctgagacatcttgatggcctgggggttggaccaggggaatgtctgagagccaggtgggagccattcttggcagagttgaaaggggccgagcttgaaagtgggaggggggaatcagcccagtggaacctgaagaattacaaaaacaaagatggtcagtttcccaggcagagacaaccaccactccccttgtctggtcccactgacctgaaggtggaaacatctccacattatttgaaggctctagattctgtctccagccatctatgttcccctggacaagaggagaaacaaagacactccaattcaattttcaggccaccttccaaagagaaagcccctacaataacaaagtcataatccttgaattatagccaggtccacccgatgcttagctcttttcctacttccccaaagtaggagataccccaaattcacttgcttgtctcaacctggttcctcatggaacccaagcaactatcaagtggagagaatttactgaaagagacagactgagaggggctctgaggctttactcatactttcaggattctgggcagtgcctctaccctcctccttaagtttctatggtccctgctgctcctggccagaggtgagaaaggaggtacacagtgcaggggtcttgagcgccatctccagagttctctccatggctcagcaaggcctgagggaagcccatccagacaccagcaggccatgactcttgggtccttccctgttaaagtgctggcccaaggcctggccccagctgaatgtggccacatgcagggctagaccctccccaagaccttgggaatccaggccgcctagatccccaggcagaaaagccagcgtcctgacatcttattcaaatctttcctgcggctgttctctcagcttctctctactatccccttagcttccatgcctgctgcccgcctcctctttctcgagtcctaacacatagtgggcactttaagatcttcctcccaccctcccaccctcattaatctattttttacccgaatctgggatccctactcccgtccctttttacaacctaatctacctttttctgaaggaattattctggtcctgaccctcacccccatctctcaatagcctgccctcgccccctgtacgctagccggctctactctcccaccactgctcccctagatacccgaggcttcacccagttagcccgtgagctctaaggctgttctgatctcttcatctgtcccttcacctggcccctgtacccccttcccctttggaccccttgaaccctcccaggacccccgctcagccccttcccgcccccaaccgactcttcccgaacgtcccttaccaaccgcgagagccccctactgcgctttggccacaccccctacgcctcgctcccggccccgcctctgcccctgaccgcgcctgcgcaaggcgggcgccctaaagtcctatttcactctgttgggaggagggggaaaggtgtacgcaggcgcagtggcgtctaaatttgggcccactaaatgcgtcggagcatctccgcgcccaggcggctcctcctcactgcggcaacccgggaaaacttgtgaactaatcagaaaaagtggaaggcgggagatcttggggcgctgtccaatggcgcggaagagaacacatgagctggccaatcgggaacggcacgggggcgggctcgctcggcgcgaagttcgggcccgg

SEQ ID NO: 35773 - DNA, 2300 bp, Homo sapien
ccaggtccacccgatgcttagctcttttcctacttccccaaagtaggagataccccaaattcacttgcttgtctcaacctggttcctcatggaacccaagcaactatcaagtggagagaatttactgaaagagacagactgagaggggctctgaggctttactcatactttcaggattctgggcagtgcctctaccctcctccttaagtttctatggtccctgctgctcctggccagaggtgagaaaggaggtacacagtgcaggggtcttgagcgccatctccagagttctctccatggctcagcaaggcctgagggaagcccatccagacaccagcaggccatgactcttgggtccttccctgttaaagtgctggcccaaggcctggccccagctgaatgtggccacatgcagggctagaccctccccaagaccttgggaatccaggccgcctagatccccaggcagaaaagccagcgtcctgacatcttattcaaatctttcctgcggctgttctctcagcttctctctactatccccttagcttccatgcctgctgcccgcctcctctttctcgagtcctaacacatagtgggcactttaagatcttcctcccaccctcccaccctcattaatctattttttacccgaatctgggatccctactcccgtccctttttacaacctaatctacctttttctgaaggaattattctggtcctgaccctcacccccatctctcaatagcctgccctcgccccctgtacgctagccggctctactctcccaccactgctcccctagatacccgaggcttcacccagttagcccgtgagctctaaggctgttctgatctcttcatctgtcccttcacctggcccctgtacccccttcccctttggaccccttgaaccctcccaggacccccgctcagccccttcccgcccccaaccgactcttcccgaacgtcccttaccaaccgcgagagccccctactgcgctttggccacaccccctacgcctcgctcccggccccgcctctgcccctgaccgcgcctgcgcaaggcgggcgccctaaagtcctatttcactctgttgggaggagggggaaaggtgtacgcaggcgcagtggcgtctaaatttgggcccactaaatgcgtcggagcatctccgcgcccaggcggctcctcctcactgcggcaacccgggaaaacttgtgaactaatcagaaaaagtggaaggcgggagatcttggggcgctgtccaatggcgcggaagagaacacatgagctggccaatcgggaacggcacgggggcgggctcgctcggcgcgaagttcgggcccgggaattccgaaggaggggtaggcgctgcccgcgcgcagaggccgcgcccctcctggccccggcttcttggctgtcaaacagatgcagcaacgtcggctcctgccgaggagcccaaggggtcccgggatccgccgcacaggctggcactgcttgaagaggaggctactcggagactgcgccgcgcgggtagatccgaaacggggctggggcggagtgggaaaaggccgggtatgccttgcatgatcgcggggagctccttcctgtttttatcccacctagagaagccgggaagtaggggtttaggtccaatttgttggagtacttaaggactcgtttgcactttcttttgggggatgacagtggattcattgccctcggaggttcaaccagttatgagtgagggattggccagaagatcggggcgcaggcaagcaggagtgctctattaggataagcaagtttgacaggaagaagctactcttctccgaattacacagaggtgatgtgttcgtattgcacgtagacgtgtgtataacaggacctccttccccgcgccccgccaccccgacacacacaggagctgcctaaagtatccttgccttgcagattggaggctccccaaatattttgcgatctgaggatccagctcaagtgaggtgccataggacgtgttcctgagtttgcattgcacggagaccttcctggaatttttcatttgcaagtcggcttaaccaattttgcattgagtcctaggctgcttgcactctgaatttgggctattcaggtagtgtgctcaaagttgaaaccgcatacagcacaactcaagtttgcatcagactgggaagcgaacttaagccagcggtgcgtggcccaggagtgggaaaggaaatggatgcctgaagtggaagaggtggtgcagagggggcaccgcccatgctgccctgcttccaact

SEQ ID NO: 35774 - DNA, 2300 bp, Homo sapien
cacacttctggtgggaagatgaaggtctggaccacgaccatccatccaatctgatgggagtatgggaggcaggcagcagggtcttgtggagaccttactcattccagcctggcgcttcaaccacccaggggcaaagctgccctgcttaatgctcaccttggctgctgtggtcttccaggctgaccctccagtcatcaccccggggctcggcatgcagttcggcgtggatcccagagatgaggccaggctcctgctggggccgcagggccacatcacacaggtcggccctgtggcccaagcgataggtgcagccagccccggcgggggggtggaaggtgtagagatcaccgcccctgccgccccctatgcgcagcagttggaagcagggcagcatgggcggtgccccctctgcaccacctcttccacttcaggcatccatttcctttcccactcctgggccacgcaccgctggcttaagttcgcttcccagtctgatgcaaacttgagttgtgctgtatgcggtttcaactttgagcacactacctgaatagcccaaattcagagtgcaagcagcctaggactcaatgcaaaattggttaagccgacttgcaaatgaaaaattccaggaaggtctccgtgcaatgcaaactcaggaacacgtcctatggcacctcacttgagctggatcctcagatcgcaaaatatttggggagcctccaatctgcaaggcaaggatactttaggcagctcctgtgtgtgtcggggtggcggggcgcggggaaggaggtcctgttatacacacgtctacgtgcaatacgaacacatcacctctgtgtaattcggagaagagtagcttcttcctgtcaaacttgcttatcctaatagagcactcctgcttgcctgcgccccgatcttctggccaatccctcactcataactggttgaacctccgagggcaatgaatccactgtcatcccccaaaagaaagtgcaaacgagtccttaagtactccaacaaattggacctaaacccctacttcccggcttctctaggtgggataaaaacaggaaggagctccccgcgatcatgcaaggcatacccggccttttcccactccgccccagccccgtttcggatctacccgcgcggcgcagtctccgagtagcctcctcttcaagcagtgccagcctgtgcggcggatcccgggaccccttgggctcctcggcaggagccgacgttgctgcatctgtttgacagccaagaagccggggccaggaggggcgcggcctctgcgcgcgggcagcgcctacccctccttcggaattcccgggcccgaacttcgcgccgagcgagcccgcccccgtgccgttcccgattggccagctcatgtgttctcttccgcgccattggacagcgccccaagatctcccgccttccactttttctgattagttcacaagttttcccgggttgccgcagtgaggaggagccgcctgggcgcggagatgctccgacgcatttagtgggcccaaatttagacgccactgcgcctgcgtacacctttccccctcctcccaacagagtgaaataggactttagggcgcccgccttgcgcaggcgcggtcaggggcagaggcggggccgggagcgaggcgtagggggtgtggccaaagcgcagtagggggctctcgcggttggtaagggacgttcgggaagagtcggttgggggcgggaaggggctgagcgggggtcctgggagggttcaaggggtccaaaggggaagggggtacaggggccaggtgaagggacagatgaagagatcagaacagccttagagctcacgggctaactgggtgaagcctcgggtatctaggggagcagtggtgggagagtagagccggctagcgtacagggggcgagggcaggctattgagagatgggggtgagggtcaggaccagaataattccttcagaaaaaggtagattaggttgtaaaaagggacgggagtagggatcccagattcgggtaaaaaatagattaatgagggtgggagggtgggaggaagatcttaaagtgcccactatgtgttaggactcgagaaagaggaggcgggcagcaggcatggaagctaaggggatagtagagagaagctgagagaacagccgcaggaaagatttgaataagatgtcaggacgctggcttttctgcctggggatctaggcggcctggattcccaaggtcttggggagggtctagccctgcatgtggccacattcagctggggccaggccttgggcca

SEQ ID NO: 35775 - DNA, 2300 bp, Homo sapien
ttttcctttactgtaaatgaggataatattagtaccacctacattcaatacacttaaaatagggcctggctcataacagtaagcactagatgaatgttggctactatagtctaataaccataacactcctacagctgactttaccaagaggcagtggcaaaactcaaatgtgaatctaggctttctgaggctaactgcctcaagtcacggagaaagacatgcccagattattaaaaacattattcaacatagaactgccctaacccaggaacagagtgcctcagcaaagctggaaactgaatcaagtctaaacttggcctctagtggcctcagaacatccccactgtgatatctttctgatgatatcccaggtcctgtatgagctaaacgggaccaaaaagggtcagtctggcagagagcttctgactgtgcacacttctggtgggaagatgaaggtctggaccacgaccatccatccaatctgatgggagtatgggaggcaggcagcagggtcttgtggagaccttactcattccagcctggcgcttcaaccacccaggggcaaagctgccctgcttaatgctcaccttggctgctgtggtcttccaggctgaccctccagtcatcaccccggggctcggcatgcagttcggcgtggatcccagagatgaggccaggctcctgctggggccgcagggccacatcacacaggtcggccctgtggcccaagcgataggtgcagccagccccggcgggggggtggaaggtgtagagatcaccgcccctgccgccccctatgcgcagcagttggaagcagggcagcatgggcggtgccccctctgcaccacctcttccacttcaggcatccatttcctttcccactcctgggccacgcaccgctggcttaagttcgcttcccagtctgatgcaaacttgagttgtgctgtatgcggtttcaactttgagcacactacctgaatagcccaaattcagagtgcaagcagcctaggactcaatgcaaaattggttaagccgacttgcaaatgaaaaattccaggaaggtctccgtgcaatgcaaactcaggaacacgtcctatggcacctcacttgagctggatcctcagatcgcaaaatatttggggagcctccaatctgcaaggcaaggatactttaggcagctcctgtgtgtgtcggggtggcggggcgcggggaaggaggtcctgttatacacacgtctacgtgcaatacgaacacatcacctctgtgtaattcggagaagagtagcttcttcctgtcaaacttgcttatcctaatagagcactcctgcttgcctgcgccccgatcttctggccaatccctcactcataactggttgaacctccgagggcaatgaatccactgtcatcccccaaaagaaagtgcaaacgagtccttaagtactccaacaaattggacctaaacccctacttcccggcttctctaggtgggataaaaacaggaaggagctccccgcgatcatgcaaggcatacccggccttttcccactccgccccagccccgtttcggatctacccgcgcggcgcagtctccgagtagcctcctcttcaagcagtgccagcctgtgcggcggatcccgggaccccttgggctcctcggcaggagccgacgttgctgcatctgtttgacagccaagaagccggggccaggaggggcgcggcctctgcgcgcgggcagcgcctacccctccttcggaattcccgggcccgaacttcgcgccgagcgagcccgcccccgtgccgttcccgattggccagctcatgtgttctcttccgcgccattggacagcgccccaagatctcccgccttccactttttctgattagttcacaagttttcccgggttgccgcagtgaggaggagccgcctgggcgcggagatgctccgacgcatttagtgggcccaaatttagacgccactgcgcctgcgtacacctttccccctcctcccaacagagtgaaataggactttagggcgcccgccttgcgcaggcgcggtcaggggcagaggcggggccgggagcgaggcgtagggggtgtggccaaagcgcagtagggggctctcgcggttggtaagggacgttcgggaagagtcggttgggggcgggaaggggctgagcgggggtcctgggagggttcaaggggtccaaaggggaagggggtacaggggccaggtgaagggacagatgaagagatcagaacagccttagagctcacgggctaactgggtgaagcctcgggtat

SEQ ID NO: 35776 - DNA, 2300 bp, Homo sapien
agctactcaggaagctgaggcaggagaatcgcttgaacctgggagatggaggttgcggtgagccgagatcgcgccagtgcactccagcctaggcaacaaaagcgaaactctcaaaaaaaaaaaaaaaaaaggtgaggctaggtgcggtggttcacacctgtaatcccagcactttgggaggccaaggtggacagatcacttgaggtctcctgaccagcctggccaacatggtgaaaccccatatctactaaaaatacaaaaattagccgggcatggtggtgggtgcctgtagtcccagctactcaggcggctgaggcagaatagcttgaacccagaaggcggagattgcagtgagccaagatcacgccacagcactccagcctgggcgatagaacgagattccgtcttggtggggagaaaaagggtgagagatcatttcgcttggactaaaacaaagtcactatgtctgcaacaggatctacctagccaccagaccagctttgggctctggaaggcccacttcagggccttgccacattagactcttgtcctttgctcaaacaatcaccttctctgtctttaaaagtgtcaccctcctccataatctccttccctcctttaccctactcctatagactgctttattttttttttaatttttgagatggagtctcactctgtccctcaggctggagtgcagtggtgcgatcttggctcactgcaaactccacctcctaggttcaagcaattctcctgcctcagcctcctgagtagctgggattataggggagcgccatgatgcccagctaatttttgtatttttagtagagacagagtctcactatgttgaccaggctagtcttgaactcctgacctcaagtgatctacccaccttggcctcccaaagtgaagggattacaggcatgaccactgcgcccagactgctttacttttttccataatatatatatatattttaaatagaggcagcaggggtgggagaaggggcggcacgggtctcactatgttacccaggctgctttctaactcttgggctcaagcagtctgcccaccttggcctcccaaagtgctaggatttacagacatgagccactgtgcctggccattttttattttatttacttttttatttttcagagcaggagtggaagtttattattaaaaagttatagggcagggaaaaaaggaaagtgcacttggaagagatccaagtgggcaacttgaagaacaagtgccaaatagcacttctgtcatgctggatgtcagggctctttgtccactttgtatagccgctggcttatagaaggtgctcgataaatctcttgaatttaaaaatcaattaggatgcctctatagtgaaaaagatacagtaaagatgagggataatcaatttaaaaaatgagtaagtacacacaaagcactttatccattcttatgacacctgttacttttttgctgtgtttgtgtgtatgcatgccatgttatagtttgtgggaccctcaaagcaagctggggagagtatatactgaatttagcttctgagacatgatgctcttcctttttaattaacccagaacttagcagcttatctatttctctaatctcaaaacatccttaaactgggggtgatacttgagtgagagaattttgcaggtattaaatgaactatcttcttttttttttttctttgagacagagtcttgctctgtcacccaggctggagtgcagtggcgtgatctcagctcactgcaacctccgcctcccgggttcaagtgattctcctgcctcagcctcctgagtagctgggattacaggtgcgtgccaccgtgcccagctaatttttgtgtttttagtagagacggggtttcaccatgttggccatgctggtcttgaactcctgacctcgtgatctgcccacctcggcctcccaaagtgctggaattataggcgtgagccaccgcgcccagcaaagaacttctaaccttcataacctgacaggtgttctcgaggccagggtctctctttctgtcctttcacgatgctctgcatcccttggatgtgccagtttctgggggaagagtagtcctttgttacatgcatgagtcagtgaacagggaatgggtgaatgacatttgtgggtaggttatttctagaagttaggtgggcagcttggaaggcagaggcacttctacagactattccttggggccacacgtaggttcttgaatcccgaatggaaaggggagattgataactggtgtgtttatgttcttacaagt

SEQ ID NO: 35777 - DNA, 2300 bp, Homo sapien
cccatccccttagaaggcagatagagccactgaccccagcagacaagcccaggcagggctgagcctggagcctgcaatgagaagccttacttaagtcgacagaggtcagcgtgcccagtccagacctggccttctggccttcgaagctgtggggagccctggcccagagccccctctggagcccccagacttaccccaggccctccactgagatcaagttttgggagcagacagacaaacatcatccctcacagacaggcattccgttggctattctcttgcaaacagaatcaagcactagaccagcagcatgagcctcaggatactcaggccaggcccagaaaaacagaccctgaaggggagcttagggcagccttcctgcacgcctccacaaatcactctccacctcctctgcgtctttctgccagccagccccactaaacaaagcacatccctcaatctgccaggctcggggagggacgcacgatgaagctggacgcctgagtcccccagaggaaggaggaactagatacctaggtccctgtggggggcccttggtgcccgtctgaggctcagtctttgaggggattgcagaggggggttgctggagctccttttagcgtctctgaaggggattctgtgtgaggggattgggactggggggttggggagcaggaagcagtccccaggggagccatccaggcccattcaagggttgagcacttgtttagggttagagctgccccctctggggaccgggattgtccagccaaggccattgtcctgcccccttcccccagtccctcccaggcttctttgaacctgaagtcagatattttttctccacaccccccaccccctggttttccccacccagggcctagggctggaggcctgggccagggaggtgggggagggagaacggggcctaccgtggtattagatgtctgagttttggttgagaggggagcaaggaacctgatgtgcaggttccatagtggagggggcccaaagcgggtgtcttatcactctgtttcagcaaaggttgggaaactgaggcccagtcagtccaaagtctggtcccttgaaggggaagtagggaccaaccccttagtctgttagatgaggagagtctggagtctgattctggaagacggaggggtggggggatgggggggtggggggatatagcacggaggccttgtctggcagtctactcttgaagatggggtgaaatttggcaggctgggcagatggtgccaggcacccaggctgcggggtggctggatttggccagtatcgggatgggaatgcctaggattctggatggatcgggggaaggcataagggagcagctggccattgtgcttatggctgttgatgcattgagggatagcgccacacacacattcaataaatttgaggagctgagagggtgactggcccctgaaggcacagtgccagaggtctgtggagagggggtcaagcacctgggttcctgaagaacatggaggtgtgggagtgattccagacagctgggatgtgcagagcctgagagagtgccagggagcgggttgggagttgaaagttgggtgtggtggctcacgcctttaatcatgacactgggcggcagaggcgggaggatttcttgaggacaggaattcaagaccagcctgggtaacatagcaaggccccatctctactaaaaataaaaaaactaacagggcacagtggtccaagcctgtagtcccagccacttaggaggctggagcagaaggattgctttggcccagtagatcgaggctacattgagccatcattgtactccactgcactccagtctgggcaacaaagtgagaccctgtcttaaaaaataaaaataaaaaaagtttctgtgggggacctgcactgaggtcctggaggggcgccagttgtgtctcccggttttccccttccacagacaccattgccaccaccattaggcaaacatccttcgcctcagtttctccccccacctccctctcctccacccatccagggggcggggccagaggtcaaggctagtgggtgggactggggagggagagaggggttgagtagtcccttcgcaagccctcatttcaccaggcccccggcttggggcgccttccttccccatggcgggacacctggcttcggatttcgccttctcgccccctccaggtggtggaggtgatgggccaggggggccggagccgggctgggttgatcctcggacctggctaagcttccaaggccctcctggagggccaggaatcggg

SEQ ID NO: 35778 - DNA, 2300 bp, Homo sapien
ctgggaggcagaggttggggtgggcctcatgattgtgccactgcacttcaatgtgggtgacagagtgagaccgtctcgaaaaaaaagagaaaaggagccaatgatagcagctatgtttgttaaaaaaatatatatatatatacgtatatacacatatatatacgtatatgtgtgtgtgtgtatatatatatttggagacggagaatcactcagtcgcccaggctggagtgcagtggtgcaatctcggctcactacaacctccgcctcctgggttctagggattctcctgtctcagcctcccgagtagctgggattacaggcgtgcaccaccaggcccagctaatttttgtatttttttagtagagatggggtttcgcctcatcgtggtttttaacccagccttaaaaatatatttaaacataactaccaggtgtgttttttggcatgacctctaatcctctgagattggtgtaattttctcatatatgaagaatgtggctcatattcttgtccacaagagatggccccaagagggatgcacagccatagacaagtggtagggtgagtgtcacctctgagtgaaagtcagagccgtctctgaaataaaggggtacagcagcgtggtagatggtttgaggccagggtaagggtttaatgaaagggtttaagtggtttaagtggtgtttggagaaggggaggatgggtcttcccttcaggggaccatctcaggaaggcactgggaggtggaactgcaggagtatggaggtgctccaaccttcctgttccaagtgggtcaggtgaaggcagggtgtggtgggagatgagggtggagacggcagccttcaaggggccttgtttagcttgctaaggagcttggaaaccatcccgaggacaaaaggggaatccttagaggaagagcagagaggtatgcggtctgatatgtatttctggatagatcactctgattatatcaaggaggacagattttatatgcttaagactggagggagagagaccagttagaaagactctggctataatccaagcaagccatactatgggctggtttggtggaggtagaggaatgtccagattggagaaacaggaagttaaaaatgggcagggcttgctgactgtttgaaactagggggtgtgaagggaggcagcactctaggataaacaccagacttgccgattgtttgggaatatccaattctgctgtagaagacaggaaaacaataaactcaaaagaagtgttacacatagataactaaattagtcatctgtagatagtacaacatattcgtgtgtacagagatcaaaagggacagaaagaccaaggaggcactaaatattcacggtaccctaaatacgtgagacatgaggcactcaggatgcaggaggtttcaatttgacaggatggatgcacactgcatgacccacagttcagctggtgtgatcattccacccaacttgccccctctcccgtgtgttgacccaccccagcacctgcctcctgcttctcagaatgtgttttacatttatttaataaacgatgttatttgagcatttacatttggtctgtgagcctttttgttccatgacctctcagctcacttcatgctattgtgccaggaggctacatgacatccggtagttgcccacacctcaacccagttctggcttgagtaagcaggcaggtgagaggatgatgccactcaccaggaatataggatgagaggcaggttgttccatggccagggccaagaggaaatactcagttttggatgtgtcagatttaaggccatatggaaccttaggtccagatgaccaacaggtaggtagttggatataccgatgtgaagaacagggatgaagagatttgggagtcattactatttaaaacaatgagcctagatgaggccctgcagggaaacaagagattcccttcccattgttcagtctgcattccccttacccactcctttggtgccctcaaaaatagtcacacagcctcaccacacaggcaccttgtgcagtgtctcccaggtaagactcctgttggaaaataaccctttcccatcattctcttttcctcagcaacccactctctgtgctatgacttcattactctttcccagcccagccctgggcaagccccttacgaagtctcaggctacctggatgaccaccctttcttatgatgctgcaaggagggcaggtgggcagagccccgtgcatcctgggctcaggccagggacccaagagcttgggagaagctggttctcagactgaaggcc

SEQ ID NO: 35779 - DNA, 2300 bp, Homo sapien
attactccaggctgtagaatcctggaaaagagctaccatgcagcccacacctggtcgactggaggaccaccttagtggaagagggacaatcagggcctctggcctgccatgtgcacaagcataacaattgattttgtttaacgtgcagatggaatatttaatccattccaaccaggcatttgcatcttggtatgctgtcttaactgccaaagtttgttttaagtctttaacttctatgatcctctagtaaaatgaatgtttcctttagcatctatttttattagtttttagaccaaagaaagctaaacaccattttatatttaataatgcttcttgtatgatttttataccaggtaagctaaattttacctttatattagtgtgttattaatgttaaacttaattttaataaaactttgtagacatatttatccaatttttcatgtttgaccataaggtaaggttttatagactctttttaaccttttataatttttgttaaagagcaggttgatgctttaagaaaaacctgtcacatttttactttaatgtccagttcacagaaaaactggatgatacctttttaactttagctaatatgtttacacacagaattttctttacaattaacattttaaaatttgcttacactttcaaaacaataatttttttaaccttttaatgtaggtaaaaatccacattcttatgcctccttataatctttttaccaaaggtatattttacttttcttatacaccttgcacataaactgtttttttttttaaatagtactcaggaggccttattacttttaaattacacaatattttttgcataaatttttttataacattttttctttcacgactttcgccgacaattcttcaacatgtctcaactttctgacttattacaaacatttttttttctttaaacaaccagttaatttatttcaggacaagaatttaccatataacactctttttacataaattctgcctcccccgctttttttttttaaagtgaactttttttttgtctttggactagactgtctaaggccacaagattagaagttaccataatacatgttatactgttaatttttagcaaacttcacttttgttgaaaaccttgtaagtttgggatttcaattatcctttgctattaataagaccttgtttagtctaaattaacttagaattggtatagatggcctttttttctctctgctggtctttccttgcctctgccagatgcttatgctactgttctcttaactactgtagggggaagggggtctaaaaccagctgtaactgtctatgtacagaaactggtctggatgccttggcttacaggttactttgtgtcatacctttgaaacaagggacctgtccaggcttccttctgatggccaacccacctctaatgctggccagtctatttcacaagttctaagttttcctggtgtcacagtaacatcgtaatctcccttaaattctttcttgaaaaaaaattttttttaacatagttcctagtggggtgggcttatttgtgcctgacccatgcttcttcgagacaaaacaccacgctcacaccacacgtgcactacaaaacaaaaaaacagggcacacacacttttgcagtttacaccaaaccaaaatcagagtatccaaaaacccaagccaggtcaaaaccaaaaccaaaaccaaagtatcacacaatctaagtcaagtcaaaaccagaataaaagtgccagtacaggcacaccatgggtgatcaggccatgcttccactcagatggagtggggcaagttccaaagactagtcttaccaagtttcagatgtccggactccaagtgccagttccttcccagtgttcagccagtgtgttaatcctcctcgggggcctgctacgtgctgctctggcgaggcgttccacccggggaatttcctacccgggagcgctctttggatcgcgtcactcaggctggccagagtccaccgcagggatgctccacagggcaggcctaagccacccaaggggctgccttggccgtccgtcagttacctcgcttcctgttcagggaaccaagaaatgtagcaggacgagccccagacaaaacctttcagacaccgagttgtagaaggaagggctttattcagctgcgagcatcggcaagctactgccttaaaatccaaactccctgaatgcacaatttctgtcccttttaaggtctcacaacactaaagatttcacatgaaagtgtcgtgattgatttgagtacgcaggtggtac

SEQ ID NO: 35780 - DNA, 2300 bp, Homo sapien
ctgcgctcgatttctcaccgagccttagctgccttcccgcggggcagggctggggacctgcagcccgccatgcctaagcctcccacccactccaagggctcctgtgcggcccgagcctcctcgacgagcaccaccccctgctccacggcgcccagtcccatcgaccacccaagggctgaggaatgcaagcgcaccgtgcgggactggtaggcagctccacctgcagccccggtgcgggatccactaagtgaagccagctgggctcctgagtctggtggggacgtggagagtctttatgtctagctcagggattgtaaacacaccaatcagcaccttgtgcctagctcagggtttgtgagtgcaccaatccacactctatctagctgctctggtggggccttggagaacctttatgtctagctcagggattgtaaatacaccaatcggcactctgtatctagctcaaggtttgtaaacacaccaatcagcaccctgtgtttagctcaaggtttgtgaatgcaccaatctacactctgtatctagctgctctggtggggccttggagaacctttgtgtccatactgtgtatctaactaatctgatggggacttggagaacctttgtgtctagctcagggattgcaaacgcaccaatcagcaccctgtcaaaacagaccactcggctctaccaatcagcaggatgtgggtggggccagataagagaataaaagcaggctgcccgagccagcagtggcaacccagtcgggttctcttccacactgctaaagctttgttcttttgctctgcaataaatcttgctactgctcactctttgggtccatagtgcttttatgagctgtaacactcactgtgaaggtctacagcttcactcctgaagccagcaagaccaaaagcccaccgggagaaacaaacaactccagacgtgccgccttaagagctataacactgaccgcaaagctctgtagcttcactcctgagccagcgagaccacgaacccaccagaaggaaaaaactccggacacgtccgaacatcagaaggaacaaactccagacgcgccaccttaagagctgtaacactcaccgcgagggtccacagtttcattcttgaagtcagtgagatcaagaacccaccaattccggacacaaaacttgcttaattacagaaaatatgaaaagtatataaaagcagggtctcactctgtcgtccaggctggagtgcagtggtgtgatcacggctcactgcgacctcaaactcctggtctcacacgatcctcctgcctcgcctccgaaaactctagttttacagatatgaaccatagcgctagctcttactgtctttcttcaacacgtcctcccatccttccctcctttctccactctgcatttgaccccggtgtattccagcctccaggccaacacacgtgaccacgtctgcctggggcagttgaagtaaaggacgcgaggcggcgctgtcaccgcattctgtgaaccgcagcgctctgggtccctcccgctggtctagtatcatttcagtgaacgtcactctacattttttgtgtgtgtgtgagatggagtctctgtcgcccaggctggagtgcagtggcgcgatctcggctccctgcaagctccgcctcccgcgttcaagccatttttctgcctcagcctccgagtagctgggactacaggcgcctacgaccacacccggctaatttttgtatttctagtagagaaggggcttcaccatgttggccaagctggtctcgaactcctgacctcaagtgatccgcccgccatggtctcccaaagtgccgggattacagacgtgagccaccgcgctcggctgtcactgcagactttgatgggggccacactcggggtataaattaggatcctcactgaaagggcgggaccatggaggctttttcttggccccttagttgtgggttttcctctgggcggcgaagccagtttccatcagaactgcccagaggcgggcgctgccttcctggggtgacgcagcagcaggaagagtttccggatcctggaatccgtgggcggcccgtgggaggggctgaggctcatttctctactcacctgtctccgaatccgtcgtggtgtttcaagcgagtcaagattccagatcgcgccccaggctggactcggaattactgccccgcgggtctgcattttcacagcggcaggtgtgagttccccgccgctggagaccagaagcctgaaggcagctccgcccaccccagcccacagcgccgttattccgtt

SEQ ID NO: 35781 - DNA, 2300 bp, Homo sapien
gggcagtgtggtagttacactataaataattaccaatatccaccaaaaagtgcagctaaaactggtgaatttttttacacgtaaacgccctaataagcaaaaaaaaaaaaaaaaaaaaaaaaaaaaaaaaaaaaaaaggcggggggggaggaaagaaggcaaaaataaaagcattgttagatcatcaaacccataaaattcatttcctaggggtcctgtactacatgtaattttaaaggacgttcttcaggctgaagggaaatgatactagatggtgacccagatatacagaaaggaacaattaacaacagaaatgatgcacatacacatatcacatacacacccattttcttaatttcctgaagatatgtgactgcttgtctaaaacaaaaagtattacactgtatcgttgagtttataacgtatattgatgtaacatatacaataataatagcataatgatagtttaagtgaaactacaccatttgaagtgtcctttattttgctggatgcagcttaatattacctgaatttcactgtgaaaagtcaaggaattgggtttcaattcttacaacaataaaaaattaatgtaaagaaatatagctaaaagccactaggagaattaaaaccataagctgaaaaatgtttacttgacacataagaaagtagcaaaggaggaacagaaacaaaaagatatgagacaaattgaaaacgtatagcaaaatggtagaccaaaacccaaccattataagtgaagaaatgacacgacctgagtcacattagcaggactgctgagcactgtggggagaacagacatgggcaggaggtgagggacagtgttagtgccacaattcaggagtgacagggtggcggggactaaaggggaaagagggtgtgagggatgagaggggcagagagaagggctggagaagcaggaggtgaggaaaaggagcagaggaaagaattctaaagcagtagaagagcctggcagggggttctttgcattcggtatttaatacattttgtgtgactgccttaaaactaatgggctccttatgatttttttttaaaaaggggttacaaaaatatcaagtgtccaaataaaatatgcacactgcttagatgtgcatagttcacgaaaacgggcagtgctggagcgctggtgaagagcattgggactgcatggagccctcgcaactttgaggtgatgactacaggctcccggttgcaatagacagtaacaaaccctgcttctttgtattcaggagatgttctggactcacacagggaaactctggctagagaatgaggataactttaaatgcaacaacccagagtcacagaaccatagtctgcgaaagtaaaacaggagctttgagaatttaattgtaatgcagttttgacacaggtctttcacagattggaattctaatcattcagggattaccaatattgtgctacctactgtatcaataaacaaaaaggaaactggtctctatgagaatctctacctggtgctttcagacaaaacttcaccaggtttaaagagaaaactcctgactctacacgtccattcccagggcgagctcactgtctggcatcaagttccccatggtgagtttccctgtacaagagtccaaggggagaggtaagtttcctttattttgctggatgtagtttaatattacctgaggtgaggtaaggtaaggcaaagggtgggaggcagggagtccagttcagggacggggattccaggaggagaagtgaaggggaaggggctgggcgcagccttggggtctctccctggtttccacagacagatccttgtccaggactcaggcacacagtgtgacaaagatgcttggtgtaggagaagagggatcaggacgaagtcccaggtcccgggcggggctctcagggtctcaggctccaagggccgtgtctgcattggggaggcgccgcgttggggattctccactcccctgagtttcacttctcccaacctgcgtcgggtccttcttcctgaatactcatgacgcgtccccaattcccactcccattgggtgtcgggttctagagaagccaatcagcgtctccgcagtcccggttctaaagtccccagtcacccacccggactcacattctccccagaggccgagatgcgggtcatggcgccccgagccctcctcctgctgctctcgggaggcctggccctgaccgagacctgggcctgtgagtgcggggttgggagggaagcggcctctgcggagaggagcgaggggccctcccggcgagggcgc

SEQ ID NO: 35782 - DNA, 2300 bp, Homo sapien
ctcccaacttgtgtcgggtccttcttccaggatactcgtgacgcgtccccacttcccactcccattgggtattggatatctagagaagccaatcagcgtcgccgcggtcccagttctaaagtccccacgcacccacccggactcagagtctcctcagacgccgagatgctggtcatggcgccccgaaccgtcctcctgctgctctcggcggccctggccctgaccgagacctgggccggtgagtgcgggtcgggagggaaatggcctctgccgggaggagcgaggggaccgcaggcgggggcgcaggacctgaggagccgcgccgggaggagggtcgggcgggtctcagcccctcctcacccccaggctcccactccatgaggtatttctacacctccgtgtcccggcccggccgcggggagccccgcttcatctcagtgggctacgtggacgacacccagttcgtgaggttcgacagcgacgccgcgagtccgagagaggagccgcgggcgccgtggatagagcaggaggggccggagtattgggaccggaacacacagatctacaaggcccaggcacagactgaccgagagagcctgcggaacctgcgcggctactacaaccagagcgaggccggtgagtgaccccggcccggggcgcaggtcacgactccccatcccccacgtacggcccgggtcgccccgagtctccgggtccgagatccgcctccctgaggccgcgggacccgcccagaccctcgaccggcgagagccccaggcgcgtttacccggtttcattttcagttgaggccaaaatccccgcgggttggtcggggcggggcggggctcgggggactgggctgaccgcggggccggggccagggtctcacaccctccagagcatgtacggctgcgacgtggggccggacgggcgcctcctccgcgggcatgaccagtacgcctacgacggcaaggattacatcgccctgaacgaggacctgcgctcctggaccgccgcggacacggcggctcagatcacccagcgcaagtgggaggcggcccgtgaggcggagcagcggagagcctacctggagggcgagtgcgtggagtggctccgcagatacctggagaacgggaaggacaagctggagcgcgctggtaccaggggcagtggggagccttccccatctcctataggtcgccggggatggcctcccacgagaagaggaggaaaatgggatcagcgctagaatgtcgccctccgttgaatggagaatggcatgagttttcctgagtttcctctgagggccccctcttctctctagacaattaaggaatgacgtctctgaggaaatggaggggaagacagtccctagaatactgatcaggggtcccctttgacccctgcagcagccttgggaaccgtgacttttcctctcaggccttgttctctgcctcacactcagtgtgtttggggctctgattccagcacttctgagtcactttacctccactcagatcaggagcagaagtccctgttccccgctcagagactcgaactttccaatgaataggagattatcccaggtgcctgcgtccaggctggtgtctgggttctgtgccccttccccaccccaggtgtcctgtccattctcaggctggtcacatgggtggtcctagggtgtcccatgaaagatgcaaagcgcctgaattttctgactcttcccatcagaccccccaaagacacacgtgacccaccaccccatctctgaccatgaggccaccctgaggtgctgggccctgggtttctaccctgcggagatcacactgacctggcagcgggatggcgaggaccaaactcaggacactgagcttgtggagaccagaccagcaggagatagaaccttccagaagtgggcagctgtggtggtgccttctggagaagagcagagatacacatgccatgtacagcatgaggggctgccgaagcccctcaccctgagatggggtaaggagggggatgaggggtcatatctcttctcagggaaagcaggagcccttcagcagggtcagggcccctcatcttcccctcctttcccagagccgtcttcccagtccaccgtccccatcgtgggcattgttgctggcctggctgtcctagcagttgtggtcatcggagctgtggtcgctgctgtgatgtgtaggaggaagagttcaggtagggaaggggtgaggggtggggtctgggttttcttgtcccactgggggtttcaagccccaggtagaagtgttccctgcctc

SEQ ID NO: 35783 - DNA, 2300 bp, Homo sapien
ggaagaggacagagagaagggctggggaagcaggaggtgaggacaaggagcaggagaaaggactctaaagcagtggaggagcctagcaggggattctttgcattctgggtttctctactgggcagtgtggtagttacatgactataaataattaccaatattcgccaaaaaagcgcagctaaaactggtgaattttattacacataaatgccctaataagcaaaaaaaaaaaaaaaggggggggggaggggaggcaaaaataaagacatttttagataatcaaagccataaaattaatttcctaggggtcctgtactacatttaattttaaaggaagtgcttcagggtgaaggaaaatgatactagatggtgacccagatatacagaaaggaacaattaacaacagaaatgatgcacatacacatgtcacattcacactcattttcttaatttcctgaagacatatggctacttgtttaaaacaaaaagtattgcactgtatcactgagtctataatataggttgatgtaatatatacaacaataatagcacaatggtaggttacaagaaactacactgttagaagtgtcctttattttgctggatgcagcttaatataacctgaacttcactgtgaaaagtcaaggaatcgggtttccattctttgctattgtgtaaagaaatatagccaaaagccactaggagaattaaaaccataaactaaaaaatgtttatttgacacataagaaagtagtaaaggaggaacagaaacaaaaagatatgagacaaattgaaaacgtatagcaaaatggtagaccaaaacccaaccattgcaagtgaagaaatgacatgacctgagtcacattagcaggactgctgagcactgtggggagaacagatatgggcaggaggtgagggacagtgttagtgccacaattcaggagtgacagggtggcggggactaaggggagcgggggtgtgagggatgagaggggcagacagaagggctggagaggcaggaggtgaggaaaaggagcaggagaaagaattctaaagcagtggaagagcctggcagagggttctttgcattcggtatttaatacattttgttggacttcctaaaaactaattggctccttatgattaaaaaaaaaaagagttacaaaaataccaagtgttcagataaaatacgcacactgcttggatgtgcagagttcaggaaaacaggcagtgcttcagcgtcggtgaagagcattgggactgcatggagcactcgcaactttgaggtgatgactacaggctcccggttgcaatagacagtaacaaaccctgcttctttatattcaggagatgttctggactcacacagggaaactcagggtggggaatgaagataattttaaatgcaacaacccagagttacagatccacagtctgggaaagtaaaacttaggagctttgagagtttaattgtaatgctgttttgacacaggtcttttacaaattggaattctaatcattcagggattaccaatattgtgctacctactgtattaacaaacaaaaaggaaactggtctctatgagaatccctatgcggtgccttcagagaaaacttcaccaggtttaaagagaaaacccctgtctctacacctccattcccagggcgagctcactctctggcatcaagttccccgtgctcagtttccctacacaagagtccaagaggagaggtaaggagtgggaggcagggagtccagttcagggacagggattccaggacgagaagtgaaggggaaggggctgggcgcagcctgggggtctctccctggtttccacagacagatccttgtccaggactcaggcagacagtgtgacaaagaggcttggtgtaggagaagagggatcaggacgaagtcccaggtcccggacggggctctcagggtctcaggctccgagggccgcgtctgcaatggggaggcgcagcgttggggattccccactcccctgagtttcacttcttctcccaacttgtgtcgggtccttcttccaggatactcgtgacgcgtccccacttcccactcccattgggtattggatatctagagaagccaatcagcgtcgccgcggtcccagttctaaagtccccacgcacccacccggactcagagtctcctcagacgccgagatgctggtcatggcgccccgaaccgtcctcctgctgctctcggcggccctggccctgaccgagacctgggccggtgagtgcgggtcgggagggaaatggcctctgccgggagg

SEQ ID NO: 35784 - DNA, 2300 bp, Homo sapien
tcctgtcactcaggctggagtgcaatggcacaatcatagctcactgcagcctggaactcctgggcttaagcaatcttcctgccttcgattcccaaagagctgggattatagtcatgaaccactgcaatccacccaaatccaagtttacactaaaagataaaattccaacattgtaggggattggtcaggtggtgggaataattataaagataaagttataggaaatagacacaaaccttcttggaaggtggaaagttttgcaaaagcctcaggatagggttatagctgaaagcagcctaatccccttaccttgagttaatagcttcgagtaagtacaaagacatgtaagagagtttatctaaagagcatgtttacctttgatcatttgtaggactgctctctccgggggactgcgaccagattaattacccacaggtgtgttgactcaaagcctttgtcattaaatctgtgctgaataaaggcccacagggccagatagtcagggcacgcagctgccacaaccctttctgtgagtggcctggccctctggtgcactctttcactgaatatcggtgtctgagtacattattcatccatcgtgcagcctgggtctgccggtcagaccctggcacaacatttaagaggaaatgaaagtcacaaagttatcccagtctctggagtcactgtcaaaactttggtgaggaatcttccaggttttcccctacttcaaatatatattaatattatgtaagtgatattagtggcattttcgcccaggctggaatgcagtggcatgatctcggctcactctaacctctacctcccagattcaagcgattctcctgcctcagcctcccaaacagctggaactacaggcacccaccaccacgcccggctaatttttgcattttcagtagagacagggtttcaccatgttggccaggctgatcttgaacttctgacctcaggttatctgcctgccatagcctcccaaagttctgggattacaggtatgagccactgtgcccagcctccttaaccttttaaaaaaggttaaaagtatgctgggcacatcttttcatagcaatacttaaaattgctcttactctttttaatgacaacatagaattttatcgtgtagctgttctttgggagacgattaaaatcttctttatcttcactgtggtagtggagatgtgggtgtgtacaacagctaaaattcaacaagttgaacattttaaatagatgcagtttattgcatgcaaagtatgtcccaataagatgatttaaaaatattatcctctttgagacttgtactttgcttatgtgaaacaaaacaaaacaaaaaccctgttcttgtgcccaggagacacaccctgacacatctggaggtagagggtcatgctgtctgcaacttaccctcacaggctctgaaataacaataatagcagcatatttacagatttagagagagagaaatttgtggtaaaaatgttcataagtaaaactagataaagggcaaaaataaaagaaataatgaaactacgtcttttaaattttctctctccggccgggtgcggtggctcacgcctgtaatcccagcactttgagaggccaaggcaggcagatcacgaggtcaggagatcgagaccatcctggctaacacagtgaaaccccgtctctactaaaaatacaaaaaattagtcgggcgtggtggcaggagcctgtagtcccagctactccagaggctgaggcagcagaatgccctgaacccgggaggcggagcttgcagtgagccaagatcgcgccactgcactccagcctgggcgacagagcaagactccgtctcaaaaaaaaaaaacaaaaaacaaaaaaactctcctttactttttctctccccttttcttcctatctcttccctcatttcttcaacacgtccccccatccttccctcttttctccattctctgcatttgatccccggtatattccagcctccaggccaacaaacttctccgcgtccgccgggagcaggtcagggaagggacgcgaggcggcgctgtcaccgcattctgagcgccgcagctccctgggccccttgtatcatttcagtgaaggtcactccagtctttcatggaggccaaactaagggtgtaaattaggatcctcactgaagtggcgggaccctaagaggctttttcctggccccttagttgtgggttttcctgcgggcggcgcagccggtttccatcagaaccgcccagaggcggacgctgccttcctggggtgacggagcagca

SEQ ID NO: 35785 - DNA, 2300 bp, Homo sapien
ttggagggttcatagggtagaagatggtagatgacagctgggtgtggtggcactcgcctgtagtcccagctactcaagaggctgtggtgggaggattgcttgagcccaggcattcaaggctgcagtgagctataatcatgccactgcattccaactgagtgacacagcaagactcctctcttaaaaaaaaaaaaaaaattcatggcagggcacaatgagtactatcaggaaggttcaaaccacgggctaaatcagtagttctaaaacttgactacacatcggaatcacctagggaactttaaaagatactaagatttaggtccaacctgggtttactgatttaacaacctaggttgtggctgtggcctgggaacatggatattaaaaactctccaggtggttctacgcagtggctaggtttgatgacctctgcctagatgtcccaacgactaagagatgtgcgttggggacaaggcaattctcttagtagaaagaggctttcgggacagcattcttattattgagaattgagaattcatatgccacacaatttatccttttaaagtgtgcagctcagtggcttctagcgtaatcacaaggttgtgccaccgtcaccactgtctaccctggaagattttttttcctttttttcttttttcttttctttttattttaaaggctagtcaagtgaaacagtgggagtgaagaagaaacaaagacatctataactggttgtgatcaattagttgtaaacactgcactcagaccagcctgggaagattttaaggatatggtgtggtctgatgggttccaaggcagaggttacaatagcctggaagagggagactgcttaggcagtggcatcctggtgggatagggtgaggagatcccagagcccacgtttactgcaaccctggggagatgtcaccagagaaatgggggtggtgccagacagcagattgtggcagctgaggttttccacggtagagtagaagcatccatcatgtgtgacattcagcagatggggcgctgtgggtggcttggagcactctggttgtaactgaggcaggcaccgtgtttaggaaggctgtgcagtaatctaggctgaagggaggggaaagcctagactaagattgtggctgtgggattgaaatagcgttgaaggagctgactttgactcccggagatgatggggaaagaggaaatcagaagggaccaaggatggtgatgttcttaagagaaactgaggaggaagagaggatgatatggtggcagacgtatagagagtctttgtagatctctcacattggaggggactatggtcggaggtacagatgtcctaaggcaggctggaaaagggagtctggagagagcttggtgttgtagtgaaccacagggagccgcctccttggccctgtgatcacccagggactgaatagagaggcggccctgggagacttcagacacttagaggatataagggggtgaaaggggggcctggctttgagtcaaagggaggagaaggagattataaagctgaaacgtctaagagagtttgtggtctgagcggttctactgcggcaggtgcttctgagaggcagaggtggctgagatctggaaacaggtctgcaaatctggtcactggtctcattgccagtaacgctgtgcgcggttgagggagtgtgttgggagaatagccacgcgttgtctgtcctggaaggaacaagccagtgagagccggtttaatggggcggccggcgaaaggggcttggtgaggcccgcgctcctcggggtgggggcgcggggatgggtggtcgcgatgccgggagggcaggcagggccctggccgtgcttatgaagttggagctgtactctcagctactcgaagctggtccctgctttaggctgcgctcccgcgtgctccccattttctgggccccaggtcccgccttctaaatctccccaggtctccagcccactggaattttctcttccaagcgtggccccgccctctccgctcgtgattggccctaagttccgggccccagtttcattggatgagcggtcgggggaccgggccaggtgactaagtttccgcggcgccttctccccggccactgcttgagccgctgagagggtggcgacgtcggggccatggggctgggcccggtctttctgcttctggctggcatcttcccttttgcacctccgggagctgctgctggtgagtggcgttcctggcggtcctcggcggagcgggagcagtgggacgtttccgggggtcgggtgggtagcggcga

SEQ ID NO: 35786 - DNA, 2300 bp, Homo sapien
caacatgaaatttaaggtcagggaatctcttaacttttcttgaaggacctcatatttagcttcttgactcaaaatcatttgtggatttgaacaggtttcctctgcaatgtactctctggaggggaatacattgaaaatacagttcattttcagatactcaatgggattgaaaagttgaattgtgtgctttcttgcagtgagcacagaggaatttgctgtcccatgccactgggacatttttaggagcaccattctcttccagagggcttgagtaaggtcagtgaggaattaacatgtagcatattggcaactccagggttgagcagggagacacacatgtttttctgatgtgtgaagttctgagggcattttccaaagtacttgttcactgagcaggtgtttccactacttgcattaagtcaggggatatggaagccacttttccagcaatcaaactcaatgagaagatgaacaagaagtgttctgaaagtaagcagaaaaggccctttccatgaattttcctaatttttagatttctcttaaacaacatgcctgaagttacaaccgcatccttctctagcagcttctaaatgagaaaatcatcaaaagggtatttagtactcaagtggtggacacaggataaatgctgaaaatcagtgctcgattcgaagatagtgatgttccaggatgttggagtctctcaggtgtcagtagggaggcgggccgggaacttctcccagtaaccagaaagaagagcctcagggagatgaggatgtctcacagccagggacgggacagtaaagggccccatgtgagtgcatcacagggatctgttcctgtttagactccaatgctcagtacccagtgcagaacatggcaagacttcagcaaatacatcagtcagctggatgaaggaggcaggtgtgagccagcaaaaaaaagcttgtgattttattggagcatgaatttaaaagtgttgatgtggctgggcgcggtggctcatgcctgtaatcccagcactttgggaggccgaggtgggtggatcacgaggtcaggagtacgagaccagcttgaccaacatggtaaaaccccatctctactaaaaatacaaaaattagccgggcatggtggcagacgcctgtaatcccagctacttgggaagctgaggcagagaattgcttgaacccaggaggcggagattgcagtgagctgagatcatgccactgcactccagcctgggtgacagagcgagactccatctcaaaaaaaaaaaagtgttgatgtacctaccttgcaaggaggtagataggtagacagaagcatggatagatggatggatattctttttctgtgtttttctatttctgttctttctctgtgttttgtctctttctcttgctctgtctgtatcttccactgttccttcataatcatgtcttagccatcatcagtgacatcttttatctggtcttataagatcttgtctgtctgttgtattagtagccacaggacagaaaaaggaaaggagtcgtgaaaaacaagataaggaaaaagatgctcctgacatggggcatcgggaggatgtgtggccctgaggctcccgggagacaggggctgcgcctcactgcagagtccatcctgctgaacacagaggggaaaagcgccctgacagccccgtccgtgctgctcagaaaagacggctccgtctccagatccttctctctatgtccttcagtcttggctctctaggtacaatttactgctatgaaaagggatttgagaattcccagaggaggctttcagcctctttgcatggctctttctggcctttcaaaagcgccagagacatcagaaatgaaatcgtacacacttattcggagttttccacaatcattgaaatttctgtgagtgccaaagttaagtttttggcaaccccgtcaaagccgggtgtgcccaggacagtcaactcaggcgctggactctcattctggttggattttatgacagccgtattcgccataagaattctagagccagaccttgttacttcacaattgcctcacgttgcaggacaagcaaatctagcctgagtcctgtggattccagggctgctcaggagacgcctccatcctggcgtggatgacctcaggatcagccccgtctgccccactcagcccgcagcctggtccccgaaagcgctcagtcagaatccgagagcactgtggcggcgcccccgtgtggccacaggactgaagacagaggaccccgctcccctttctccccagccaggacgtcccagg

SEQ ID NO: 35787 - DNA, 2300 bp, Homo sapien
atgtaatgaggaaaatccaatataacatgatctcctcaaaagaggtataaacaaatgatgatattgtcttttatctcatttttaccagatgtctgaaaggttgaagccgtatgttgctgagaccattgctatttttggactgcaatgggcgaattgataatgactaaacaggactctggtaatgggccagtatctttttactgctatgattcttctgctataggagatctgtggttggccaagcaaaggggctcacatttataatttcaccactttgagaggccatggtgggaagattgcttttgaggccaacagttgcagaacagcctggggcacataatgagactgcatttctacaaaatatttaaaaattagtcagccatggtggtgtgcacctatagtgccagctgctcaggagacttgaggcggaaggatcacttgagtccaagaatttgaggttacagtgagctatgattgtgccactgcattctaccctgggcaacagagcaagacattgtctctaaaataaaataataaataaataaatagaaattataagaagaaataatgtggttaaagaccaggaagtgatctgtgatccaataaatatatttggtctttgcccctagtccctgacaggcaggtcctaaaacgcttgcagtccctcagtgataagcatgattttaatatggcaatgagatgactatggggtgaggggctcctagatagtttcaggatggaggctgcttgccagaaacaccagctgtgattagaggattggaactttcactgccatccccatcctctggggaagaaaagggggctggaagttgagctcagtcatcaatggccaatgatttcaccaatcttgcctacacaatgaaacttccatagacacctctagacagtgagttttggagaacttcccagttggtgagcacatccgcatgtccacgtgctgggaggacggcacacctcatctccatagagacagaggcttctgcgcttatatctttctgtaaggcagacacccttgtttctaggagggacctagggtggactgtggattctttctctggggcaaataaaaatgtagaatcagaaaattcaggcactttgcactcctcatgggacactccagcagcactcacgtgaccatcctgagaatggacaggacacctgaggtggggaagggagcacagaacccagacaccagcctggacacaggcacctgggataatctcctattccttggaaagttccagtatctgagggaggaacagtgacttctggtcctgacctgagtggagaccgagggactcagaagagctggaatcagacccccacacacactgagtatgagtcagagaacaaggcctgagagaaaaagtcacagtgcccaagactgctgcaggggtcaaaggggactgctgatcagtgttccagggatttgctccagattaatctgagtcatggaaaaactgcctttcttttgtttctaaacaaatacctgcaaagacaaaagaccacataaatccccaggtgcacaactttttcagatttaaagaaaaaacaacccccgtctttccctccattcccaggagaagctcactctgtggcatcaagctgcctgggtgagctctcttctagaagagtccagggggacaggcaaggaatgggaggcaggaagtccagttcagggagggggattctgggatgaaaagtgaagggagagggactgagcccatgctgagggtttttctctggtttctcagacagctccggggccaagattcggggagacattgagacagagcgtttgatataaaagaagggggtaagagccaagtcccagggcccggagcttggctctctgggcttcaggccccgagggcggtgcctgggatgggccggctcagctttggggtttcccgagctccgctctctctcttccacctttcccaacctgtgtcaggtccttttacctggatactcatgatgcggcctcagttctcacttccattgggtgttgggttcctagatcagccaatcagtgtcgccgcggttcctggttctaaagtcctcgccggcccaccgggactcagattctccccagacgccaaggttgcgggtcatggagtcccgaaccctcctcctgctgttctcgggagccgtggccctgatccagacctgggcaggtgagtgcggggtcgggagggaaaaagcctctgcgggaaggagcgaggggcccgcccggaggagtaaatctgcacatatatttaattacagattacaattac

SEQ ID NO: 35788 - DNA, 2300 bp, Homo sapien
aaaacttgactacacatcggaatcacgtagggaactttaaaagatactaaggtttaggtccaacctaggtttactgatttaactggttgtggctgtggcctgggaacatggatattaaaaactctccaggtggttctacgcagtggctaggtttgaagaccactgcctagatgtcccaatgactaagaatgtgcgctggggacaagccaattctcttagtagaggctttccagacagaattcttattattgagaattgagaattcacatgccacacataatttatcgttttaaagtgtacagatcagtggcttctagcataatcacaaggttgtgccaccgtcaccactatctacttgggaagattttcttcctttttttcttttttttttttttttttgaggcggagccttgctctgttgcccaggctggagtgcagtggcgcaatctcagctcactgcaagctccgcctcccgggttgaccccattctcctgcctcagccttctgagcagctgggactacaggtacccgccaccacgcccagctaagttttttgtatttttagtagagacggggtttcactgtgttagcaggatgctctcgatctcctgacctcgtgatctgcccacctcgacctcccaaagtgctgggattacaggcgtgagccaccgtgcccggaccctttttcctttttttttttttttaaaggctagtcaagtgaaacagtgggagtgaagatgaaacaaaaacatctataactggttgtgatcaattagttgtaaacaccactgcactcagaccagcctaactgggaagattttgaggatatgctgtggtctgatgggttccaaggcagaggtgacagtaacctggaagagggagactgcttaggcagtggcatcctggtgggatagggtgaggagatcccagagcccacgtttactgcaaccctggggaaatgtcaccagagaaatgggggtggtgccagacaatagattgtgggagctatggtttccatggtagagtagaagcatccaccatgtgtgacattcagcagatggggcgctgtgggtggcttggagcactctggttgtaactgaggcaggcacagtgtttaggaagcctgtgcagtaatccagactgaagggaggggaaagcctagactaagactatggctgtgggattgaaatagcgttgaaggagctgactttgactcccggagatgaaggagaaagaggaaatcagaagggaccaaggatggtgaagttcttaagagaaactgaggaggaagagaggatgatgtggtgggagacgtgtagagagtccttgtagatctgtcatattgaaggggactatggtcccagaggtacagatgtcctaaaacaggctggaaaagggagtctggagagagcttggtgttgtaatgaaccatggggagccgcctcgttggccctgtgattacccaggaactgaatagagagggggccctgggagacctcagacacttagaggatataagggggtgaaaggggggacctggctttgagtcgaagggaggagaaggagattatatagctgaaacgtctaagagaatttgtgatctgagcgtttctactggggcaagtgcttctgaaaggcagaggcggctgagatctggaaacaggtctgcaaatctggtcactggtctcattgcagtaacgctgtgcgcggttgagggagtgtattgggagaaaaaccacgcgttgtctgtcccggaaggaacaagccagtgagagccggcctgatgggaggaccggcgaaaggggcttggtgaagcccgcgctccttgggggtgggaatgcggggatggggtggtcgcgatgcagggagggcgacagggtccaggtcgtgctcataagtttggagctgtactctcagctactcggggctggtccttgattttggctgcgctcgcgcacgctcccccttttctggccgccaggtcccgccttctaaatttccccaggtctccaggccgctagaattttctcttctgaacgtggccccgccctctccactcatgattggccctaagttccgggcctcagttttcactggataagcggtcgctgagcggggcgcaggtgactaaatttcgacggggtcttctcacgggtttcattcagttggccactgctgagcagctgagaaggtggcgacgtaggggccatggggctgggccgggtcctgctgtttctggccgtcgccttcccttttgcacccccggcagccgccgctggtgagtggggttcctggcggtc

SEQ ID NO: 35789 - DNA, 2300 bp, Homo sapien
cacctcggcctcccaaagtgctgggattacaggcgtgagccactgtatctggccatatactttaattttaaaatacttaattgctaaacaaatgctaaccatcatatgaggcttcagctaatcctgatctttttgctgggggagggtcttgcctccatggatcaggggcatggctgctgaaggctgctttgacaacttcttaaaataagacaatgatgtttgccatttgccgcatggattattcctttcaatattgttgtgcctcagggaatagggaggcctggaaagcagagtcgggagaatggccagttggtgaagcagtcacaacacacacatttttccattaagtttgctgtcttatatgagcatcgctcatggtgtcccaaaacaatcacaatagttaacttcagtaactgattacaggtcactgtaacaagtataataatgaaaacgcttgaaacattttgagaattccacagcgtgacatggagacatgatgtctgcctgctgttgggaaaatagcaccaatagacctgtttgatgtgcttgacacagggttgccacaagcctccaatctctaaataaaaaacagcatctgcaaagagcaataaagggaagcacaataaaaggtacatctgcaaaggggaatcagcacttaagcaaggtcaggatgagctttcaagtcaggtggacctagacatgaaccctccaggccctaccaacaaccagctatggaccttcgagcacatccagcctagagctgcccccaacagacacttccccagtgaatgctgaatgaaaccatctgagccagtttcctcaggtgcaaaccagtgaggtaattcctaccttgcagagtgaagtgagaaaagacagtgttaagaaatgccgggtgcggtggctcacgcctgtaatcccagcactttgggaggccaagacgggcggatcatgaggtcaggagatcgagaccaccctggctaacacggtgaaaccccgtctccactaaaaatacaaaaaattagccgggcgtagtggcgagcacctgtagtcccagctcctcgggagggtgaggcaggagaatggcgtgaacccgggaggcagagcttgcagtgagcccagattgcgccactgcactccagcctgggcaacagagcgagactccgtctcaaaaaaaaaaaaaaaaaaaaaaagacacaagacctgtggtagcctttcctttctgtctggcagcagccactgggtaaaccaagatggtgcatacaagtacatccagaagctatggaagaagcagtctgatgtcatgagctttcttctgagggtccgctgctggcagtaccaccagctctctgctctccacagggatccccgccccacccagcccaataaagcacgctactgggctacagccaagcaaggttatgttacatataagcgccacggtggctgaaaatctagttcctaagaaggcaacttaacagcaagcctgtctatcatggtgttaaccagctagtttgcttaaagccttcagtctgttacagaagagcaagctggatgccactgtggggctctgagtcctgaattctcactgggctggttaaagattccacatacaaagtttttgaggctatcctagttgatccattccataacactatcagaaggaaacctgacacccagtggtccacaacaagcatagggagatgcgtaggctatctgcaggccaagagagccacggccttggaaagggctgtaagttctaccacactattggtggttctcgccatgcagcttggagaaggtgcaatactctccagctccacagctaccgctaatgtttgtaaaattcatacctaataaacactagatcaaaaaaaaaaaatcacagacctgtggtaggctgggcaccagtgctctaaagcaagttctgcctaaactggcagggacatttttcacatcaggaacaggagttgttcctggactctgtctggggccaggctgggagagacgtggggcagagtggggcaggggcaggggcagggctgggggctggggcctgggcagggccaggcactcaagtgaggccaagtcctggagcgaaccagttcctggtggccgttggacagctcacacagctccctgccaggtcacccgccatggtcctccctctgccctggctctctcggtaccatttccttcgcctccttctgccctcctggtccttggcaccccagggctcccatgggtgctgctcccaaaaccccaaagcaagcatggaagagcagaccagctccagaggaaat

SEQ ID NO: 35790 - DNA, 2300 bp, Homo sapien
ttgcagtgagccgagatcaggacattgcactcccgcctgggcgacagggcgagactctgtctcaaaacaaaaacaaaaacagtattaatggaatgtagtataaccctcaagccctactattaacacttggggccgaatccagaccccgtcttcccgctcggattcagaacaccttcctgactcactggccctagggcatcagctacctcggacagcatccttttgggaaaataccgcccaccagccccacgactgggaaagagtcgggaaacacccccgagcaatccagttccctgagacttccctcctccctcccctcagctagggcctgccggttcctagtgcgtgcccagcagtcctcaggtcaccttcactaccgggccaaggaccccgtgggaactcgcagccttcgccacactcgttcctcgcgcatccatggaggggtgcctacagagaagacctgcgtggcaaaaacctaaacgaagagatgaggggcatggagaggagtaggataagagaataaagataacagtgggggggagacgttagtttcctttatatcttttgttactggcggtagcagtgaagttagaaacggttttaaaacaaatttcagacaggcattttccaaaggcaagcctggagcgcacggatctgtataaccgcggaaggccctgtttccggtcccttgcgcctgcgctcttgcagccaagaaggcgggaggctggagtagagggaagcctgcaaccggaagtgaaggcagatttccctccttcgtcgctgttgctgccgccatacgcgctctccctgtttaggtaagctttggccttcgctacaatccgtttccatctgcgcttctccgcacccatcccgtcacatgggttcctgatacccttttcacaggcgatggtctggtcgctggggcctagttggttcgctatttccttagcttgcatccctttcgagagcaaagagctcctgggggaaggaagggaagctaaggggggacccaatccaagatggtgtcctcggcgccattgtgttcgttttgctcccttcttccaatgggttcttctcatattggaggcctcagcatcaatgagaggcggcgctcggcgtcccttggtcttggtatttgcggagggcggggctcttctcaccttccttgtcctttcttgagctctttctcggccctcggtgggactgggaggaggagctggtttctgggcccagttggatttttctcaccttgacttgcccaacttaatttggagtgccttccaagtgtttacgatacgattggtgtcattgtatgtttctccaaaaggagtctcaccttcgtagcgtaacagtgatgtgagaccacttggtaaagatcctgttaaagcctgggcggggattgcctttctctgtcacctattagctttcttattgtagggtggagacatgaattttgtttttttgtggccgagccatttgtcttgcaccgcccctcccccccatgctaattacacaaggcttgcttaaacagcggaagggaggatactgagaagtgggaggctgagagctatgggaggtggacggcggccatatgatgttttcttttcgaaaggtgagcgctttgcgcagtgatgaccctcatctatcacccttgactgatggctgctgagttaggcatccataacggtgggattataatagggaaagcggagtcttcctttgaggacttttcaggactctacttgtcatctccattttccactttactaagttattagtcgtattttaccttttattatctattctatttcctcactgttactttcagatcaagaatttataagttggtcttccccttccaacttttctggtttccgctactgtgattgctaatcttgttgggaacctctgtcctaaccactttccctggtactgctttttctgttctgttatatttgcttttcgtttttatgttttgtatctgtttttctttccaggtaaaagtttcctggtttagggaaagtgggaactggggatggaaaagaggtggtgaaggctgtgctcgtgattaagtcttgcttttttttttcccccctccagctcttctgttagaaatagtatctttgttttcctttgctgttcctcaatcccctactcttcaccccttgttttcacctattttgcgagaacccatccagatcccccttcccttcttcccctgccggcccagttatggcagagaacgatgtggacaatgagctcttggactatgaagatgatgaggtggagacagcagctgg

SEQ ID NO: 35791 - DNA, 2300 bp, Homo sapien
ctggctattttttgtatttttagtagagatggggtttcgccatgttggtcaggctggtctcaaactcctgacctcaagtgatccacctgccttggcctcccaaagtgctgagattagaggtgtgagccactgtgcctggccttcagtcactttcttgttttttgtttacatattccctaaacagcccaaatggctatcctttgaaacttcttggagaaacaagaacaagtagtactttattatttctctaaagtgagaaacatggttcctcatttgggaatctgaggactatagatcgcaactgtagagaaaagctggagtgtaggagcaagtgctctttgcccctttaccttgcattttcttcatagcacttactgctactggttttttgagacaaggtcctgctgtgttgcccaggctggagttccagctcacggcagccttgaccccctggactcaaatgatcctcccacttcagcctcctgagtagctgggattacgggcgagtgccactatgccttgctaattttaaaattttttgtagagatggggtctcacttgcccaggctggtctgaaactcctgggctcaagcaatccttcgggctcggcttcctcaagggttgggttacaggcctgagccactgcaccctgaccacttatcgatacttgacattatatttgtgtttatgtgttttctttcctgtaatgtaaacactgtgagaacagggctgttcaccgttgtgtccccagatcctaggacaacatgtggcacaagggaggcagttgataaatacttttgaataaattaaatgatacttgggaaaataccttctatgacaccattcttgaattagttacttcatttgtcactgaagacaagcttacttcaccaagaatttgaaccaataaggtaacctgcagtgtatttactaaccagattctttgagcagggaggcagaatacaatagagaatgagagatgtttgcatcctggctgtaacctcaccagccgtactgcttgagatatgttgctttgcttcgcttctgtcaataagatgagaataacggtacctactccttagtattaaatgattaagtatgttaacagggagagggccaaacgtttgttgttttattacacagcaggacatcaggtcttacttttgtagctccccatctcaaagacggggatagcaaatgtttcattcaggaaaaaaatccaggttgaacaatggggctgttggggcggggccaagaacattctgctcgaattaacagtattaatgggccgggcgcggtggctcacgcctgtaatcccagcactctgggaggccgaagtgggtggatcacctgaggtcatacatgggtgaagccccgtctctactaaaaaaacaaaaatttgctgggcgtggtggcgggcgcctgtaatcctagctactcgggaggctgaggcaggagaatcgcttgaacccgggaagcagcggttgcagtgagccgagatcaggacattgcactcccgcctgggcgacagggcgagactctgtctcaaaacaaaaacaaaaacagtattaatggaatgtagtataaccctcaagccctactattaacacttggggccgaatccagaccccgtcttcccgctcggattcagaacaccttcctgactcactggccctagggcatcagctacctcggacagcatccttttgggaaaataccgcccaccagccccacgactgggaaagagtcgggaaacacccccgagcaatccagttccctgagacttccctcctccctcccctcagctagggcctgccggttcctagtgcgtgcccagcagtcctcaggtcaccttcactaccgggccaaggaccccgtgggaactcgcagccttcgccacactcgttcctcgcgcatccatggaggggtgcctacagagaagacctgcgtggcaaaaacctaaacgaagagatgaggggcatggagaggagtaggataagagaataaagataacagtgggggggagacgttagtttcctttatatcttttgttactggcggtagcagtgaagttagaaacggttttaaaacaaatttcagacaggcattttccaaaggcaagcctggagcgcacggatctgtataaccgcggaaggccctgtttccggtcccttgcgcctgcgctcttgcagccaagaaggcgggaggctggagtagagggaagcctgcaaccggaagtgaaggcagatttccctccttcgtcgctgttgctgccgccatacgcgctctccctgtttagg

SEQ ID NO: 35792 - DNA, 2300 bp, Homo sapien
tctctgctgggagctctgcatgccctgcacctggcgccttgtagcctgctccacctcagcagacaggttcccctgggagcccatggcctggggggtagggagaggggtggaagagagaaagggaaaagcagaaacagacaagggtccaggcatatgaggggaaagatcctgaaacaaagcctagaagaaaggccctctcagaaaccacccccatcccacagaaatatcccaacaccaaagagatcaacacagtcccctttccccttagacctaacatgcaacttcatcctaaaacagaccgtaatatccccaccacctcaccatccatgaccataaaactctaccctccaccacaaatgttaatcatactccacatagatgttatactttacacagactgtggcattccgcccacaagctctatgtggccttcaaaactcccagactctcctacatatcatcacaaagtttcaccaatgttgtggtccctgccagggtcccctcagcctcagccctctgccaccatattttcttgttgagtcacccttacacacctcactagatgcacccaccaacttgcagtggggtctcaacccgactctgcctcaactcaccgcctgctgcttgctctggaattcgtgctctcgctctctgcggtattgctccacctccatctgtgcctcctcctttgcctgcttcagtcgccgggccttccctggaggcagaagaaaggacagtgagtggggatggacccacacacacacaatgtaatagcaggagtcagtcccttccagaaagttatacagccttctctcagccaaccaggtgccagattctaatatccatccatttcttccctcctaaccagcctccagaccctagctgtctgtcttcccgccagccttgggttttcccaaaatgtttgctgtcccccacccccaattttctttccaaactcctaagggaggaaagaggagactcactctttctggcatctgccaccttctcagctgcccgcttctcagcttgcagaagctgctggataccttgggactgactggccatttctgttgttatggccgatgctgttttgaatgctgtcaaagtaccagatggctcccaccccccaccgcttacttctcctcctccagctcgttgctgcagtcctccactacccctgggtcttagtgctcccctgctcactcagcctcctgcaccgagtgtctctcccaatctcatcctcctattgatgactggtcctcctctccagcacttcttgctcaggcagtacccaaaggggccgcctgggagcagcagagaccaggcccaaagctgcgggcttacaacaggttagccatcccagtcggaaaggtctagggatgaggcaggggcggagacgggggagtactgaggtgagagaaggagaacttgattggtggtaacagaggaagcataaagggttgtgaatgcggtgaaaaggtaaggatgtcatcatgcaacctgtgttgggaaaagagcattctgggcttaattctaaactaactctctacctttctctctctctccaccatcccgccccctcccctgcctcccgttgttaacatctccatctttttctacatatttctcaagtccaaatttttgcatctcacttgccccatcctacgatagtcttcttccgtcttttgtctgtattttttctttttttttgatctgtccctgttgttgtcccactgtggtttttgtttttgttttccatgtttaatgtgatttttatcctgtctttatctcctctattttctctgtcttctcatcttttcgtccatcactgaaccatctcctctctctgccaagttagaggaggcgggaaaaaacctccaaataactctcttttctccctcccctcccctcgcctccttttcctcgcctccagtccagtcttctggtttcagacggcccctttaatttaagttccctagtttcccctgggagatctggccaagaactacccggtcggggcggaacgacatccggtaacgcccctcacagttcacttccgtcctccacctgcgtctctgcttgcgccatttcctccagcctggagtgtctccgcccttcccgcctcccgtctccgagcttcttaaacacaggccttgggcctacggctctgggggtacttgggggggcgggggcaggtctgatgagtaacccctccccccaggttccagaggaagaagcctccacatctgtctgccgggtacatgatattcaatttctagatcattattggagattatctg

SEQ ID NO: 35793 - DNA, 2300 bp, Homo sapien
gggataatatcagtactcacctcctaagattgttgtgaggattaaatgtgttactttataagaaatgtctggcacatagcaaaggttgttattattttaatttttacacatgggcaaactaagcctcaagtaacctgtccaagaatacgtagctatgaagtgtggagctgggatttggagctggggtttgaatccaggcaatctaactccagagcctaccttctatgctactttttggctacgagcaaacaatctgtcaagaaacaaagtagctactaatctaaacagatgtgaaatttgaagaccagttgatctttggggaatgttgggttcttcagacaatggtagctcagtaatgtaaagggacaaatgacagccacatgccaacttggttaactccttccctaggtcctgatgaccaaataaccagcttatttctcaactattggttggctttcatttcaggtctggtcagctgcttatgaccttgttccccactgagcagactcaccatctgggccctggcgggcagcagcatgcagtgccgtgtccccatggcggtcctggtgggcagggtcagccccgagccgaagcagcaggcacagggcaggggcatcgtggcgggcacaggcccggtgcagtggtgggggctgcccagcatctacatcgaggcctgggtgtcgctggaggagggcctgggcccggaccagccgtcctgcagacaagtaacgacgaaagcgacgttctcggcgttggcggcgggaagtggaggccatggaactcttgggctggggaaggaaaaaaggcagcagtcaggacttcagccttggctggtccttctccctccatctctgacatcccctgttgtttctccctttggttccgtctttttttaatatcttcagcaagagatgaggcctaacctaaccctgatcctttatcagatgatagatttgaaaaaaaattttttttgaggggggtgataggatcagaggtttaatttttttaatgtaaaattcgagaaaagggtaaataattggtttaaggctcaggagcccaggtaaatttttaatttttaacaaagaactttaaaaaaacccaacagggccggatggggaaaatttttatcagcagaaatctgagttttaaaaagtcacagataatctccaataatgatctagaaattgaatatcatgtacccggcagacagatgtggaggcttcttcctctggaacctggggggaggggttactcatcagacctgcccccgcccccccaagtacccccagagccgtaggcccaaggcctgtgtttaagaagctcggagacgggaggcgggaagggcggagacactccaggctggaggaaatggcgcaagcagagacgcaggtggaggacggaagtgaactgtgaggggcgttaccggatgtcgttccgccccgaccgggtagttcttggccagatctcccaggggaaactagggaacttaaattaaaggggccgtctgaaaccagaagactggactggaggcgaggaaaaggaggcgaggggaggggagggagaaaagagagttatttggaggttttttcccgcctcctctaacttggcagagagaggagatggttcagtgatggacgaaaagatgagaagacagagaaaatagaggagataaagacaggataaaaatcacattaaacatggaaaacaaaaacaaaaaccacagtgggacaacaacagggacagatcaaaaaaaaagaaaaaatacagacaaaagacggaagaagactatcgtaggatggggcaagtgagatgcaaaaatttggacttgagaaatatgtagaaaaagatggagatgttaacaacgggaggcaggggagggggcgggatggtggagagagagagaaaggtagagagttagtttagaattaagcccagaatgctcttttcccaacacaggttgcatgatgacatccttaccttttcaccgcattcacaaccctttatgcttcctctgttaccaccaatcaagttctccttctctcacctcagtactcccccgtctccgcccctgcctcatccctagacctttccgactgggatggctaacctgttgtaagcccgcagctttgggcctggtctctgctgctcccaggcggcccctttgggtactgcctgagcaagaagtgctggagaggaggaccagtcatcaataggaggatgagattgggagagacactcggtgcaggaggctgagtgagcaggggagcactaagacccaggggtagtggaggactgcagca

SEQ ID NO: 35794 - DNA, 2300 bp, Homo sapien
acagaaataatagctaagactagtaaagcataaaaggcaaaggggcaggtcctcaagtagagaagaacaggagaaatagctcatacacacccagaatgttacttacatgtccctccatgttacaccaagacccctcagggaccttgtgcctggggagagaagtggtctgccccatgcaacagtgggctttaccccgggtcaccaccagccccagctccaacccctctaacactctccaagtaaaatcacatcagtagcagtaataatatttgaggtgacaagttggtattatctcaaacttaggaaaagtgaataaagtcatctttagaaactgctttttttaaaccttgtaacttgcaagctaagtgaaaatgggctcatgtatgagaatgttcgtgttagacattttttgtgttagacaaaaactagaaacaaaccaaatccccatcaacagaatatattagaatatattgatacaatagaatattacatcataattttttttaaaaacattactgatacatacaaccacgtatatgaatctcacaaacataatgctgactgaaagaagtcaaacagaaatgagtacattctgtgtgatttcatttatatgatgccccaaaccaggaggaaataatctatggtgataaaagtgagagagtggttggttatctttggagggtatcagcagggagggggcatgagggaacctgctggggacctgaaaatacgtggagctgggtggtggctacatacagatggaaaaattcatcagctgtacacttaagaggtgtccacctcatacctaagttacatatcaataaaaaggaaaaaaattttggaaactttttttttttttttttgagacagagtcttgctctgtcccccaggctggaatacagtggtgcgatcttgactcactgcagcctccgcctcccaggttcaaataattctccagcctcagcctcccgagtagctgggactgcagatgcgcaccagcacgcctggctaatttttgtatttattatagagatggggtttcaccatgttggccagctggtctcaaactcctgacctcaagtaatccgcccacctcagactcccaaagtgccaggattacaggtgtgagccactgcaccaggcctggaacaattttaaaataatgtattggctctgcaaatgcagcttcagaacaagtcccttagctgtccccaccccaccctaagtcaccacccttaagcctcacccatgtggaattctgaaacttcctttgtagaaaactttggaaggtgtctgccacattgatcctggaatgtgtgtttatttggggttatataaatctgttctgtggaagccacctgaagtcaggaagagatggagggcatccttcaggagtgagatgagacctcatcatacttgactgtccagcatcatctctgagtaaggggaccaaaaaatttatcttccaaactaggacactttcaagagtggaagggggatccattaatattttcacctggacaagaggcaaacaccagaatgtccccgatgaaggggatatataatggaccttcttgatgtgaaacctgccagatgggctggaaagtccgtatactgggacaagtatgatttgagttgtttgggacaaggacaggggtacaagagaaggaaatgggcaaagagagaagcctgtactcagccaagggtgcagagatgttatatatgattgctcttcagggaaccgggcctccagctcacaccccagctgctcaaccacctcctctctgaattgactgtcccttctttggaactctaggcctgaccccactccctggccctcccagcccacgattcccctgacccgactccctttcccagaactcagtcgcctgaacccccagcctgtggttctctcctaggcctcagcctttcctgcctttgactgaaacagcagtatcttctaagccctgggggcttccccgggccccagccccgacctagaacccgcccgctgcctgccacgctgccactgccgcttcctctataaagggacctgagcgtccgggcccaggggctccgcacagcaggtgaggctctcctgccccatctccttgggctgcccgtgcttcgtgctttggactaccgcccagcagtgtcctgccctctgcctgggcctcggtccctcctgcacctgctgcctggatccccggcctgcctgggcctgggccttggtgggtttggttttggtttccttctctgtctctgactctccatctgtcagtctcattgtctctgtcaca

SEQ ID NO: 35795 - DNA, 2300 bp, Homo sapien
atgaggtccagctcttctcctcccagtaccccttccatgtgcctctcctcagctcccagaagatggtgtatccagggctgcaggaaccctggctgcactcgatgtaccacggggctgcgttccagctcacccagggagaccagctatccacccacacagatggcatcccccacctagtcctcagccctagtactgtcttctttggagccttcgctctgtagaacttggaaaaatccagaaagaaaaaataattgatttcaagaccttctccccattctgcctccattctgaccatttcaggggtcgtcaccacctctcctttggccattccaacagctcaagtcttccctgatcaagtcaccggagctttcaaagaaggaattctaggcatcccaggggaccacacctccctgaaccatccctgatgtctgtctggctgaggatttcaagcctgcctaggaattcccagcccaaagctgttggtctgtcccaccagctaggtggggcctagatccacacacagaggaagagcaggcacatggaggagcttgggggatgactagaggcagggaggggactatttatgaaggcaaaaaaattaaattatttatttatggaggatggagagaggggaataatagaagaacatccaaggagaaacagagacaggcccaagagatgaagagtgagagggcatgcgcacaaggctgaccaagagagaaagaagtaggcatgagggatcacagggccccagaaggcagggaaaggctctgaaagccagctgccgaccagagccccacacggaggcatctgcaccctcgatgaagcccaataaacctcttttctctgaaatgctgtctgcttgtgtgtgtgtgtctgggagtgagaacttcccagtctatctaaggaatggagggagggacagagggctcaaagggagcaagagctgtggggagaacaaaaggataagggctcagagagcttcagggatatgtgatggactcaccaggtgaggccgccagactgctgcaggggaagcaaaggagaagctgagaagatgaaggaaaagtcagggtctggaggggcgggggtcagggagctcctgggagatatggccacatgtagcggctctgaggaatgggttacaggagacctctggggagatgtgaccacagcaatgggtaggagaatgtccagggctatggaagtcgagtatggggacccccccttaacgaagacagggccatgtagagggccccagggagtgaaagagcctccaggacctccaggtatggaatacaggggacgtttaagaagatatggccacacactggggccctgagaagtgagagcttcatgaaaaaaatcagggaccccagagttccttggaagccaagactgaaaccagcattatgagtctccgggtcagaatgaaagaagaaggcctgccccagtggggtctgtgaattcccgggggtgatttcactccccggggctgtcccaggcttgtccctgctacccccacccagcctttcctgaggcctcaagcctgccaccaagcccccagctccttctccccgcagggacccaaacacaggcctcaggactcaacacagcttttccctccaaccccgttttctctccctcaaggactcagctttctgaagcccctcccagttctagttctatctttttcctgcatcctgtctggaagttagaaggaaacagaccacagacctggtccccaaaagaaatggaggcaataggttttgaggggcatggggacggggttcagcctccagggtcctacacacaaatcagtcagtggcccagaagacccccctcggaatcggagcagggaggatggggagtgtgaggggtatccttgatgcttgtgtgtccccaactttccaaatccccgcccccgcgatggagaagaaaccgagacagaaggtgcagggcccactaccgcttcctccagatgagctcatgggtttctccaccaaggaagttttccgctggttgaatgattctttccccgccctcctctcgccccagggacatataaaggcagttgttggcacacccagccagcagacgctccctcagcaaggacagcagaggaccagctaagagggagagaagcaactacagaccccccctgaaaacaaccctcagacgccacatcccctgacaagctgccaggcaggttctcttcctctcacatactgacccacggctccaccctctctcccctggaaaggacaccatgagcactgaaagcatgatccgggacgtgg

SEQ ID NO: 35796 - DNA, 2300 bp, Homo sapien
gaactgccggacgtggtggcatgcacctgtaatcctaccactttgcaaggccaaggtgagaggatcgcttgaacccaggagttccagagcaacctgggcaacatagtgagatcctgtctctattttttaaaaaagaatgaaacataggaataagatgtgggtgaaggactcacatgccggcttggtcccactggtctttgtggtgaaggaggggagaggtgagaggtgggtaatccggaaagagaaaagcaccccctccctggatgaaggctcttctggagagagtcaaagacaaataagggtggggcgcagtggctcatgcctgttatcccaacactttgggaggctgaggtgggaggaccacttgagcccactagttcaagaccagcctgtgcaacatagcaagaccttgtttctagaaaaaaaattaaagattagtcaggtgtagtggtgcatgcctgtaatcctagctcctcaggaggctgaggcaggaggatcactcaagcccaggagtttgaggttacagtaagctatgatcatgccactgtacccccgtctgggtgacagaacgagaccctgtctcaaaaaaataataattccaaaaacaaatatggagacggaaattgagcccccctagactgggagcccccactgagttcggaaattaggctttacctccagccctggggtgccaggcaggagaaaaccatgtggtaggctgagggggtagggtgacccattggggtgacctagatagggccttgggtcaccctctgcctcctccagcctgtggctgaaagtcagccatgaagtaatgggggacactgttactcatcccagaagcacccacacttactcacttttgggaagggggacctaaagtgtgaaaaaaaggtgaggattttccgtctcaccctaaatgggacaccctaagtggggcatcggtttttcctcctccccagaacttcctggtgttttcaggcaccacaggctccttcctgccatccccatctctctctaatattctccccttctttctccttcagcctcctcccttcagaccccatgagccttgaattaagctccttggaggagaagagttgactgtcgggtaggagacagagaggccttcaggcagctctagggggagaagtgcggggcccctccaggcttcattcctctgtcatgataggggcttactctgctgctgggcctttctgagtggtgcttgctgggctctgtaatgacccctctcactgttggggggtacccaagagaaaagagtatggtgcagagtctggttgggaccatgtggccctgaaaatcaggatgcctagagaagcttcggagtttgagaagtcccccttcctcccaccctccaactgggctaatggtggggcctggccattcagaggcagggagggggtgggacaggcagaccatcatccctaggagcaaaggccatacactgtgttgtgatgaattgtttcaagcaaccagaagagtactgagaatatttaacccgcacccgtgcacccaccctgaattaagacgtgtgtcgcaactcagcatctttatcggcagcactgaagctttccattctttattttcatcaggttcaaaatcaatttccaaacagtctcctacatttttcccactgccatggggtcctgggcgtccgggcccccaatattcacgcactcgcaccacgcactcatattccctcaccccaccatcacggccccaaagaaggtcttccctctcgcgaagtccaccatatcggggtgactgatgttgacgtacaccctctcgcccctccggagctgcaccaggccgccgaaccccacgctcgtgtaccagagaggcccgtacccttgtctcctggccgggtccagcactggagtcaccgtctcggcgccctcgagcagcagctcgggagtgcccggcccgtaggcgccccccgcccggtacagagagctgcgcagcgtgaccgagcggccctgggggtccccgccgccagggggcgcccggccccggtagccgacgagacagtagaggtaatagaggccgtcctgcgggagcgccagcccctcggcgtccgagaactgcgtcccgctcgtcagaaacgcctgttccttcgtcgtctcccagcctagcccctgccccttcagcggagcgcctgcggagacacgggccgacgcgctcttgggaatgcgatcctaaaggcttgggacttctggggaagtggcggcttttagcccctgcgggagccgagccgggccgggggaggagggatggtg

SEQ ID NO: 35797 - DNA, 2300 bp, Homo sapien
tgggattataggtgtgagccatctcgcctggcctaatactgttttgtttgtttgtttttgtttttaagacagagtcttgttcttgtcacccaggctggagtgcaatggcatgatttcggctcactgcaacttccgcctcctgggttcaagtgattctcctgcctcagcctcccaagtagctggaattaaaggtgcctaccaccacgccccgctaatttttatatttttagtagagatggggtttcaccatgttgatcaggctgctctcgagctccttacctcagatgatccaccttccttggcctcccaaagtgctggtattataggcaagagccactgcgcccagccccagtattcagtttttaaactgtcttgttatcaaggctctggagccagatgcctgggttcaaattctggttctgccactgactctgtgagctccataagtttcttaacctctctgtacctcagtttcctcttagggtttttgtcaggattataattattggctgggcatgatggctcatgcttgtaatcccagcactttaggaggccaacacgggcagatcacgtgagtccaggagtttgagcccagcctgggcaatgtggcaaaaatccatctctacaaaaaatgcaaaaattagctgggcatggtggcatgtgcctatagtcccagctattcaggaggctgaggtaggtgaatccatagatcctgggaggtcaaggctgcagtgagccatgatcctgccattgcattccagtctgggtgacatagcgagaccctgtctcaaaaaaaaaaattattaaagtgtgtaaatcagtggcataaacatgttaagtgcattttgtgggtcagctatattattattagtattacggaaacacatagagatgttaccaagaaggggagatgattggagccacttccagcttccttggacctggtctttcttcccttgactctttttttttttttttttttttttttgagagagagagtctcagcctgttgcccaggctggagtgcaatggtgcaatcttggctcactgcaacctctgcctcccaggtttaagtgattctcctgcctcagcctcctgtgtagctggaattacaggcgcgtgccaccacgcccggctaactttttgtatctttagtagagacagggtttcaccatgttggccaggctggtctcgaactcctgacctcaagtgatccacctgcctcagcctcccaaagtgttgggattacaggtgtaagccactaccccggctactcccttgactcttaaccactcatgctgcctacatctaccattcatgtggtccttgctgctttgttttggttattcctgcatttatttgtccttttattcatttatgtataaacatttagtaagcacctactaatggatagggctcattgtagacttggaagctctctgagggtgggagtatgcctcgtccatctgtctttactttttgtagcaagggaggtaaagctccatttccatccctccttagtgagtcagtagtcagtggtgaggctaaggcttacctctccctttctcactcagcacagggggctggagatgagcaagggaacgggaggaggtcagcccagtatgggaatcagttcttctcagggaacccagacatccatccctcaagattccagtccttgtcctagtccggcccttgacctcagagacgggatcagctcttcctccagcacctaccttgagggtatagaagaatgcaaaccacattggaaacctggagatctgtgttctcatttcagctctgctgactggcttcctgcaagctaccttccctccctgggcctcagtttctctctctgctgagccagaagatgtctaaagacccctttggttccaccctgagagcctgtctccctaacctcaacttcttccccagttcagagaacccaggcatccagctgccccaccccagctctgggtaaacaggaagctgggtgaggggagcaggggtgtgcggaaagtcccagccaggtgtgcaggtctacagggagggggtgggcccgtccctgaggtatgaaagccccctgctctggctctggttcagtctcaatgggggcactggggctggagggcaggggtgggaggctccaggggaggggttccctcctgctagctgtggcaggagccacttctctggtgaccttgttgctggcggtgcctatcactgtcctggctgtgctggccttagtgccccaggatcagggaggactggtgagtggctgcaacaggccctggtggaga

SEQ ID NO: 35798 - DNA, 2300 bp, Homo sapien
gagtcagtggcagaaccagaatttgaacccaggcatctggctccagagccttgataacaagacagtttaaaaactgaatactggggctgggcgcagtggctcttgcctataataccagcactttgggaggccaaggaaggtggatcatctgaggtaaggagctcgagagcagcctgatcaacatggtgaaaccccatctctactaaaaatataaaaattagcggggcgtggtggtaggcacctttaattccagctacttgggaggctgaggcaggagaatcacttgaacccaggaggcggaagttgcagtgagccgaaatcatgccattgcactccagcctgggtgacaagaacaagactctgtcttaaaaacaaaaacaaacaaacaaaacagtattaggccaggcgagatggctcacacctataatcccagcactttaggagaccaaggcaggtggatcacttgaggtcaagagtttgagaccagcctggccaacatggtgaaaccccttctccattaaaaatacaaaaattagctggatatggtggcacaaacctgtagtcccagctacttgggaggctgagacaggagaatcgcttgtacccagaaggcagaggttgcagtgagccaagatcacaccactggactccagcctgggcaacagagcaagactccgtctcaaaaaaaaaaaagagtactgacttgagatttgtatgtaaaatttgccttcctcaggccagaaaagaaatggggaaataaatactgaactccagtcaatgttaagcttctgaagggtttagatgtaaaatgtactgatatttgtaattttaaaagatatttaaaagtgagatggattgataaatatgtgataaagcaaataaaaaatgttaatagagccaggtgcagtggcccactcctgtaattccagcactttggaaggctaaggtggaaagattgcttgagaccaggagttcaaaatcagcctgggcaacatagtaagaccccatttctacaaagcctcatgtggtagctggtgtctgtagtcctagctactcagaaggctaaggtgggaggacctctgagcccaggaattcaaggctgcagtgagctatgatttcaccactgcacttcaggctgagtgacagagtgagaccccatctcaaaaacaaaacaaaacaaaaaatgttaatagtagcatctaggtggtaagaatatgttcactgtacaattattctcatttcaccctatgtttgcactttttaataataaaatgtaaaaaaaacaaaacaaacaaacaaaaaaccctgaatattattcagcatggggaacatggaggatggggagaagggtgggggaggaagtagaaggttcttgaatttggaaggggaaacgcaaattaatatggacccacccaggcaccacatctcctcctcaccccttgccttacaggcgctccccagtcttcaccctcctcaaggagtgggtgtgcaatcctccagcacccatctccttctccatcacagtgccactaagaagccttcacccaggtctctccagagagcctcaggccgctgcctttacttagttctgtgttcaatgccagaatgctgcctcctacaggaagtccacctgtattgcccacacctcctttcctgtcaccaacttgtcaccaactttctgtccttgatctatccacagggctcatgtagatctagtatggctgcctttaactctcatgtttgttaatcagacagccaagcagcctgctgcatagagctgcagaacaccaagtgggtcaccagaacaccaaatatgccagagctcccagtctgaactggagcagggtacatgtgtccacagacatatgccaagatcaagaggtctcaacagatgcagtgtaagaggtaatagagaagagttaatcaaggaagacacctgaaggtggtgggtgtttgctgactagtggcaggatcagtgaaatgactggagctgaggcagattatggccctagctacaggcccagaagtttgaaaagaaagatgttgtaaccctaaccctggagccgaacttcctctcctaacaatgctggggaggaacccaggctgggggagaagttaaagccagaggaggggcaggaatgtctgaggtggcaacacttctcttcagccagacagcactggccagtttggagtctgtccatcctgcaggccacaagctctgggtaagctgggaatgggcagggaccttggtggaaggatggtcacaccccagagtggggtgaagctaagatgaggggagg

SEQ ID NO: 35799 - DNA, 2300 bp, Homo sapien
accccttctccattaaaaatacaaaaattagctggatatggtggcacaaacctgtagtcccagctacttgggaggctgagacaggagaatcgcttgtacccagaaggcagaggttgcagtgagccaagatcacaccactggactccagcctgggcaacagagcaagactccgtctcaaaaaaaaaaaagagtactgacttgagatttgtatgtaaaatttgccttcctcaggccagaaaagaaatggggaaataaatactgaactccagtcaatgttaagcttctgaagggtttagatgtaaaatgtactgatatttgtaattttaaaagatatttaaaagtgagatggattgataaatatgtgataaagcaaataaaaaatgttaatagagccaggtgcagtggcccactcctgtaattccagcactttggaaggctaaggtggaaagattgcttgagaccaggagttcaaaatcagcctgggcaacatagtaagaccccatttctacaaagcctcatgtggtagctggtgtctgtagtcctagctactcagaaggctaaggtgggaggacctctgagcccaggaattcaaggctgcagtgagctatgatttcaccactgcacttcaggctgagtgacagagtgagaccccatctcaaaaacaaaacaaaacaaaaaatgttaatagtagcatctaggtggtaagaatatgttcactgtacaattattctcatttcaccctatgtttgcactttttaataataaaatgtaaaaaaaacaaaacaaacaaacaaaaaaccctgaatattattcagcatggggaacatggaggatggggagaagggtgggggaggaagtagaaggttcttgaatttggaaggggaaacgcaaattaatatggacccacccaggcaccacatctcctcctcaccccttgccttacaggcgctccccagtcttcaccctcctcaaggagtgggtgtgcaatcctccagcacccatctccttctccatcacagtgccactaagaagccttcacccaggtctctccagagagcctcaggccgctgcctttacttagttctgtgttcaatgccagaatgctgcctcctacaggaagtccacctgtattgcccacacctcctttcctgtcaccaacttgtcaccaactttctgtccttgatctatccacagggctcatgtagatctagtatggctgcctttaactctcatgtttgttaatcagacagccaagcagcctgctgcatagagctgcagaacaccaagtgggtcaccagaacaccaaatatgccagagctcccagtctgaactggagcagggtacatgtgtccacagacatatgccaagatcaagaggtctcaacagatgcagtgtaagaggtaatagagaagagttaatcaaggaagacacctgaaggtggtgggtgtttgctgactagtggcaggatcagtgaaatgactggagctgaggcagattatggccctagctacaggcccagaagtttgaaaagaaagatgttgtaaccctaaccctggagccgaacttcctctcctaacaatgctggggaggaacccaggctgggggagaagttaaagccagaggaggggcaggaatgtctgaggtggcaacacttctcttcagccagacagcactggccagtttggagtctgtccatcctgcaggccacaagctctgggtaagctgggaatgggcagggaccttggtggaaggatggtcacaccccagagtggggtgaagctaagatgaggggagggagagtatgggtttgagtttccctgggccgtcgaggaatcctctgagtctctgctccccaaagaaattaaagacaattcatttctgtgcccacggcccttatggcctccacctgcacttctgctccccaccccccagaattcctcttaaacccagaagggtcccagtttccagaccctagtcagtatatctggctctggggtgaagagaacggccccctcttcaccctcaaacaggaaccagtggttggaggggaggaagtgcctgaggggaagttatggggccccagatactcctccatgccccacttcagccctagcagcatctgcctgtgggaagcagctctccacaccagccaagggggcccccacactcccgcgctgctctgcggctcagggagcagcccacctgctgggtgtgctgatatcaccctcccttcttccccccagtgcccacacccacccaggcccaggctccttcccctccatcatccccttaccagcacc

SEQ ID NO: 35800 - DNA, 2300 bp, Homo sapien
ctgggcaacagagcaagactccgtctcaaaaaaaaaaaagagtactgacttgagatttgtatgtaaaatttgccttcctcaggccagaaaagaaatggggaaataaatactgaactccagtcaatgttaagcttctgaagggtttagatgtaaaatgtactgatatttgtaattttaaaagatatttaaaagtgagatggattgataaatatgtgataaagcaaataaaaaatgttaatagagccaggtgcagtggcccactcctgtaattccagcactttggaaggctaaggtggaaagattgcttgagaccaggagttcaaaatcagcctgggcaacatagtaagaccccatttctacaaagcctcatgtggtagctggtgtctgtagtcctagctactcagaaggctaaggtgggaggacctctgagcccaggaattcaaggctgcagtgagctatgatttcaccactgcacttcaggctgagtgacagagtgagaccccatctcaaaaacaaaacaaaacaaaaaatgttaatagtagcatctaggtggtaagaatatgttcactgtacaattattctcatttcaccctatgtttgcactttttaataataaaatgtaaaaaaaacaaaacaaacaaacaaaaaaccctgaatattattcagcatggggaacatggaggatggggagaagggtgggggaggaagtagaaggttcttgaatttggaaggggaaacgcaaattaatatggacccacccaggcaccacatctcctcctcaccccttgccttacaggcgctccccagtcttcaccctcctcaaggagtgggtgtgcaatcctccagcacccatctccttctccatcacagtgccactaagaagccttcacccaggtctctccagagagcctcaggccgctgcctttacttagttctgtgttcaatgccagaatgctgcctcctacaggaagtccacctgtattgcccacacctcctttcctgtcaccaacttgtcaccaactttctgtccttgatctatccacagggctcatgtagatctagtatggctgcctttaactctcatgtttgttaatcagacagccaagcagcctgctgcatagagctgcagaacaccaagtgggtcaccagaacaccaaatatgccagagctcccagtctgaactggagcagggtacatgtgtccacagacatatgccaagatcaagaggtctcaacagatgcagtgtaagaggtaatagagaagagttaatcaaggaagacacctgaaggtggtgggtgtttgctgactagtggcaggatcagtgaaatgactggagctgaggcagattatggccctagctacaggcccagaagtttgaaaagaaagatgttgtaaccctaaccctggagccgaacttcctctcctaacaatgctggggaggaacccaggctgggggagaagttaaagccagaggaggggcaggaatgtctgaggtggcaacacttctcttcagccagacagcactggccagtttggagtctgtccatcctgcaggccacaagctctgggtaagctgggaatgggcagggaccttggtggaaggatggtcacaccccagagtggggtgaagctaagatgaggggagggagagtatgggtttgagtttccctgggccgtcgaggaatcctctgagtctctgctccccaaagaaattaaagacaattcatttctgtgcccacggcccttatggcctccacctgcacttctgctccccaccccccagaattcctcttaaacccagaagggtcccagtttccagaccctagtcagtatatctggctctggggtgaagagaacggccccctcttcaccctcaaacaggaaccagtggttggaggggaggaagtgcctgaggggaagttatggggccccagatactcctccatgccccacttcagccctagcagcatctgcctgtgggaagcagctctccacaccagccaagggggcccccacactcccgcgctgctctgcggctcagggagcagcccacctgctgggtgtgctgatatcaccctcccttcttccccccagtgcccacacccacccaggcccaggctccttcccctccatcatccccttaccagcacctagaaccatccagggctgaaaagtcccctccaaaccacgtggtcagcccagggcagaggaaagggctgggctctggagttgggcagagctggccttaaaccccagctccacctttctgggatgggtgacctagtaaagtccaggcttga

SEQ ID NO: 35801 - DNA, 2300 bp, Homo sapien
tgccaccacacccagctaattttttgtatttttagtagagatggggtttcaccgtgttagccaggatggtctcgatctcctgaactcgtgatccgcccgcctcagcctcccaaagtgctgggattacaggcatgagccaccatgcctggcctggcctccaactctttaactcaagtgatctgccctcctgggcttcccaaagtactgggattacaggtgtgacccaccatacctagccaaaattatttttttttaaactccatttactactattcccaatttaaattgtattttatttagagacaaggtctccctccattgctcaggctgaaatgcagtggcaaaatcatagctcactgcatccttgaaactcctgggctcaaggaatcctccttcctcaacttcctgagtagctggtactataggtgtgtgccactatgtccagctaagtttaaatttttttgtagagacagggtcttgccatgttgcccaggctggtctcaaacccctggcctcaagccgtcctctcaccttggcctcccaaagtgctgggattacaagtgtaagccactatgccccgctggtttactgaatattttaagcctactgttgaggtctactgctccgaaaaacaagatttctttaaaatgattactgctcattgacaatgtacatagttatccaagagctctgatggagatgtccaaagagacgaatgttgttttctttttctttttttttttttttgagacggagtttcgctcttgttgcccaggctggagtgcaatggtgcgatatcagctcactgcaacttccgcctcctgggttcaagtgattctcctgcctcagcctcccgagtagctgggattacaggtgcgccccaccacacccggctaattttgtatttttagtagagacggggtttctctatgttgatcagactggtctcggactcctgacctcaggtgatcctcccacctcagcctcccaaagtgctgggattacaggcatgagccaccacgcccagctgaatgttgttttcctgcctgctaacataacatccatcctgtagtccatggtttaaggagtaatttagactttcaagtctcattatttaagaaatacatttcgccaggcatggtgactcatgcactttgggaggcctaagtggatggattgtttgagcccaggagttggataccggcctgggcaacacagggagaccccatctctacaaaaaatacaaaaattagcctggtgtggtggtgtgcgcctgcagtcccagctactcaggagactgaagtgggaggatcaactgagccctggaggttgaggctgcagtgagccgtgatggcgccactgaactccagcctgggtgagacagagccagaccctgtctcaaaaaaccaaaacaggaatcccagcactttgggagggcgaggctggtggatcacttgagatcaggagttggagaccagcctggccaacatggtaaaaccctgtctctacaaaaaatacaaaatttagctgggcttggtgatgtgcgcctgtaatcccagctacttgggaggctgaggcaagagaattgcttgaacccaggaggcagaggttgcagtgagccgagattgtgccactgcattccagcctgggcaacagagtgagactccagctcaaaaaaaaaacaaaaaacaaaaaaacccaaccaaacacacacacacacacacacacacacacacacacacacacacacacacacacaaggtgattgctatgcaaattaaatatagcttcaccaatcagcttgcttctcctaatccctcatagaaatcttggagtagccctggggtgcagtgaggccagattccaggaagggaatgggtgggatgggtctgggtactggtgagcagcagggagggtaagtaggttagcttctgggccaaggagggctcctggaggcttgttctgggtaaaagctggtctccttgaacctcggaaggtgggggaacccacatcctggtctcacccgcccaaccgcccactcacccttgggttagcagccatctaagccccaccctccccctcacacgcttagctagcctgccacaagctggccccttggcctcctagagaccctgacatctcctccagcagcatctgtcctctctcctcagggaggcaagcatttgatgctcgaggtccctggcagttgtggtccttggcaagtgatgtgtgagtcccgtgtgtcataggaagctccccatccccatctggtgaccaaaggcctggctacaagtagtgag

SEQ ID NO: 35802 - DNA, 2300 bp, Homo sapien
gggcgacagagtgagactccgtttaaaaaaaaaacaaaaaacaaaaaacaaaaaactggggaccattggcaataatactcctatgtcccctcttccctactttgttttcctccataggcacctggcgccttttttttttttttttttttttttttgagacggagtctcactctgttgcccaggctggagtgcaatggcgcgatctcagctcactgcaacctctgcctcccgggtttaagcgattcgcctgcgtcagcctcctgagcagctgggattacaggcacgcaccaccaggccctgctaatttttgtatttttagtagagatggggtttcaccatgttggtcaggctggtctccaactcctgaccttgtgatccgcctgccccagcctcccaaagtgctgtgattacaggcgtgagccactgcgcctggccacctagcacctttaatatacttatttatttgtattgtctgccttccccaattagatcaaccatgaagacaagagttttcatttgttgggttctctgggcctagaggcatgtctggcatatagtaagcattcagtaaatatctgttgagtgaacgtatgaataaagaagtgagttcctcccagcaggcactgagaacattgggagtacagggttgcagctctctctgcagcaggagaatgtagctgcaataaagggaagtcaagaagccagagtccagccaggtgcagtggctcatgcctgtaatcccagcactttgggaggctgaggtgggtggatcacaaggtcaagagatagagaccatcctggccaacatggcgaaaccccatctgtactaaaaatacaaaaattagctgggcgtggtggtgggcgcctgtagtcccagctactcaggaggctgaggtaggagaattgcttgaacccaggaggcagtggttgcagtgagccgagattgcaccattgcactcccgcctgggcgacagagcaagactccgactcaaaaaaaaaaaaaaaagcagcagcagcagccagaggccactccagcatctcccctacctggcttgggtcagggagagggcagtgagaagtgaaaactcccagctacagaaaaggaaatatgttggggggaagggagaaggaaaggtgtcttcatcaatgccggggcagggtagatggagccctgggcagggagtttggaccaggaaatctcaatgagggaaatgtgctgtcctcacctctccaagaagcgactggccaaacagagtgacagaggggataaaggttatgcctagggaggcatgtgtcagaggctatcatccactctgttgaacccacagtgaccagcaccaccatcacacaaacatgcctgcatgtgtgcacgcacgtgcagtgtgcaaacctgatgtcagcctcactccctggctcttctgtccacaaacgctgtttctttaagtaccactttcagttcctccaaagaatctacttaaactcttaaattcctgatctctatagattttactaaagatttcaaaggagataagatgagagggttacgttgcacattctaaagcaaacaaattaaaatgttttgttagacatttccatatttttaagggcctccttggagctgccaggctgggagtgaggtttctctccctttctaaaccctgtgcccatcttgtcaccctcctggagctgccagcagacttcagattcttctccgatctacagagcagaaaaattcagccagcccttccttgtcttcctatccacagctgcctgcccagactcatgaaacctgacaaaatgcaaggtcttatcattacctgaaccttggacctgttcaaaaatactagttcctgagaataaatatccctggtgtcttcctgcccttcctgcacacctccagtggcttatcaaaatatttgtttcatgcgcacactgggctctcatttaagaggaatttgggagaatgttattttctaatctgcatttcacaccaggctccccctccttcctggggtgctagtgtcagcagaacctgatggggaagtgaggtctgggaggcagaggaggaaggaatgaggggaaaggggaagtttgggaggaaggcttctgagaagactggtgggagagaaggagagcctgcagacagaggcctccagcttggtctgtctccccacctctaccagcatctgctgagctatgagccaaaccagggatttacagggtagggagggtgggataggcagcggcattagatcggaggaatgagatggacagacctgggctgtgggctaggagggcag

SEQ ID NO: 35803 - DNA, 2300 bp, Homo sapien
tcaagagatagagaccatcctggccaacatggcgaaaccccatctgtactaaaaatacaaaaattagctgggcgtggtggtgggcgcctgtagtcccagctactcaggaggctgaggtaggagaattgcttgaacccaggaggcagtggttgcagtgagccgagattgcaccattgcactcccgcctgggcgacagagcaagactccgactcaaaaaaaaaaaaaaaagcagcagcagcagccagaggccactccagcatctcccctacctggcttgggtcagggagagggcagtgagaagtgaaaactcccagctacagaaaaggaaatatgttggggggaagggagaaggaaaggtgtcttcatcaatgccggggcagggtagatggagccctgggcagggagtttggaccaggaaatctcaatgagggaaatgtgctgtcctcacctctccaagaagcgactggccaaacagagtgacagaggggataaaggttatgcctagggaggcatgtgtcagaggctatcatccactctgttgaacccacagtgaccagcaccaccatcacacaaacatgcctgcatgtgtgcacgcacgtgcagtgtgcaaacctgatgtcagcctcactccctggctcttctgtccacaaacgctgtttctttaagtaccactttcagttcctccaaagaatctacttaaactcttaaattcctgatctctatagattttactaaagatttcaaaggagataagatgagagggttacgttgcacattctaaagcaaacaaattaaaatgttttgttagacatttccatatttttaagggcctccttggagctgccaggctgggagtgaggtttctctccctttctaaaccctgtgcccatcttgtcaccctcctggagctgccagcagacttcagattcttctccgatctacagagcagaaaaattcagccagcccttccttgtcttcctatccacagctgcctgcccagactcatgaaacctgacaaaatgcaaggtcttatcattacctgaaccttggacctgttcaaaaatactagttcctgagaataaatatccctggtgtcttcctgcccttcctgcacacctccagtggcttatcaaaatatttgtttcatgcgcacactgggctctcatttaagaggaatttgggagaatgttattttctaatctgcatttcacaccaggctccccctccttcctggggtgctagtgtcagcagaacctgatggggaagtgaggtctgggaggcagaggaggaaggaatgaggggaaaggggaagtttgggaggaaggcttctgagaagactggtgggagagaaggagagcctgcagacagaggcctccagcttggtctgtctccccacctctaccagcatctgctgagctatgagccaaaccagggatttacagggtagggagggtgggataggcagcggcattagatcggaggaatgagatggacagacctgggctgtgggctaggagggcagtcagctggcctagggtagcccgggctggtgtcagggtaaggagaggaagggagggatgagggctgattaatttttttcaccccacaggaggaaaagctttcggactgctgaaggcccagcaggaagagaggctggatgagatcaacaaggtagaaggaagaactaagggggcagagccagggggatggggcgtggatggggagggcctaccctggctcttattttcccctccatagcaattcctagacgatcccaaatatagcagtgatgaggatctgccctccaaactggaaggcttcaaaggtgagggggaaactgtaggcggtggagacagggctgggggtaggagggttaggatttccacaagaacaaggcaggaacagcagagataaaaagtttacttttgtggtagcaaaaggggaacctgcctttattgccctcctgccacactgcggtccctttcccgggcctgcctctctcagcatcccctctagctccttacaccctagcggggcccctcaactccccaaccccacttcctctgcctgcccctcctcctccttccacgttgtctcctccacctagcagttggttggcaaccccttcctcagtcccctgctgaaaaccctccagtcagcgcttatcccttctgctctctcccctcacccagagaaatacatggagtttgaccttaatggaaatggcgatattggtgagaaacgggtgatttgcgggggcagggtggtgtgcaggcctaagaagacagaggtctctccta

SEQ ID NO: 35804 - DNA, 2300 bp, Homo sapien
ggcgtgagccactgctcccgctcccggccctttttttcttctttttcttttttttttttttttgagacgtagtctcactctgtcgctaggctggagtgcagtggcgtgatctcagctcactgcaacctccgtctcccaggttcaagcgattctcctgcctcagcctcccaagtagctgagactacaggcacgcgccaccagtccagctaatttttgtatttttagtagagacggggttttgccatgttggccaggatggtctccatttcttgaccttgtgatctgcccgcctcagcctcccaaagtgccaggactacaggcataagccaccacgcccggcctcatatctcttaataagagtttttctagaaacatttctcaatcaccccaggcataatcatattttatttctctacttctttcttttttttttttttttgagatagagtttcgctcttgttgcccaggctggagtgcaatggcacgatcttggctcaccacaacctccgcctcccaggttcaagcgattctcccgactcagcctcccgagtagctgggatcataggcatgcgccaccacgcctgggtaattgtatttttagtagagacggggtttctccatgttggtcaggctggtctcgaactcgtgacctcaggtgatccgcccgcctgagcctcccaaagtgctgggattacaggcgtgagccaccgcgcccatccttcttttttttttttttttttttttttttttgagacgtagtcttgctctgtcacccaggctggagtgcaacctccgcctccctggttcaaggaattctctgcctcagcttcccgagtagttgggattacaggcgcccgccaccacgtagggcaaatttttgtatttttagtagaaatggggtttcatcatgttggccaggctggtcttgaactcctgatctcgtgatccacctgcctaggcctcccaaagtgctgggattacaggcgtgagccaccgcgccaggccttatttctctacttctataatatcctgtgcattatctccagcgccttcaaatcatagtcattgaatgatctgttgaatgggtataactctgatgggagcagagagttctagaatcgggtagtaagagacaaaggagggtaacagtactgcatttcacaaaatgaaacccattgttaagaaattacaaattcccaataatttcaaatataaaaatttattcatgaaaattataggttataaaattaaatgtccgtcttagtcgatggttgcccatattttgatgaacgagtcattcctagcctatctttgttcaaatgatttgcatacattatgcaaataggtagaactgcccgaagaatgcctacgctgcgtggtgcggacgaaacgcttcccggggcctttggattggtctgtctagccacctcatttgcatgacgtaatataataactggaaggccccgcccctctggtgcatttccccgctccaaccacctcctcaaactcacggcaaagggatgcgagagctggaactcttaccaggcctgcggaaactcagccctccggcagctaatcccgcccgccagcccccgtcctctctctctttctccctagctgaaggcgccacgggccgtgtgtcgttgccttccacttttggcgtcccaacgtctctccgctcccatctttctactaacgtccgacgcacgctccgcctctttctcccacattcgtcgtgtaaattctgcgtcccaaccgcccagccgacctgcaccgcattcccgccccctcaacacggctcaacggccgacgctgggggcccgcctccttagccaatcggggtcctagtgcccttaagtccctcctctttatgcaaataacctccgcatgctccgcgcgcccggcccttttttttttttttttaaactaaagacagccctggaagtagagggttagggtagaaagtgccccgccctttatgcaaattaaggggcgtgtctaggcgcggagggaggtgggaggtgggagggggtgctcccgggggcggcggttgcccggatgggccgttagtcggggctcagccgcggagtgagcgagggagacgggaggagccgaacccggcgccatccgccgccatcctcccccgccccaccgccatcccgtcccggggagcccctaggcccgggtcccggatccccgcgcacccggccaggtgagtctgggtgaaccgtgcgctgacgcccttttccggcgcgggagaggtggtggcggtggcggtggcggcggcggcggcggtggtg

SEQ ID NO: 35805 - DNA, 2300 bp, Homo sapien
actgcacagctgacggggccagaagcaggccgaaagcctgcccgcggagtcgggagtggaggccagggccccccaccaccacgcagagagagtcgcacagagacccgctggggccctcgtccagggagcagtcgtcgtggaatccctccagaggagccaggggccccaccccgccgggctgggcctataaagaaacctccaccacctacaaaagtagaagagctgcctcccaagcccctcgaacagggggatgaaacccccaaacccccaaagccagacccactcaagataaccaaggggaagctagggggccccaaggagaccccacccaatggaaatctttcccctgccccaaggcttcggagggactattcgtatgaaagagtgggtcctacctcttgccggggtcggggccgaggcgagtattttgccagagggaggggttttcgggggacctatgggggacgagggcggggagcccgaagccgggaattccgcagttaccgagagtttcgaggagatgatgggcgtggaggtgggacagggggaccaaaccaccctcctgctccccgaggccgcactgccagcgagacacggagcgagggttcagagtatgaggaaatccccaagcggcgccggcagcggggctcagaaacaggcagcgagacccatgagagtgatctggctccttcagacaaggaggctcccacacccaaggagggaacactcacccaggtccctctcgctcccccaccaccaggagccccaccttcaccagccccagcccgcttcactgcccggggtgggcgagtcttcactcccagaggggtgccatctcgccggggccgaggaggagggaggccccctcctcaagtttgcccaggctggagccctccagccaagtctctggctcccaagaaacctcccacaggccctttgccaccaagtaaggagcctttgaaagagaagttgatcccagggcctctgtcccctgtggcgcgcggaggcagcaatggaggtagcaatgtgggcatggaagatggggagcgaccccgaaggaggcgacatgggagggctcagcagcaggataaaccgcctcgtttccggaggctgaagcaggaacgggagaatgccgcaagggggtctgagggcaagccctccctaacccttccagcctccgctcctggacctgaggaggccctcacaacagtcacagtggccccagcacctcgccgggcagctgccaagtctcctgatctgtcaaaccagaactcagaccaagccaatgaggaatgggagactgcatcagagagcagtgacttcaccagtgagcgccgaggggacaaagaggcacccccaccagtactgctgacacccaaggctgtgggaactcctgggggaggtggaggtggagccgtaccaggtatttcagccatgtcccgcggagatctgagccagagagccaaggatttgagtaaacggagcttctcaagtcagcggccaggcatggaacggcagaatcggcgccctggcccagggggcaaggctggcagcagtggcagcagcagtggaggaggcggtgggggtcctggaggaaggaccgggccaggacgaggcgacaagaggagctggccctctcccaagaaccgaaggtgggtaggaacaaacaaatttattgtggtttaaaaattggaggagggggaaaaagcctgagggaaagataagtttgggtggagtggagattgtggcctgaggggccatgggctctagaatgtcagtaggatttccatgtctggctaaggcaactggaaagcggttggtagggtgttagagtcaagaacacccacctatgtattcattgctggttctttgctttccagtctgtgcatctgtatgcataggaatccttagaaggactcaaaaacacctggactttaatagggaagagaataggttgtaagcagaagttgggaaacataacttgtgggaaaaagtaacgatttagtggatactggagctaatgctctgttttctccagtcgtcctccagaggagcgtcccccggggcttcccctgcctcccccacctcccagcagttctgctgtcttccgcctggaccaagttatccacagcaaccctgctggcatccaacaggctctggcccagcttagtagccgtcaagggagtgtaactgcaccagggggtcatccaaggcacaagcctgggcttccccaagcccctcagggcccctctcctaggcccccaacccgatacgagccccagagggtcaacagcggcctc

SEQ ID NO: 35806 - DNA, 2300 bp, Homo sapien
atgaagaaagactaagaagataagaaagcaaaaaaggtcccagcacagtggctcacacctgtaatcccagcactttgggaggccgaggcaggtggatcacctgaggtcaggagttcaagaccagcctggccaacacggtaaaaccctgtctctactaaaaatacaaaaattagccgggcgtggtagtaggcgtcgtctgtaatcccagatactcaggaggctgaggcaggaaaattgcttgaacccaggaggcagaggttgcagtgagctgagattgcgccccagccctccatcctgggcaacaagagcaaaactccatctcaaaaaaaaaaaaaaaagcaaaaagagaaatatttttcctaactacaaactgactcttgggaagtaccagagtatttatatacatctaatcacaagtctatatatggctttcttatatccaggtaatatcacattttagaaaaccatggaccaccccacatgcaatttgtctccaagtattacaggagtaaagacacagatagctatgtccaaggctttaagctcaagagactcaagctatgccataaaaattagtaatttcactcaacagtctatcaaggacctatctccattatgggttctgatttctaccctttaagaacacagcatagacctgaccaatgtctatcagtaagacacacttgcttagggttcctgtgctgtttcccttcccaaaggccagagccatgcctgtccctttgggttggggtccacccatgatgatgacacacagattcttccttcctctgtatttccctctgcattaagttctatccatgtggaggacagaacaaaatcagcctcactcacaaaacatcagaaaacgttctactggaatacgaacaaagggatcaataaaaataaaatctgaggccaggtgcggtggctcatgcctgtaataccagcactttgggaggccgaggagggcacatcacctgaggtaaggagttcgagaccagcctgaccaacatggtgaaaccccgtctctactaaaaatacaaaaatcagctgggtatagtggcacacgcctataatcccagctactcaggaggctgagataggaaaatcgcttgaacccaagaggtggaagtttcagtgagtcgagatcgcgccactgcactccagcctggaagacagggcgtgactccatctcaaaaaaaagaaaaaaaaagaaaatctggtgaccagaaaatcaagctcatctctcaggctaaggggcctaaacgaggaaaagctaaaggtgtcttccagaactagtgaggtgtctcacctgggcccccacaataaaggtacgagtttgagagtccaaggtcttcaccaacacctccaagctgtcaggctcctccacagcggtactggtactatcattaggctccatggccgacaggtctctaaagaagaacgaaggaaggaaggcccgctgttgcccagaccagagtgtacccgaaagactccctagcattaatccctgccccaatacctaaaaagtttctcctgcacacacacacattcacacctgtccccatcccccttctgattccggggcacagggagagaaacacaaagggcaggagatcgacggcttagggagctggaggacgagaggtgggaggggctccacgacgccaatcacaataagcagggagccagtcagattaggaaggaagcacgagaccagagactagtgtcatcaccggtcacggcaggacaagcgccccagaggtcggaaaatcctgggacaacgcgaaagcggtggtcgccccacactctgcggagaaagtggtttcgcgcacgcgcgccacgcccatcgaaccctcctaactcactatagacccgaaacggcactcacggggcgacagacctgctagctgactgcccgcgtctactgccttcccacggtgttccagcagaacggcacaactaacccacagccaaacacacacacacacacacacacacacacacacacacacacccaccaccccgcggctccgcccccgacttccccacggaccgtcacttccggtctcccccaaacctgccaccgacggccacttccgtttccccgatagtatttggggatctcgaagcgatacttccggctccccccaggtccccaagctttacttttgtggggcacgacgagaaagtccgcagccccaaacagtgagtttctgagggcgagtcgggccggggccggcctaggtgggagggagccgagcaccccgaggagccgccaccgctgtcgcccgggggac

SEQ ID NO: 35807 - DNA, 2300 bp, Homo sapien
ctggtattaaactcctgagctcaagcagtcggcccaccttagcctcctaaagtgttgggattacaggcatgagccaccacacctagcttgataaatttatatcccatggactgccacaaaaaatttgccgagggctgaggcttgcgatttagttaaaaaacaaacaaaatttgggtgaccagtatattagagtttattaatactgttctattttggtgtaatgtttgaatttttttttttttttttttgagatgggagtctcgttctgttgcccaagctggagtgcagtggcgcgatcttggctcactgcaatctccacctcccgggttcaaagcaattctctgcctcagcctcccaagtagctgggattacaggcgcccgccaccacgccaggctaatttttgtatttttagtagagatggggtttcaccattttggccaggctggtcttgaactcctgacctcgtgatccacccgcctcatcctcccaagtgtgagtcactgcgcccggccgaaaatttttgtaataaaaagctaaaatgtggttaggcacagtagctcacacctataatcccagcactttgggaggccaagtctgcaagaccaggctgggcaacatagcaagaccccatctctataaaaataaaattagccaggtgtggtggtgtgcatctgtggtccctactagggaggctgaggtgggaagatcggttgggctcgggaggcagaggctacagtgagttgtgattgcgccactgcactccagcctgggcgacaaagcgagaccctctctcaaaaaaataagctaaaatgttaacagctttttattggggcagtaaagtacaagtgctcgatctggagtcctgtaggcctggatttgtcaattctgacacttatgttcgtctaagtgtactcacttaaaaaatgttaaaagctcgttaaaaggctttttaaaataatacacaaaacccgtagtatatgggctggcacaagtgctcattaaacagctgcttattagaactcttaactaaaatataaccaggacctgggtataaactacgaatcccagaaaggttggacaccccaacagcgatgtgtctttctggaggactcgcagtttcgcggggccgaggcccttggcccagggcaggttaagagaagagggcacggagaggcggtaatgcctccacccccggccttcggaagcacgctggccggcctttaaattccccacggtcagggtcttgtctttctgtccactcggactccatttgctcccaattctcaaactcggaagcgcctcttttcttgacaagtcgtgcaacttagtagcacgtttacttttcctaaaacgtgtcatgtccccttggccacacaccgacgaatgtgacgcccacagcccttaaaacgcccacccggcagaaccgaaatctagcccaaccaagcaaccgagaacaaaattgaccagtgccgcccccaaacgcctactgaaagagtaacttccggaggcacagaagaaagggcgcagcgagggcaatagggtggagaagagttttagctggctaggacagtgccgcctgaaattatcagcctgccaagatttaaacatagatgaatgtggcataatcccccatctccaaagtccaaggtccatacgaccgtccatagcccctctcgaggcagtggtagagtcccagctggtgactgtttttcaggcatttacggtagccacctcaatcttctagcgctcaagcgcgcgcacagacgtgaacgccgccagaggggggagggggtggggcgatgcttaagtgtccacgcatccgtagtgcgacgcacgcaggcgtagtacggtcccccgggcgacagcggtggcggctcctcggggtgctcggctccctcccacctaggccggccccggcccgactcgccctcagaaactcactgtttggggctgcggactttctcgtcgtgccccacaaaagtaaagcttggggacctggggggagccggaagtatcgcttcgagatccccaaatactatcggggaaacggaagtggccgtcggtggcaggtttgggggagaccggaagtgacggtccgtggggaagtcgggggcggagccgcggggtggtgggtgtgtgtgtgtgtgtgtgtgtgtgtgtgtgtgtgtgtgtttggctgtgggttagttgtgccgttctgctggaacaccgtgggaaggcagtagacgcgggcagtcagctagcaggtctgtcgccccgtgagtgccgtttcgggtctatagtgagttaggagggttcg

SEQ ID NO: 35808 - DNA, 2300 bp, Homo sapien
gtttctggtgggtaataagttctcaaataataggcagtaagaattgccaaataggttgtccttggatagcaccaagtgactggagcagttaatgctgtgagagatggatcttcctcgatagattatttatttacttatttatttttaagacagggtctcactctgtcgcccaggcatgactttgacttccccggctcagatgattcccgagtaggaggtataggtgcacgccatcacgcctagctaattttttgtagacacggagtttcaccatgttgccccaggctggtattaaactcctgagctcaagcagtcggcccaccttagcctcctaaagtgttgggattacaggcatgagccaccacacctagcttgataaatttatatcccatggactgccacaaaaaatttgccgagggctgaggcttgcgatttagttaaaaaacaaacaaaatttgggtgaccagtatattagagtttattaatactgttctattttggtgtaatgtttgaatttttttttttttttttttgagatgggagtctcgttctgttgcccaagctggagtgcagtggcgcgatcttggctcactgcaatctccacctcccgggttcaaagcaattctctgcctcagcctcccaagtagctgggattacaggcgcccgccaccacgccaggctaatttttgtatttttagtagagatggggtttcaccattttggccaggctggtcttgaactcctgacctcgtgatccacccgcctcatcctcccaagtgtgagtcactgcgcccggccgaaaatttttgtaataaaaagctaaaatgtggttaggcacagtagctcacacctataatcccagcactttgggaggccaagtctgcaagaccaggctgggcaacatagcaagaccccatctctataaaaataaaattagccaggtgtggtggtgtgcatctgtggtccctactagggaggctgaggtgggaagatcggttgggctcgggaggcagaggctacagtgagttgtgattgcgccactgcactccagcctgggcgacaaagcgagaccctctctcaaaaaaataagctaaaatgttaacagctttttattggggcagtaaagtacaagtgctcgatctggagtcctgtaggcctggatttgtcaattctgacacttatgttcgtctaagtgtactcacttaaaaaatgttaaaagctcgttaaaaggctttttaaaataatacacaaaacccgtagtatatgggctggcacaagtgctcattaaacagctgcttattagaactcttaactaaaatataaccaggacctgggtataaactacgaatcccagaaaggttggacaccccaacagcgatgtgtctttctggaggactcgcagtttcgcggggccgaggcccttggcccagggcaggttaagagaagagggcacggagaggcggtaatgcctccacccccggccttcggaagcacgctggccggcctttaaattccccacggtcagggtcttgtctttctgtccactcggactccatttgctcccaattctcaaactcggaagcgcctcttttcttgacaagtcgtgcaacttagtagcacgtttacttttcctaaaacgtgtcatgtccccttggccacacaccgacgaatgtgacgcccacagcccttaaaacgcccacccggcagaaccgaaatctagcccaaccaagcaaccgagaacaaaattgaccagtgccgcccccaaacgcctactgaaagagtaacttccggaggcacagaagaaagggcgcagcgagggcaatagggtggagaagagttttagctggctaggacagtgccgcctgaaattatcagcctgccaagatttaaacatagatgaatgtggcataatcccccatctccaaagtccaaggtccatacgaccgtccatagcccctctcgaggcagtggtagagtcccagctggtgactgtttttcaggcatttacggtagccacctcaatcttctagcgctcaagcgcgcgcacagacgtgaacgccgccagaggggggagggggtggggcgatgcttaagtgtccacgcatccgtagtgcgacgcacgcaggcgtagtacggtcccccgggcgacagcggtggcggctcctcggggtgctcggctccctcccacctaggccggccccggcccgactcgccctcagaaactcactgtttggggctgcggactttctcgtcgtgccccacaaaagtaaagcttggggacctggggggagccggaagta

SEQ ID NO: 35809 - DNA, 2300 bp, Homo sapien
acctcagcctccctagtagggaccacagatgcacaccaccacacctggctaattttatttttatagagatggggtcttgctatgttgcccagcctggtcttgcagacttggcctcccaaagtgctgggattataggtgtgagctactgtgcctaaccacattttagctttttattacaaaaattttcggccgggcgcagtgactcacacttgggaggatgaggcgggtggatcacgaggtcaggagttcaagaccagcctggccaaaatggtgaaaccccatctctactaaaaatacaaaaattagcctggcgtggtggcgggcgcctgtaatcccagctacttgggaggctgaggcagagaattgctttgaacccgggaggtggagattgcagtgagccaagatcgcgccactgcactccagcttgggcaacagaacgagactcccatctcaaaaaaaaaaaaaaaaaaattcaaacattacaccaaaatagaacagtattaataaactctaatatactggtcacccaaattttgtttgttttttaactaaatcgcaagcctcagccctcggcaaattttttgtggcagtccatgggatataaatttatcaagctaggtgtggtggctcatgcctgtaatcccaacactttaggaggctaaggtgggccgactgcttgagctcaggagtttaataccagcctggggcaacatggtgaaactccgtgtctacaaaaaattagctaggcgtgatggcgtgcacctatacctcctactcgggaatcatctgagccggggaagtcaaagtcatgcctgggcgacagagtgagaccctgtcttaaaaataaataagtaaataaataatctatcgaggaagatccatctctcacagcattaactgctccagtcacttggtgctatccaaggacaacctatttggcaattcttactgcctattatttgagaacttattacccaccagaaactaagtgctttgcaaacattactattaattatagcaaatatatactttggacttaccatgtgcaagtctttgctaagggctttatgtgcattatttcatttaatcctataagattgatgatttgccaattttacagatgaaaaaacagacatagcagttaggggttggtggtgttttgtttgtttggagacagagtctctgtcgcccaagctggagtgcagtggcacaatcagggctcattgcagcctcgacatcccaggctcaagcaatcctccctcctcagcctccctagtagctgggactacaggcgtgtgccaccacatcggctaatttttgtattttttgtagagacagagttttgccatgtagcccaggctggttttgaactcctgggctcaagccatccgcccaccttggcctctcaaagtgctgagattacaggcatgagctacctgccctgcctgtagttagggtttggacacattctgcctgacaccaacatctatcctctctaacagccagattacatagcctctttgtagtaataaatgttgagtgaatgtgtcagtgaacactgccagggtatacatatttttctaattgtaaactaaagagagcaatccaccgtgccccagcacctgcatcatacctgttctaaagcatttaccaagttgtattgcaatggtttgtctacacagctagttttccctctaacgacttcttcaagatcaggggctatgtcttattcgtttttttatgtccccggggattagctagttcttgggaaacaactgggacttgggattcaaaacagtttgctaagtgaatgaatgagaggcccagtcaagctacttcccttcagtgctgcacagtgcaacaaataaccagctcagatacaggttcaaagaccacaggcttctccctggacagctcagctctcctcataactcctgagaaaccctggacatgccagggtgtactatggagtggttgcatccggaagagggggaggaagtcccaaacactaagtaatccaggtttgggttggaaaacaaggttgaagttactcattagcaggtgaaagggtcaagggtcgaacgcaagggagctgaaagcagagtggactgagcagccagtaggggagagagcagttaaggcacacagagcaccagctccctcctgcctgaagatgttccaccaaatttgggcagctctgctctacttctatggtattatccttaactccatctaccagtgccctgagcacagtcaactgacaactctgggcgtggatgggaaggaggtatggactgaga

SEQ ID NO: 35810 - DNA, 2300 bp, Homo sapien
agtgttgggattacaggcgtgagccactatgcctagctggcaatttgttccttagcagaaaagctgaaaagatcctattctaccctgccagccccctctgaggcctcaactcttccccttttccttcccctgcccttaatgctttttcttctttctctgcaggtctcctactccctccctccagtactgcgagaactgtgacacccacttccaagattccaaccaccgcacatccactgctcacctgctgtcactgtcgcagggtcctcagcctcccaaccttccacttggggtgcccatctccagcccgggcttcaaactgctgctgagggggggctgggagccaggaatggggctgggaccccggggtgagggccgtgccaatcccatccccactgtcctcaagagggaccaggaaggactaggctacagatcagcaccccagccccgagtgacacatttcccagcttgggatacccgagctgtggctgggagggagagaccccctcgggtggccacactgagctggagggaggagagaaggagggaggagaaagacagggcttgggagcgggatctaaggacttacatgaacctcgagttctgactttggtaaagtctgaccctagtctgctgctgaagtctgaacttgggcctctgacctgggccctttgacttccccttcctgggatctgctcagatgcagatcctgaagtttttggtcaataggctctgtcttcgtgagagacgggctgagagtcagaaataaatcaaccatttgtggtttattcacttttctggaagctattttgaggaagccaaacagaagcctgggagccacatgcaagtcccacctgagtcagaaggggcagcctctccaggtggcatgataaggtcacctccctgccaatctgggttcactttcaggtcccagaccctcctgggagtcccccacctattctttcaacccccctggaccaagaattgcccagcttcgtgcaagtctcacttcccccaggaggagttccctgactacagccaattcactgatttcacaaacataagtccatatactatgtgccaagaatacaggtaaagacattcccaaccctcaaagagttcacagctggagagggaaagtgccatgttatcaatttttttcttttttttttgagatgcagtttcgctctcattgcccaggctggagtgcaatggcatgatctcggctcaccacaacctctgccccccgagttcaagggattctcctgcctcagcctccccagtagctgggattacaggcatgccccaccacgcccagctaattttgtatttttagtagagacggggtttctccatgttggccaagctggtcttgaactcccgacctcaggtgatccgccggcctcggcttcccaaagtgctggggttgcaggcatgagccaccactcccggcccatgttatcaaatattataatgcagggtgataagggaagtcaaggcctctagagatgagaatgggtagggttttgctggaagaggccagtgtgataggaaggcccacgattatcaagcttgtacacttagttgaactgggaccagaactctagcccccaaatctaaactttaaacttctttgttccacccatttgtctacacttttctttcccacacttccccactctcccaccacccacccccttgtcttgctcatgccgggtggtaggcacaagaagagctcactgttgtgaaatccaggaattcaaatttgcagacgggcaggggagggctgttcaagtcgcaagactcctcattttttcttttctgggaaagcctttcatgaagtcttggatgcgaaatggaggagtggtgggggatgtggaaaagaacccaggggcagggggctgtagggggcgaccgagtttagggaagcatgagaaacccgggaaaatggggagctgggtttatattaaggtcctggtccttgctaatctcggtttggcggtccggcgcgcacagacagcgcggggtatacgggggcggtctattcgcagggtccgccccatgagctgcggcaccgcccccgcgggtccttccagtcctggtgcagctgcttccgggcttcgcggctcccggcggctccccaaggccgcggccccgacgctgggcccgggagcggtccccgcgcacagcgcccggacgcgtaggtcccgaagtaggcccgcgctttgcttcgtaactggggatctctgaggacatcttagttctgaccttgtggaggccgcgtctctgctgcgtgttcg

SEQ ID NO: 35811 - DNA, 2300 bp, Homo sapien
ggcgtctggtgtggtgtggctgggagaggcagaacacaatgagacatgggtctgagctaaagtttccccttaccggttttccgggctccttgtctctccatggctctccctgaccatgcgggctacctcagggaagccagcttcttcagcgagctgagccgcatccctgccactcagctcacagacccccacccaggcagccccacggcccaggagatagctcacagctgccccctggcccgctcgagcagcacacatcagtggggtccaccagaaggcatcccgggcgttgatattccccccagctcctcctgcctcatgcggttccagcagtctcctaagttctggcaggtccccctcctgggctgccctcagtatccggtgagtcatcttatcctcagcctcaagggatctcccttgtccatgtcttcctgatgctccttctgccactgcttctgctgctggtgccttcattattcttcttttctttctctttctttctctggcaggttcagtctgagatctctgggagtcaggagcgctgctctcatccccaatcagggcctcatagaaagctcgggctgcagccccatccagggtggactctggcttctcgggctgtggctgctgctgcccatccttccagaggtcgctggggtcagtggctggggtgaaggtgatgagcaagggccgggacatggcttttgggagaactgagaaaatgataccaggcaagggaaggatgagacaagtaagccaagctcgtggtgaccctgtagcaaccacagcctcagagacctgctgggatgagaaaaagtagtcaaaaacactttcctgccactaaagtaaccccacaacttaggactctgcagggcctaagggagagagactttgcgtaaaaacatggaaccctacaataccgactttgctccttagtaaagattaataaaactccatgagactgttgtccagaggtcctgcgtccggcccccacccccatcctcaccaacaataaacaccagcctctttctgaaaccactttcccaccccgtaagacataccagtaggaaaaaaaaatcagcctggccctttaagtcttccgcgatcccatttcggagtttcctcttcccaaacaaaaatagatgggtcactccctagaagatctcggggagagtctcctatacgtgttgctgtgtagcttccgtaccgcaaaatggcgccattctaatcagaagagttgacacaatcaaatagccacacggcacgaagacgcatgcgtggcgacaacaacaacaaaaaccacaacccacattacttgagggctcgggcgtgcgcaaagctccgggttcagtttcccgcgctggaactttttcaatagtaaacgagcaaagctccgcgcgcccaggtggcgcgagcactaggatctgtcggttggggtcctacttttacataacgcccccacaatgcccttcgccttcctcaacgtggcccccgctccaagcccattttctggagccaggaatccactctgtgggttaggaaaggccctcaggaggcggagggaaacctgtggaatgccgagaagccgtgtaatgaaataacgtcacgcctgcccctcaccattactctgaccagggttcgaaggtcacacttagagcctaaggggaaatggagaagtgcaaagggacgagcagaatggctggcaccacctcaggttagcgcactgggacgttccagttctcacaccgcccaccccaccccacccaagtccctacgcacggagccaagccgcacctctcccctcatgaggcaggagcccggaggaaacagtatgcccgtcaagggtctctggcgggactgattcgcactaggggcccaacaggcaataaggacccagcggattggccgaggataggccagtcccctgggcagcagcgccgcgccgggactagaggggaacgtgaggagagctgcggaaagagatccagcctggctccctcctttccccgccctaagtcagcctcttcacccagtgagcacaaaactgtattgcccagactcccgggccccgaacgccatacctggcttccgcttccggtggcttctcgttgtgccccgcccgcaagcgccctcctccgggccttcgtgacagccaggtcgtgcgcgggtcatcctgggattggtagttcgctttctctcatttagccagtttctttctctaccggggactccgtgtcccggcatccaccgcggcacctgacccttggcgcttgcgtgttgccctcttccccaccctccct

SEQ ID NO: 35812 - DNA, 2300 bp, Homo sapien
ctaaaggccacctgagacaagtactagcagtgccactttagtaacaaaagatacaggccgggcgcaatggctcacgcctgtaatcccagcactttgggaggccgaggcaggcagatcacctgaggtctggagttcgagaccagcctggccaacatagtgaaaccctgtctctactaaaaatacaaaaattagccaggcatggtggcaggcacttgtaatcccagctacttgggaggctggagcaggagaatcgcttgaacctgggaggcagaggtggcagtaagccgagatcgcaccactaccctccagcctcggtgacagagtgagacccagtctcaaaaaaaagaaaaagacacaaattgactagcccaacgttatattgctggacggtggcagactcaggacttgggccccagttttgccactttagcacaggttcgtcggggtttataggggggactctttgctgataggaagttttcaaatagcatgtaagagaacagtgcagaagtggaatatgtgaaggaacgtctggtgggaagatatgtgaagctggcaagtagggaggttgaagagaactcacttcacagaagaattcattgccacggagcccacagaaccaggaaatccaggacacctcctctgagctgctcatcttcacgtcagctagaaaaagaacagtgtcagtaaagctcaagttctccttccctgcctctggtatcctccctcctcccacattcggccctccaaccacgggagaattcggaaccaccctttcttaaagcaacccaaactctgaagcactcctctccagctcctctaatttacatctcagccccttttctttgaagttaaacattctttggggtcccaccacttgaaagaagccaacagatactttgacccaccagcccgacccacatccctggagctcccgaaggccagggccctctctcctctgtgtcaactccggcagggacctcgactcaggctccctaccaatacaagtctctgcatgacccccacgcctttcccaagggtttccaagtttatcattctcaagcaagaactgggctcctccttttctcacgggttgggggcgattgtcaggtccctttcaccggaatccacacatcccccctccgctcctcaggccacctctccctccttcgtgccggacctggtcgcttcctcccccgcccccacatcaaagtccggagaccccatgtgccgctcccagcgacaagggactcggagcagcgacgacttcagactcaccggctggacggggaccaggactggggtggggtagggaagttgctacttccagggaacggcggcgaccgctacagcgcaggccgcggacccgaccgcggcaggcgaagtggggtggggggagtggaaattagggagggtggggaagagggcaacacgcaagcgccaagggtcaggtgccgcggtggatgccgggacacggagtccccggtagagaaagaaactggctaaatgagagaaagcgaactaccaatcccaggatgacccgcgcacgacctggctgtcacgaaggcccggaggagggcgcttgcgggcggggcacaacgagaagccaccggaagcggaagccaggtatggcgttcggggcccgggagtctgggcaatacagttttgtgctcactgggtgaagaggctgacttagggcggggaaaggagggagccaggctggatctctttccgcagctctcctcacgttcccctctagtcccggcgcggcgctgctgcccaggggactggcctatcctcggccaatccgctgggtccttattgcctgttgggcccctagtgcgaatcagtcccgccagagacccttgacgggcatactgtttcctccgggctcctgcctcatgaggggagaggtgcggcttggctccgtgcgtagggacttgggtggggtggggtgggcggtgtgagaactggaacgtcccagtgcgctaacctgaggtggtgccagccattctgctcgtccctttgcacttctccatttccccttaggctctaagtgtgaccttcgaaccctggtcagagtaatggtgaggggcaggcgtgacgttatttcattacacggcttctcggcattccacaggtttccctccgcctcctgagggcctttcctaacccacagagtggattcctggctccagaaaatgggcttggagcgggggccacgttgaggaaggcgaagggcattgtgggggcgttatgtaaaagtaggaccccaaccgacagatcctagtgctcgcgcc

SEQ ID NO: 35813 - DNA, 2300 bp, Homo sapien
ttctgacccttgcatcaaacgaagacagctctgccttcccttcacaccttttcagcctctgctccttgctctccctcccaactccctcctcaatacataactgcaacaatgtcaatgcagaagatgaaattctagactggaaggtgcaaagcaggagaaacagacaacaaaccagacccatgaggaaacgcattttggaataggtctgaattgcggatttagaaaacatgagaacaagtgatatacgtcacaaaactagacaagagtcaggtggaggatcaaaataaagcatgaatttggggttaaagaaatcagagaaccaaaggaaatttcaaaattcaggcaagtgaatagagatttgaagagaaaaatagtgcacgcacacacacaaaacaaccctgagggtgcctcaccaggctccaggtccaagatcatgtctagagcttgtcgatagtgagggacctgctcattgagtccagtaagattaaatttgtcctggatgtagtcttcatccacctgtcaggacatggaagccaagagggaacccatatcaaaatcctcatctttgacctgggcaaaatgctctaagtgatgccttatcatcaacacaactgcatctgttgtgcttgtttctcactcccaactcagcagaagtacttgtgtctctccctagttcacctacactctctcccataaaagctttggcttttcttttctaaggataagtagatacagcaatctttttcttagacattcttttcaagatctttgtccctactccactcctgtatcccgtctctaggaaccagttttgtcctctcagctggctaaggaaggtggaagctgaacagcatggtttctgaacaaaacatttcaatgtgtagcatttcagttttcctaaaggccacctgagacaagtactagcagtgccactttagtaacaaaagatacaggccgggcgcaatggctcacgcctgtaatcccagcactttgggaggccgaggcaggcagatcacctgaggtctggagttcgagaccagcctggccaacatagtgaaaccctgtctctactaaaaatacaaaaattagccaggcatggtggcaggcacttgtaatcccagctacttgggaggctggagcaggagaatcgcttgaacctgggaggcagaggtggcagtaagccgagatcgcaccactaccctccagcctcggtgacagagtgagacccagtctcaaaaaaaagaaaaagacacaaattgactagcccaacgttatattgctggacggtggcagactcaggacttgggccccagttttgccactttagcacaggttcgtcggggtttataggggggactctttgctgataggaagttttcaaatagcatgtaagagaacagtgcagaagtggaatatgtgaaggaacgtctggtgggaagatatgtgaagctggcaagtagggaggttgaagagaactcacttcacagaagaattcattgccacggagcccacagaaccaggaaatccaggacacctcctctgagctgctcatcttcacgtcagctagaaaaagaacagtgtcagtaaagctcaagttctccttccctgcctctggtatcctccctcctcccacattcggccctccaaccacgggagaattcggaaccaccctttcttaaagcaacccaaactctgaagcactcctctccagctcctctaatttacatctcagccccttttctttgaagttaaacattctttggggtcccaccacttgaaagaagccaacagatactttgacccaccagcccgacccacatccctggagctcccgaaggccagggccctctctcctctgtgtcaactccggcagggacctcgactcaggctccctaccaatacaagtctctgcatgacccccacgcctttcccaagggtttccaagtttatcattctcaagcaagaactgggctcctccttttctcacgggttgggggcgattgtcaggtccctttcaccggaatccacacatcccccctccgctcctcaggccacctctccctccttcgtgccggacctggtcgcttcctcccccgcccccacatcaaagtccggagaccccatgtgccgctcccagcgacaagggactcggagcagcgacgacttcagactcaccggctggacggggaccaggactggggtggggtagggaagttgctacttccagggaacggcggcgaccgctacagcgcaggccgcggacccgaccgcggcaggcgaagtggggtggggggagtgga

SEQ ID NO: 35814 - DNA, 2300 bp, Homo sapien
tgaatcagagagttgtgatagactgcctcttcctcaaggaacaaacaacaaatggctctgatggtttgtagcctgcctaattggaagaaaggcaacacagaagtttgagagcccatctagtccagagaaggggcctctggacagaggtgggaggagtgggggacagagtggtatgggttgggctgcgaagggagttgcctcttctttacatctacctgccaaccccttccattgtattcacctcagttggaaaagtaccagcaaggagactttggttactgtcctcgtgtgtactgtgagaaccagccaatgcttcccattggtgagtgttgaagaagggaaaggaaagcaccgtgtggcagtcttatgggaaggagttggggctcaacacattggagcctgagtcctgaggggaggttaggtaggaatagggggatacctggcctgctgagtctggctgtctcccaggcctttcagacatcccaggtgaagccatggtgaagctctactgccccaagtgcatggatgtgtacacacccaagtcatcaagacaccatcacacggatggcgcctacttcggcactggtttccctcacatgctcttcatggtgcatcccgagtaccggcccaagagacctgccaaccagtttgtgcccaggtagggagcagggagagtcattaagggtcaaaggaaaggcccaagatcccccagagaggggaggacagggcatggccctttcttgaggtctgcttctcccagaatcagggcatctccctgctgagtgactgtgggaaagttatttgattatctgtgcttgagttaccttattgtagaatgttcttgagctgagaagttgggaaccacgaggctttagctctgagcaggtccatagaggagctcaggtggggaggtgggaatgcaggtgactggcagggcctggatggggctcatgctgctgcctctctgacctctgccctggcctaggctctacggtttcaagatccatccgatggcctaccagctgcagctccaagccgccagcaacttcaagagcccagtcaagacgattcgctgattccctcccccacctgtcctgcagtctttgacttttcctttcttttttgccaccctttcaggaaccctgtatggtttttagtttaaattaaaggagtcgttatcgtggtgggaatatgaaataaagtagaagaaaaggccatgagctagtctgctggtgcttgctgttggggaagggaaggtgatggtgtgttggactccaggggccctcatggcccagcccaccctccccagattgaaaaccaggacagatttgtgctcagtggattgggtggtgtttttagtatggagcagaacagaattcctaggactgcgtgtgatgaaatgcaaggtcaaaaggaaaagacaaagcatatttcaaagatgagaaatatttgtttggatatctatgactgtctgtttatactgtaaggggcttaatcagcagctccatcttttagttttagttctaaaggaaaagtagcctaaagtcagtataactaaagggtggaacgaggtgggacaaggtccggaattgctgctcagtgatgtgtgtgtgcctgccgctggtggagctgagactgctcatctcagaaggatggggatgcttgatttcctggccaggttgtcccagcacagtggggattggccctgttgtatgacgaagacagcacatggtggcagagatagatactaacccatggactttccaagggagggaataggtctttggagggtatgcaagacaaaggtagacactggataaagaacccggtagtgcccaggtattaccccatctgggccattactcccacactcaggaaccagacgttgtgggtgaggacatgctgtccctcctgccaagtaataacttccttcccagccaggatcctgccccaagtaggaatatagctctgcatttacagcagctcctgctcagaccttgtcaaaaccaccctgcagcttaggattaaggagcatggtcacaggaaggtggggtttcagggcatcccctcaggaactgcccatctccccagaattccaaaatgaaggtccatatgcttgtaggtgtgctggtcatggtgggcttcacagtaggaaagggtaagtggggcccaggggcagggagggaggaaggggtaactgagtccaggaagggggtggagcgtggccatggataatcgggcttcctactggcccagggtatttgagagtgacccagtgcctccatccctccttctgcctc

SEQ ID NO: 35815 - DNA, 2300 bp, Homo sapien
attcaagacatttatgtaggtgccccgcgttcctctgcagttctccactactctggcttttctctaatacaatttattttgtgttattatttctttaagacagagtctcactctgtcgcccaggctggagtgcagtggtgcgatctcggctcactgcaacctctgcctcccaggttcaagagattctcctgcctcagcctcccgagtagccaggactacaggcgtgcgccaccacacctggctaatgtttttgtattttttgatagagacggggtttcaccatgttgctcaggctggttgcgaactcctgacctcgaatgatcccccaccttggcctcccaaagtgctgggattacaggcatgagccgccacgcccggctaatttttggtatttgtagtagaaacggggtttcaccatgttagccaggctgggtgcgaactcctgacctcaggtagtccacccgccttggcctcccaaagtgctgggattacaggcgtgagccaccgcagtccggccctaatatagtttttaaattcattcattccaaggcttttgggaggcgctcagtggcgtgcagtttcctctcgaatttctttcttcccgcagtctttctgggcgggcgtctcccgtctgtttcttcccatcttcccccttatcatcctgggactggataattcttgaatagtctgggaggtagcagggaacccgagttcggagcctcgaccagaacctccagacgggaaattggagcaggtggtgtcgttccaggacgctgaggaccacctcctcccctaacgcacagcccaacgatcctaaaagtaaaaaccctgagtttctgagtcaagactgagctggtggggtggggaccgagtaggcgtggatggggagcccagcgggtccccagcggagaaaatgggtgagacgcctggggccgcggtctccagaattcgcctgggagggagagtggcgctacggcgccgccttcctggggagccgcttcgggctccggatgtccgctggggcccgacgcttgggtcccgacgcgcggttcgcactttccaggtttcttccccagggaacagagcttgagcggggggccacccccccgtcctaccggagttctgaggtgcggtcaggcgcggagagcggacgcccagcgccagattctgtgggctccggagttcaggcccactgagccgcagctgagcacaggcggggcaggaaaaaggatgaggtgagggaaggcgctgggttcctggaaccccaagggagcactgagctgagtacgtatcgcttgggatccaggtgtccttgttttaggatgtctgacaggtgtccccagggtatgagaagtgggactgggcaccccctatttgcttttttttttttttttttgagacagaccacatgtttcctatcttggaaaatggtaccacttccttgtgcaagcctacccctgttccctcacccctcgttcagtccaacagcaaatctgtccagtcttctaactgtatctcaggttcattagccccgcttcctcgtccctgctcgtcttctgccggaccagtccgccatcttgtgaccggactcgggaatagcgtcctacttcccggcggcctccactcttgacccaaatgcaatgtgcagccatggcaatcttttataaacagaaatccgatcaagttactcctctgccgaaatccctctggtcagtggtttaactgtcgaggtgctcctggcagcactctgccctccccacatcattgctggtggacttgtctcccctactagactgtgccctgtgagggtggagactttgtgcagggttgtatccccagcatctgatgcagtgattcaataaacatctgtccaattaataggaaagacagttccttttctcattcccctattgctggtcccctgccctcaagcaggatgttatgccccagagtggctgtgggtgcgaacattctgcccctctggctggtctggcactgatttccaccctgagctggtgttgcctctctccttcctcttggccaacctctcttccaccaatataagcccaaactggaggccagcaggcagtcatgcgttttatggcaggccctgcagggagccagagtctgggtcccctgtgcttccacagcagcccccaagccctctacacggtcctcttaatagtgctggtcatgatgagcttggtgtttggtaagtggctccaagggttcagaagggtctcctggcctggatggagaaacccacagacaccaagtgtctgggtacacctgtccaggat

SEQ ID NO: 35816 - DNA, 2300 bp, Homo sapien
gtgcagtggcacaatctgagcttgctgcaacctccacctcccaggttcaagtgatcctccagcctcagcccctctagtagctgggattacaggtatgcgccaccatacccagttgatttttgtatttttagtgaagatgaggtttcgccatgttggccaagttggtctcgaactcctgacctcaggtgatccaaccgccttggcttcccaaagtgttggggattaaaggtgtgagccactgcgcctggccgctggccactttcttcatttggaaacttctcttttccagatgaaagaccccaaagtttatcgccctgagtccatttttgttttgttttattttgttggggatggttttttgtttgttttttgagatggattctcactctgtcgcctaggctggagtgcagtggcacgatctcagctcattgcaacctctgcctcccaagttcaagcgattctcctgtctcagcctcccaagtagctgggattacaggtgtgtgccactacacacagctgatttttcgtattttagtagagacaggtttcaccatgttgcccaggctggtctcaaactcctgagctcaggcaatccacccacctcagccgactccattctttttttttttttttttttgagacggagtctcgctctgtcacccaggctggagtgcagtggcacaatctcggctcactgcaagctccgcctcctgggttcacgccattctcctgcctcagcctccctagtacctgggactacaggcgcctgccaccacgcctggctaattttttgtattcttagtagagacggggtttcactgtgttagccaggatggtctcgatctcctgacctcgtgatccacccgcctctgcctcccaaagtgctgggattacaggcgtgagccaccgcgcccggccaactccattcttttgagcaagatacttaacgtgggcgacaatgttctaatgtcctagatggagtctctggctaaatttctgtgtcttctccaaacccagtgcatgaagctcttcttgaaaccccagggcagaggctgtgtgtgcccccattagcgctgcaactccttaagggaagatatactgagtctccactggaagtggagatctgagacttaatcaggtgatgtgatgcctgaaatttggagttagaagaggcaggtgaccacagctccataatgctccaccgttagcaaacaggtggatagctgatactggtgccctctcctctatcccattccaggggggcaaacgatgggaagtgtggaacatgaagctctggagccagctgcacagttctgaatcccatcctcccagatccaacagaagagttaatcccctgaaaactaaatttttgttcagctaagggaagctccttaaatgcaaagaggagctgggcatggtggctcacatctgtaatcccagcactttgggaggctggggcaggaggatcacttgagcctagaagttcaagactggacagggcaacatagggagactccatcagtacaaaaaatttaaaaattacccaggcatggtggcatgcacccgtgttccaagctactctggaggctgaggtaagaggatcgcttggctgaggatcacggtaggttgaggctgcagtgagctgtgatcgtgccaccggactccagcttgggtgacagagtgagactctgtctcaaaaaaaaaaaaaaaaagcaaataggggtgcccagtctcacctcccataccctggggacaaaggacacccctccctggacatggccattagggactctgctgaactgcccctactgccactttcccccatcttactgcatgtaattgtagacaacagtggatgacctgaggggcccttagatacctgaaattgggtagggaaagaaaggtaggctcaacatgtgaattctgaacccccccatccaggggcctcagcctacttcagattactccctatgcaataaggttcagagcagctgtgtttgttttcagaactaatccccacccaggggtggaagcaggcccctgtccactcctcaccctatatagcaaagttccagcagttccaggggatgatcagcagagatgcagaccttcccagttgctggggcgctggaccctgctatactggacacaaggtgaggcctgaaagtccaggcaccctgaggagctgggcaaactagcagaaaagatggcgctgggagaaaggaaagttagactctggacgggaaatctggaaagaagtggttcccagctgggccaaaaagcctcatcctacgccgtct

SEQ ID NO: 35817 - DNA, 2300 bp, Homo sapien
cctcccaaagtgctgggattacaggtgtgagccactgcacccagcccacaatgtttcttagaaggtagttttctctgtatcacagcagctcagttctataaatgtttaattttgttgtatgcattgaataccatgctatccttgtttgtggatgggacaaggtggacaggtgtgtccactcctatgcctgggagtacagcatggtgccaggagggagaaaagctagggctcagtgtcttgggaattatgccaagccggctggtgctggactgtgattatctttgaggatgggctttggggccccatagagctcttttctgttatgggaggtttctaggatcaaacagctatgaccaccatcatcacattcctggctactccacactatggagctgcgtaatgatgccctgtactatgctactggctgaagcatttggcacacaccctttctgatcctcacaacagctgagtgaggtggcattattacctttatttgtaaatgtgagaaaacagaggcaaaaagaggttaagtgacccattcggagtcatagagcaagaaagtggctaagtccagatttgagagcaggtctgagcaaagcctgcctgaaatttgcttttagtcatcttgttttgttttgccatttacctttttgtataatttttctattgctctctgttagtcaaattatttttgaaatgtcaaaaaatttctgtgcagaaaataaaaaccctcaaaatagagtgctaggagctcagggggtgggggacgaatatagtcaagtattaagacacagctaggccgggcgcggtggctcacacctgtaatcccagcactttggaaggccgaggcgggtggatcacgaggtcaggagatcaagaccatcctggctaacatggtgaaaccccatctctgctaaaggtacaaaaattagccgggcatggtggtggcaggcacctgtagtcccagctacttggaggctgaggcgggagaatggcgtgaagccgggaggcagagcttgcagtgatccgagatcgtgccactgcactccagcctgggcgacagagtgagactccatctcaaaaaaaaaaaaaaaaaaaaagacacagctcccactgccgtcaaaaaacgtggagctggtgaggtggttcatgcctataatcccagcactttcggaagccaaggcaggaggatcgcttcagcccaggagttggagaccagcctgggcaacatagtaagaccttgtctctaaagaaaattttaaaaattagctgggcatggtagcacatgtctgtagtcccagctactccagaggctaaggtaggaggatcacttgggcctgggagtttgaggctgcagtgagctatgattgcaccaactgcattccagcctgggcaacagcacgagaccctgcctcaaaaaaaaaaaaaaaggcatgtggactggctcagtggggtggcccgaggttcggatgggctgtagggcaacactgatccatggctgcaggagttgaggaagggatgtagttgtgaggatggaagtcagagcttccttcaacgggtggccccacatggcagaggagcccactgtgggcgtgacttccctcctctctgtctcactcaaccttgggtctgtcagtgtgatctgctgggagatttctaagcttctaagacagcaccctataagggacccaggtggggaatagaccgtgaccagccagcgacccctactacccgtcactcaaaagcactagcaccttcagccactcctcctggggatgggtcagacttagttttttagaaaagcagagtgttaggttcttagcttggaagagggcagacaggccagtcctgatacctgatggggcataccatctcccctgattttctggtcctgttagaattttccatctgagaattgggagggtattgacctccgcttggtttccccatgatgtgtggggatcagacccctggataacgaaggtgttgttgagggtgggtaggagagcctcccctgagttctcagtacccctttgcctctcgtgcccactgcagaggcagcttgccaactacaactttgacttccggagctggccagtcgacttccactgggaagaacccagcagccggtgaggccccagttcttttgctgtatctctccccttagaaccattccagaaaatctctgctctgccctcccacctccatgccctctcaggtcacagtgcctgccttccaatgccattatgtcgttcctagaccccactgttctccagacctcagacatccagcttgctgct

SEQ ID NO: 35818 - DNA, 2300 bp, Homo sapien
taatctcagctacttgggaggctgaggcaggagaatcgcttgaaccccagaggcagaggttgtggtgagccgagatcgggccattgcactccagcctgggcaataagagcgaaactcggtctcgaaaaaaaaaaaagaaaaagaaatagaatattccaggccaggcacagtggctcatgcctgtaatcccagcactctgtgaggccaaagcaggaggttcacttgagcccaggagttcgagaccagcctgggcaacatggtgagaccttgtaaaattagccgagtatggtggtgtgggcctatagtcccagctactcaggaggttgaggcagaaagatggttgagcccagcaggtggaggatcagggcagtgagccgtgattgtgccactgtgctccagcctgggtgaaagagctagaccctgtctcaaaaaaaaaaaaaaaaaaaaacagaaaaaaagaatattccgtttcagtcagagatcctctatgctgtgtaaccacaattctgaattttctctttcttctccacttgctttatcattaaattttatgtgtttttgaatctaatatactagtatcacgtatacattcttctgtggctttctattttcactcagcatcatggttttaagatccagttcatgcataacagtaatgattcatttattttctttttacaaatattccgcatatcttactgtgctgaattttcgtatccaggaccatggtgtagctttccatttattgaaaagcttttcgtttacctctttctttttttattttttcaattattattgttattattttgaggcagggtctggctctgtcacccaggctggagtgcatggagcgatctcaaactcccgggctcaagcgaccctcccaccttggcctcccaagtagctgggactacaggtgggcaccaccacaccctgctaggtcttttttttttcccccttggtattttgtgtagagatggggtctcactatgttgcctgggctggcttggaactccagggcgcaagcaatcctctctcagccaccccaagtgttggaattacaggcatgagccatggcctggaactcctggacgcaagcaatcatccctcggccacccaaagtgttggaattacaggcgtgagccaccgcgctgggccagtttacctttatttatttatttagagacagagtcttgctctgtcaccaaggctgaagtgcagtgggaagatctcggctcactgcaacctctgcctcccgcgttcaagcgattctcgcgtctcggcctcccgagtagctgggattacaggcgcgcaccacccatgccaggctaatttttgtatttttagtagagatggggtttcaccatgttggccaggctggtctcgaactcctggcctcaagtgatccccccgcctcggcctcccaaagtgctaggactacaggcgtgagccactgcgccgggccgggccagtttgccttttcaataactttttatagttttcttcataaaaccttgcatttcttgtactagatacattcctagacaccttatgttttcggttactcttatcaagtactcctaatctcacccctcgtttccgctgtcgctctagagtctgccaataatgagacagaaaaaaattattgaaccatgcccggtaattttctgattctccgcgttctagtggtcttccactagtttcggaccactgctgtacccgtagctccaactgcgcgaaactcttctcaggaagcactgaaaatgtcgcaactcgcccggaggcggagccggtacgggctgacgtcaagggcacacaacacctcagaggcagggagggcggggccggcagggggacctgctgctggaagagcagcggcccgagccggggccatggcgaagctgctgagctgcgtcctaggcccccggctctacaaaatctaccgggagagggactctgaaagggccccggccagcgtccctgagacgccaacggcagtcactgccccccattccagctcctgggtgagtcgagttcctccccaccgaagaacgtggtacagtccaaaccctttacggccttttgctccccagaagtgcccataatgggaaataaggggagcctgcttgtcaagccagttatccgcaaaatctgcgctctgtgtgcttcctgagttaaagtcacgcctacggactggccgcctcctttctttttcgctctttaccgctttctcattccgactgccactctttgttctttcctctccgcgtccccccgaccctgtgtgtcgtggttcgtgc

SEQ ID NO: 35819 - DNA, 2300 bp, Homo sapien
tgccactatactccagcctggtgacagagcgagactccgtctcaaaaaaataaataaataataaataaataaataaataaataaatagaatattccaggccggactcggttgctcatgcctgtaatcccaccactttgggaggatgagacaggcggatcacctgaggtcaggagttcaagaccagcctgaccaacatggagaaaccccatctctactaaaaataaaaaaattagcagggcatggtggtacatgcctgtaatctcagctacttgggaggctgaggcaggagaatcgcttgaaccccagaggcagaggttgtggtgagccgagatcgggccattgcactccagcctgggcaataagagcgaaactcggtctcgaaaaaaaaaaaagaaaaagaaatagaatattccaggccaggcacagtggctcatgcctgtaatcccagcactctgtgaggccaaagcaggaggttcacttgagcccaggagttcgagaccagcctgggcaacatggtgagaccttgtaaaattagccgagtatggtggtgtgggcctatagtcccagctactcaggaggttgaggcagaaagatggttgagcccagcaggtggaggatcagggcagtgagccgtgattgtgccactgtgctccagcctgggtgaaagagctagaccctgtctcaaaaaaaaaaaaaaaaaaaaacagaaaaaaagaatattccgtttcagtcagagatcctctatgctgtgtaaccacaattctgaattttctctttcttctccacttgctttatcattaaattttatgtgtttttgaatctaatatactagtatcacgtatacattcttctgtggctttctattttcactcagcatcatggttttaagatccagttcatgcataacagtaatgattcatttattttctttttacaaatattccgcatatcttactgtgctgaattttcgtatccaggaccatggtgtagctttccatttattgaaaagcttttcgtttacctctttctttttttattttttcaattattattgttattattttgaggcagggtctggctctgtcacccaggctggagtgcatggagcgatctcaaactcccgggctcaagcgaccctcccaccttggcctcccaagtagctgggactacaggtgggcaccaccacaccctgctaggtcttttttttttcccccttggtattttgtgtagagatggggtctcactatgttgcctgggctggcttggaactccagggcgcaagcaatcctctctcagccaccccaagtgttggaattacaggcatgagccatggcctggaactcctggacgcaagcaatcatccctcggccacccaaagtgttggaattacaggcgtgagccaccgcgctgggccagtttacctttatttatttatttagagacagagtcttgctctgtcaccaaggctgaagtgcagtgggaagatctcggctcactgcaacctctgcctcccgcgttcaagcgattctcgcgtctcggcctcccgagtagctgggattacaggcgcgcaccacccatgccaggctaatttttgtatttttagtagagatggggtttcaccatgttggccaggctggtctcgaactcctggcctcaagtgatccccccgcctcggcctcccaaagtgctaggactacaggcgtgagccactgcgccgggccgggccagtttgccttttcaataactttttatagttttcttcataaaaccttgcatttcttgtactagatacattcctagacaccttatgttttcggttactcttatcaagtactcctaatctcacccctcgtttccgctgtcgctctagagtctgccaataatgagacagaaaaaaattattgaaccatgcccggtaattttctgattctccgcgttctagtggtcttccactagtttcggaccactgctgtacccgtagctccaactgcgcgaaactcttctcaggaagcactgaaaatgtcgcaactcgcccggaggcggagccggtacgggctgacgtcaagggcacacaacacctcagaggcagggagggcggggccggcagggggacctgctgctggaagagcagcggcccgagccggggccatggcgaagctgctgagctgcgtcctaggcccccggctctacaaaatctaccgggagagggactctgaaagggccccggccagcgtccctgagacgccaacggcagtcactgccccccattccagctcctgggtgagtcgagttcctcccc

SEQ ID NO: 35820 - DNA, 2300 bp, Homo sapien
ctgccctgatcctccacctgctgggctcaaccatctttctgcctcaacctcctgagtagctgggactataggcccacaccaccatactcggctaattttacaaggtctcaccatgttgcccaggctggtctcgaactcctgggctcaagtgaacctcctgctttggcctcacagagtgctgggattacaggcatgagccactgtgcctggcctggaatattctatttctttttcttttttttttttcgagaccgagtttcgctcttattgcccaggctggagtgcaatggcccgatctcggctcaccacaacctctgcctctggggttcaagcgattctcctgcctcagcctcccaagtagctgagattacaggcatgtaccaccatgccctgctaatttttttatttttagtagagatggggtttctccatgttggtcaggctggtcttgaactcctgacctcaggtgatccgcctgtctcatcctcccaaagtggtgggattacaggcatgagcaaccgagtccggcctggaatattctatttatttatttatttatttatttattatttatttatttttttgagacggagtctcgctctgtcaccaggctggagtatagtggcatgatctctgctcaccgcagcctctgcctcctgagttcaagcgattctcctgcctcagcctcctgagtagctgggactacaggcatccaccaccacactcagctaatttttgtatttttagtagagacagggtttcaccatgttggccaggatagtctcgatctcttgacctcgtgatccgcctgcctcagcctcccaaagtgctgggattacaggcgtgagccacggcgtctggcctttattttcagagttggggtcttgctctgttgcccaacctcaaacttctggcttcaatcaaccctcccaccttggcctccaaaagtgttaggattgtagacatgagccaccatgcctggccaggcttcttttactctcattatattgtgagattcaactttgttgcaaatcactaggtttgttcattctcattgctgtccagtcttctactctgttaagcatttatccattatatagttgtacttcatatagtttttggtatgtatggaatatttcatcaaaataattttaaaaataaataaattacacattaaaactgtaataactgcatgaagatctgccttaggagtttttgccgttcagaaggatgaatcagcccgttagccttgtccctgagtaataatttaatacacttattagggtttcaggagaggtccggggtatgccagacaaccacagggaaagtcattccaaatcatttacgggacactgactcgatacacagtcttgtgctgggttctgtggaggaccaacataaaaactcaaactcagtttcttcactcatagctgacatttcttttcttttcttttctttttctttttttttttttttttttttttttttgagatgaagtctcgctctgtctcccaggctggagtgcagtagcacgatctcggctcactgcaacctccacctcccgggttcaagcgattctggtgcctctcagcttcctaagtagctgggattacaggcacatgtcaccacgcctggctaatttttgtattttttgtagagacagggtttcgccatgttggccacgctggtctcgaactcctgacctcaagtgatccacccaactcatggctgacctttcttaggagtgaaagagacctcagaatgtacttccagactgacaagagctagacaggcaggaccacttctctgcatggttttttgcatggaaagtctttatttgagccccttagctgatgtggaatcagaagagcaaaaaggtcatcttcagagtggcctgggctgggtccttttctctccaggatagaaaagtggtggtcactttatccctagtagacatgctgctgggctttatcgccccagcattcccatcccctccagagccccttgtcactccagaccagcgagtgtgggcctttatctggactctgcttcctccctggggacaccaggtcttggagcaagagaacttggcaggctctccccatggcagtcttattcctcctcctgttcctatgtggaactccccaggctgcaggtaaggggcaagaggtacgggattccttagctatttgcaaggttggggagggactactgctctttctcctaggagcctggcgaaggcatctgactcaagaagatagaattaccccaaccaacctcctcctgcctctgacactagg

SEQ ID NO: 35821 - DNA, 2300 bp, Homo sapien
ggaaaagaaacagagatggaggcaagaggggtacagggattgagagatgcgcagacatgaacagaagccacaagaatcagagaccaacataaaaagagtgagacaaaaagccagacccagcagcagggaagttgagggggtcagtgaaaaagttaagtaaatggcaccagagacagataggaaaatagaaattgacattgaccaaagggcccagcacagaagcaacacgtgaaataagggataggggagacaggggcggatcaaagatgcagcaagggggagacagttattctcaaatgccttgaaaggaaactcttcctttcccacctcatcaggctggccttcccagtggctggtctccctgaagtcccccactcccccagctctcttcttggcctcttccagcacccacacccctctcctccccagccctcaggttcctccacatgcccttgtccccacccccagccccctgaccactgaaggttccccagcccacccttacccagtgccccacagaggaacagcacgcagaggaagatgctggaggtgcccatggccagacacaggctcaggaatctgggagaggtgatctgcaccccgagatcccgggatttgtagagttggagcatttgagcaagacagtgaggaaccagtaaacaaacacacctagggagtgaatctggggggcggaaccatgaccagattcaccagcctgacccagcaggcagcgggggcccccagcctgcccctgcaaggagtctgcccttgcctggagggtctcctctgctctctcagcatgttgtctctgtaacttagcttcctctcctgctcctgagttgtgtctgtcgccttccctcctactcctccccctccctccccatgtctcaagctgctccctggctctctcagcttctctctgtctttgttttctctgtctttccccctcagtgctttcatgtctctcaaagtcaccctcctaaacagccccggcgtggatctgtttgagtgtagaatcaacaatacccccacccacacacccacatgcacacacaaagcccagctgtgtaagggcggaccccacccagcttcagatccctttgatccccccaagcttcaacattcctaccctgtaattatccctgccagctttactaccttggaggaaagaaataaccacgggtggggctggagggcctgctgatgtgcttgcactggggagaaatcactagaaaggaaggcatggatgggatttggggtaggggggtggtgatacagcctggaaggctggggttgaagagactgggaaggaggaaggcccatctggggaatcagagccagcatgtaccaggaggagtaagactaggaacagggagtgaagataggggagacacaggtgcccaggagagcagctcttttcaaaaatattgatctcaggacctctttacacttttcaaagttacttaagactctgaagagcttttctttatgaggttatatcaatatttactacattaaaaattaaaacagaaaatttaaagtaggtatttattgatttatttaaacaataaaaataataaagtattacatgctaacaaaatacagttttgtgaaaaataactattatttctccacagcacagtgagaagctgagcattgctttacatttttgtgaatctagtgtcaggcttcgtgggagatgcctgggttttcctatctgcttctgcattcagtctgttgggatatgttgttttcgttgaagtccagtatatgaagaaaatctgaccttacacagatagttgcaaaaggaggaccctcaaggaccctgtgaaagggtatcagggatcctcaggggttcttgttggtccacagactgctgctgaggataaaggagtttgaggactccagaggatgctgagagcatgctgtggggcccctccctgtccccactggggcccttggtgcctgctgggggagactctttcttccttttttatagccctataaagctcaaggcacgggggatataaggcaggcagagccgggctggggaggggggtgggcaggaggtagaggcggtcctgacacgggcagactgcgatgaaaccccagtttgttgggatcttgctcagctccctgctaggggctgccttgggtaaggaggcggccagctagcttctcacacaggccttctgccagccggctccaccgagggcccaggtccagcgcctcttttctcctgccaggaaaccgaatgcggtgctacaactgtggtggaagccccagcagttcttgcaaag

SEQ ID NO: 35822 - DNA, 2300 bp, Homo sapien
ttggttttaactttggcctttcagggccagagctcttcatttgtgagctaatgggcctatgagattcttttaggagaataaggaggtggggaagtgggggcacaaggactgtgggcctctcaggggctccgtgccaggagccagaaggggtacagactgctctcctctaacagctgcaccatctgcccagagccagactgagcctggagggttctggaagccagaaggattgacatggggctggaggcagggaaaggctgctggaagagggagaaactgaggactcacggtttccaggtagcttgatctgttccaggcctggctggggtctgccctcgccacaggtggtcacggcctctttgcaagaactgctggggcttccaccacagttgtagcaccgcattcggtttcctggcaggagaaaagaggcgctggacctgggccctcggtggagccggctggcagaaggcctgtgtgagaagctagctggccgcctccttacccaaggcagcccctagcagggagctgagcaagatcccaacaaactggggtttcatcgcagtctgcccgtgtcaggaccgcctctacctcctgcccacccccctccccagcccggctctgcctgccttatatcccccgtgccttgagctttatagggctataaaaaaggaagaaagagtctcccccagcaggcaccaagggccccagtggggacagggaggggccccacagcatgctctcagcatcctctggagtcctcaaactcctttatcctcagcagcagtctgtggaccaacaagaacccctgaggatccctgataccctttcacagggtccttgagggtcctccttttgcaactatctgtgtaaggtcagattttcttcatatactggacttcaacgaaaacaacatatcccaacagactgaatgcagaagcagataggaaaacccaggcatctcccacgaagcctgacactagattcacaaaaatgtaaagcaatgctcagcttctcactgtgctgtggagaaataatagttatttttcacaaaactgtattttgttagcatgtaatactttattatttttattgtttaaataaatcaataaatacctactttaaattttctgttttaatttttaatgtagtaaatattgatataacctcataaagaaaagctcttcagagtcttaagtaactttgaaaagtgtaaagaggtcctgagatcaatatttttgaaaagagctgctctcctgggcacctgtgtctcccctatcttcactccctgttcctagtcttactcctcctggtacatgctggctctgattccccagatgggccttcctccttcccagtctcttcaaccccagccttccaggctgtatcaccacccccctaccccaaatcccatccatgccttcctttctagtgatttctccccagtgcaagcacatcagcaggccctccagccccacccgtggttatttctttcctccaaggtagtaaagctggcagggataattacagggtaggaatgttgaagcttggggggatcaaagggatctgaagctgggtggggtccgcccttacacagctgggctttgtgtgtgcatgtgggtgtgtgggtgggggtattgttgattctacactcaaacagatccacgccggggctgtttaggagggtgactttgagagacatgaaagcactgagggggaaagacagagaaaacaaagacagagagaagctgagagagccagggagcagcttgagacatggggagggagggggaggagtaggagggaaggcgacagacacaactcaggagcaggagaggaagctaagttacagagacaacatgctgagagagcagaggagaccctccaggcaagggcagactccttgcaggggcaggctgggggcccccgctgcctgctgggtcaggctggtgaatctggtcatggttccgccccccagattcactccctaggtgtgtttgtttactggttcctcactgtcttgctcaaatgctccaactctacaaatcccgggatctcggggtgcagatcacctctcccagattcctgagcctgtgtctggccatgggcacctccagcatcttcctctgcgtgctgttcctctgtggggcactgggtaagggtgggctggggaaccttcagtggtcagggggctgggggtggggacaagggcatgtggaggaacctgagggctggggaggagaggggtgtgggtgctggaagaggccaagaagagagctgggggagtgggggacttcagggag

SEQ ID NO: 35823 - DNA, 2300 bp, Homo sapien
gtaagctagactctggagagttgcatattgaagtggggctggttggggaactggataccagagtttccaaggaggagacaccttggagtggggaacaggggacccagagccctggcaggtgagagaaatgggtctttcttggaggtggggaggatggatggagacctggctttttgagaaatagagcaaggaggctgtcatagggaagcctggtcttggtggcacaggagagctgagccagttggggctgggggtgttgggatcccgagtggtgggtagggccgggaagtgggtagagcagggtgtaaaggtcctgaccaggcaaaccaggtctttggggcccccaggtgctcacctgagacccagcagagcagaacagacagggtgagcagcataagggctttcatggcgagggtcctgagaatggtggcaaccacagcagctgatagagtagattttcaaggatccagctctaggagttgagtggcctttttggaatttataaacccaaaggctcctcccttccctgcctctggtagcccctcccttctcacttactacgcagctgaccagagaaaagacaaggggtgggaaggcactgagcaggactgagtggggagtagggatgggagagagggatgggggaaggcaggtgccactagtggccaatgccattgtggttcttggtttcaggccaagatgcccttcctggtccccagctaagagtcctgctgctcagtcctctgaatgagcatcatcaaaggcctctgtgatttacagtgtccatggtggcagcttctgctggttcctggaaaatggacaaaaggatgtggcccaaattaattgctgaatttgggtccctgggtccctgctgggcattgataggggcatgctggtggaaattgggggaggaatgggtcaaattaatctccattcagcccccactcggtctttccaatgcctgctcagcaataagtgactcactgatggcttctgtgatgccacagcagcagaggcaggggctggggctactcatccaggagagccaccacaggtctgctaagtagggctgcctcaggctcccatgaaggttctcaggatgtcacccgtgctccacttgcgcttggtgtggccttgttgctccagtccagcagcagcaattgtcctaggtgtggctgtgtgcacctgctccaaagcacctccccagtcaaaacctgccaacttgggcagggtaccaagccaggaggaacagcatgggcacagagaggtgaggtagaagctaaaataagaatagaaatagtaggccgggtgtggtggctcacacctgtaatctcagcactttgggaggccgaggtgggtggatcacaaggtcaagagatcgagaccatcctggccaacatggtgaaaccccatctctactgaaaatacaaaaattagtcaggtgtggtggcatgcacctgtagttccagctactcaggaggctgagacaggagactcacttgaatccaggagccggaggctgcagtgagtcgagattgcactccagcctggccacagagcaagactctgactcaaaaaaaaaaaaaaaaaaaagaatagaaatagtaataataatggcaagcacttacatagtgatcctatgtattctaagcagtttacatgtattactttatttcgttatcacaatcccctacaaaacaggagttttttttgttgttgtttttgagacagggtctggctggctctgtcgcccaggctggagtgcaatggcctgatcacagttcactgcaacctcgacctcctgagctcaagcgatcctccctcctcagcctcctaagtagctgggattacaggcgcacctgaaaagttaagcaggccaaagcatttgtgtaaatggcccgagcacacattttaagtgagaaccatttgaagactccgagtttgcctgcgaggattcccaaagggatctgggcagctggtggccccgccccctctcttatcggagccccccagcccctccgttctccccacgcctaacttccctccggtccccccccaaccggccccacgccgctgattcgctcgcagcttctcctcaccacatcctaaccatggctgtgtttctgcagctgctaccgctgctgctctcgagggcccaagggaaccctgggggtaagcgatccctgggagagttgtgatagacgcagaggggctgaagcaagataagggccgcctagtagggtgggttgtgtgtgggaagatccaggatggctggagtgcagaacagagaagagaaagag

SEQ ID NO: 35824 - DNA, 2300 bp, Homo sapien
gagcgtaggcggccgacgaaaggctggaggggaggcacggtgggggtcccgctcgaagaggcccacaggatcggtcggcgtcctttggacaggcccttgcaggccgggaagctgggtgcccagacccagcggatgggatgagagactcctccgcaggagagattcacccggtccccagggcggccgtccagagaagctaggagaggccggaggctgtggttagggcacgtccacagggcaagacgaccctccatcccgtctcctctttctcttctctgttctgcactccagccatcctggatcttcccacacacaacccaccctactaggcggcccttatcttgcttcagcccctctgcgtctatcacaactctcccagggatcgcttacccccagggttcccttgggccctcgagagcagcagcggtagcagctgcagaaacacagccatggttaggatgtggtgaggagaagctgcgagcgaatcagcggcgtggggccggttggggggggaccggagggaagttaggcgtggggagaacggaggggctggggggctccgataagagagggggcggggccaccagctgcccagatccctttgggaatcctcgcaggcaaactcggagtcttcaaatggttctcacttaaaatgtgtgctcgggccatttacacaaatgctttggcctgcttaacttttcaggtgcgcctgtaatcccagctacttaggaggctgaggagggaggatcgcttgagctcaggaggtcgaggttgcagtgaactgtgatcaggccattgcactccagcctgggcgacagagccagccagaccctgtctcaaaaacaacaacaaaaaaaactcctgttttgtaggggattgtgataacgaaataaagtaatacatgtaaactgcttagaatacataggatcactatgtaagtgcttgccattattattactatttctattcttttttttttttttttttttgagtcagagtcttgctctgtggccaggctggagtgcaatctcgactcactgcagcctccggctcctggattcaagtgagtctcctgtctcagcctcctgagtagctggaactacaggtgcatgccaccacacctgactaatttttgtattttcagtagagatggggtttcaccatgttggccaggatggtctcgatctcttgaccttgtgatccacccacctcggcctcccaaagtgctgagattacaggtgtgagccaccacacccggcctactatttctattcttattttagcttctacctcacctctctgtgcccatgctgttcctcctggcttggtaccctgcccaagttggcaggttttgactggggaggtgctttggagcaggtgcacacagccacacctaggacaattgctgctgctggactggagcaacaaggccacaccaagcgcaagtggagcacgggtgacatcctgagaaccttcatgggagcctgaggcagccctacttagcagacctgtggtggctctcctggatgagtagccccagcccctgcctctgctgctgtggcatcacagaagccatcagtgagtcacttattgctgagcaggcattggaaagaccgagtgggggctgaatggagattaatttgacccattcctcccccaatttccaccagcatgcccctatcaatgcccagcagggacccagggacccaaattcagcaattaatttgggccacatccttttgtccattttccaggaaccagcagaagctgccaccatggacactgtaaatcacagaggcctttgatgatgctcattcagaggactgagcagcaggactcttagctggggaccaggaagggcatcttggcctgaaaccaagaaccacaatggcattggccactagtggcacctgccttcccccatccctctctcccatccctactccccactcagtcctgctcagtgccttcccaccccttgtcttttctctggtcagctgcgtagtaagtgagaagggaggggctaccagaggcagggaagggaggagcctttgggtttataaattccaaaaaggccactcaactcctagagctggatccttgaaaatctactctatcagctgctgtggttgccaccattctcaggaccctcgccatgaaagcccttatgctgctcaccctgtctgttctgctctgctgggtctcaggtgagcacctgggggccccaaagacctggtttgcctggtcaggacctttacaccctgctctacccacttcccggccctacccaccactcggga

SEQ ID NO: 35825 - DNA, 2300 bp, Homo sapien
tagacaattacttaacatcccccctcccagaagaagtggatgaaaccagtgctgaagatgaaggtgtctctcagaggaagtttttggatggcaacgagctcaccctggctgactgcaacctgttgccaaagttacacatagtacaggtgtgtggttattgcgggaggagaggatgaccactggagtggccctttaaggagctcccacatgggcttcccctgacaaccactctaaagacgatttctttcttagggtggttttcataaattgctaccaatggcagaccccaccccagtcctttgcagcagtcattgctaacaagaccactgcttgagataattatattccatgatgtaagtcatgggtgcaaacagactagcaaagaggaatacatcccagtattacttttgaagaatgctcttcctgtctcggtatcactgccaaattcccagattagacagagcaggcttttcctaaagtcaaagctttaactttctttataacttcagtcttcacttcctcttgtggaagatcaaaactgctggttcccatgtttttgtcatagtctcaaagctatggtttagtttgtgcaacatgggcctgacatcagtctgccacacaactatgtagtgaacatctgtgtactaagcattgaaagatacacaagtgtatggtgactgggccttgctctcaaagggttgaaatctgagacaataaaatattcacatgaaagttaagaatatatgatgaaaagtcagatgggccgggcgtggtggctcacgcctataatcccaacactttgggcggccaaggctggtggaccacctgaggttaggagttcgagaccagcctggccaacatggtgaaaccccatctctactaaaattacaaaaattagccgcacatggtggtgggcacctgtaatcacagctatttgggaggctgaggcaggagaatcacttgaacccgggaggcggaggttgcagtgagccaagatcgcgccattgcactccagcctgggtgacagcaagactccatctcaaaaaaaaaaaagtctgatgaaaaatatagagacaaaagtcacctgtgtcagtgcctgaagtggtatagggggaaaaagtcactgtggaaattcaagaggagaattttataagtaaattatatctcaagttttaaaaactcaggaaaaatggctggttattaaaagccaggatttcagtaagtgagaaggaaggctaacgacagtacaagacagtgaggagttgagctggttttatcatgtcggcctggggagaagggaaagccaaggtggcttccctgggtctaacatgttggtccctctcctctccccatcctcaggtggtgtgtaagaagtaccggggattcaccatccccgaggccttccggggagtgcatcggtacttgagcaatgcctacgcccgggaagaattcgcttccacctgtccagatgatgaggagatcgagctcgcctatgagcaagtggcaaaggccctcaaataagcccctcctgggactccctcaaccccctccattttctccacaaaggccctggtggtttccacattgctacccaatggacacactccaaaatggccagtgggcagggaatcctggagcacttgttccgggatggtgtggtggaagaggggatgagggaaagaaatggggggcctgggtcagatttttattgtggggtgggatgagtaggacaacatatttcagtaataaaatacagaataaaaatcaagtgtttttacgcaatggggatttaaagtgtgggcgacatggaatgaggggtgggtcagtgatcttgagctcagggcagaagccaggaattaagaagggaaatgtttgtggtggggctgctatgtttcgtgccggtccgccggtccgccgttgcgctgttctgaggtctacgaagcgtttgcagccccgtcgccagggccggccagatctgggtgggcctgggcagcgctcgctgggcggtgccgatttctggcaaggggggcgcagtctggatgtaatgggcgaggcttagcagggcggaatgggcgtggcccgaagaagccccgccccgtcccgcttagacaatgccccggagccgccagaccgtcgcgcccctgccccatcgtagtatatgagctcgcctacacaaggacccgcgctaaaagccagagctcccagtccccgaggcttgaagacggggactcccttctccaccaactctgtcctcggggggtggggccccagccgagatcacagcgcgacaggagtggggg

SEQ ID NO: 35826 - DNA, 2300 bp, Homo sapien
aaatgcagggacagggaggtgagatggagggaaacctctgttgcaggatttgggggtacagccctggctctgctggatggttccaggagagggcagcgttgcctgtcacctggtaaattaaggcacgataccctgtgggtagtcatgccagccagccaaagtcaatattgatatcaaggcagctgtagctataaagctgtaggagagaaaagagaggccgggagaggctgccaaacctgtttgatcttcaagctggccccatttacctaaggcttctcttggacacagaccagttggaacaggagaggaccctgagaagtagagttgttttgatcccctcccctcaatgggaaggggtcctgtgtgcagattttgagggtcaccatgagggaattcacacccacacagaggcatggaatcatacccttacaggatgttacagttcaagggaacgaacaccaaagatagcctttctgtcgggaggagagaaaaaggccctcccacaagcaggagaaaacccacagaagaggaagcacaagaggaaaccaccaactgctggtttccagcagcacatcacgtcactccaccccactcctcccccaagtctctccctttctttaagtttcaagctctgttttagttctgtgttcttgcactccaccatggttttctggaactgtaggtcttttgttggacagagggtgatgaggaggatagagaagggatggttggacaggagagaaattcaggatatggaggctggaattctgggtttattttttcagcaggtcataaaggtttaatagaaatcaaggttactggagagagagctgctcctcctatgtcctccctgcttatttatttaggtgtccccaaggactctactcccactattctgtctgatctttctttatccccatgacaggaccagctaacaacacccctaccccaccccctatacacatacttcaggatcgggccatgataatcccacccctctgccccatctccaaggcaacctgtcagtgagacgaggacaaagggcacaggaaggggccccaataggaaacataagtggaagcacaaagctgaccaagctacaggaacagacccctccctgcaacaaagccccttgcctcggctttatgtttccttcgcaaaagacttcgtcatctcccttcccatccctaactctactttctttttcttttcttcttcttctttttttttttttttttttgagatggagtttcgctcttattgcccaggctggagtgcaatggcaccatctcagctcactgcaaccttcacctcccgggttcaattgattctcctgcctcagcctcccaagtagctgggattacaggtgcccaccaccccgcctggcaaatttttgtatttttagtagagacagggtttcaccatgttggccagtctggtcttgactccctgacctcaggtgatccaccccccttggcctcctaaagtgttgggattacaggcgtgagccacctcacccggcccctaactctatttcctatgcccaatcccaagtgtaggccacaaggactgcaagtcctagtgctgagctgggcccggagacagtagactgcggggggcacaggacctactgagacaccagtctgggcagctcagggagtgctggcgtcaccccttccctaatcccaggctgcatggctaacggttcctatctgcagtcccagccttccacttccgagttcttctctcagaccacagtcccagcaacccagaatttggattggagtctggaagaaatgcagaatgattaaacgaccacctttccatttgaagtccccatccctgaatcttcacgggtgtgcccaagctgttagtgtcaagttttttatatgagggtcagtcgggttgtactcagattaatgaagcagggaaactgaggcagaaaagagtcctgtgttcaggagaggtcggagaaacaaggaggttttcaggactcctccttaacacccccatccccatcctgtgggagatccgaggattccccttccggactcactccctacatcgtcgagtcccgcccccctccagtcccctccccaggttcagggcggggccggtcggtgagtcagcggctctctgatccagcccgggagaggaccgagctggaggagctgggtgtggggtgcgttgggctggtggggaggcctagtttgggtgcaagtaggtctgattgagcttgtgttgtgctgaagggacagccctgggtctaggggagagagtccctgagtgtgagacccgcc

SEQ ID NO: 35827 - DNA, 2300 bp, Homo sapien
cctaatttattatttaaacccttcaagcagaggtggaagcattcgaattacatcaaattctggcagagagaagtagttctgatcagaacactcacacccctactgggacatgcccataccccttcgcacttctacacacccctgaagacagagaggtatctatcattcatgcattcggcaactatttagtgcctattttgggccaggggttggactcaaagcggtgaacataatgaagtcactgctccataaagcttatttgtgcgtctgtgtgtgtgtgtgtgtgtgtgtgtgtgtgtgtgtgtgttgcgggggtggggttatgagggagaaagaaaaaaaatatatatatatatatatataatccctttaaatgcaccatcctccccagctttgttcctagtaccctgagatggggagattcctccccagccccccaacccaagaagttaggaaagatggtgggggtgagatgacctagctgtgctaaccagtaattggaaaatcccctccagcaagaaaggtgggggaacagagttaagggctgggttaatggttacccctggcaaatctgttgagcaatggagctatagaaacttggaggaggttggtgacagctctggggagtgtcagggagggacccaccttccaatctggggtgtgaagagattagggactagtttaccaagcccaggaaggggagggagtggaaagagaagcccagagagggaaagaggagctactgagataggagaaatgcagggacagggaggtgagatggagggaaacctctgttgcaggatttgggggtacagccctggctctgctggatggttccaggagagggcagcgttgcctgtcacctggtaaattaaggcacgataccctgtgggtagtcatgccagccagccaaagtcaatattgatatcaaggcagctgtagctataaagctgtaggagagaaaagagaggccgggagaggctgccaaacctgtttgatcttcaagctggccccatttacctaaggcttctcttggacacagaccagttggaacaggagaggaccctgagaagtagagttgttttgatcccctcccctcaatgggaaggggtcctgtgtgcagattttgagggtcaccatgagggaattcacacccacacagaggcatggaatcatacccttacaggatgttacagttcaagggaacgaacaccaaagatagcctttctgtcgggaggagagaaaaaggccctcccacaagcaggagaaaacccacagaagaggaagcacaagaggaaaccaccaactgctggtttccagcagcacatcacgtcactccaccccactcctcccccaagtctctccctttctttaagtttcaagctctgttttagttctgtgttcttgcactccaccatggttttctggaactgtaggtcttttgttggacagagggtgatgaggaggatagagaagggatggttggacaggagagaaattcaggatatggaggctggaattctgggtttattttttcagcaggtcataaaggtttaatagaaatcaaggttactggagagagagctgctcctcctatgtcctccctgcttatttatttaggtgtccccaaggactctactcccactattctgtctgatctttctttatccccatgacaggaccagctaacaacacccctaccccaccccctatacacatacttcaggatcgggccatgataatcccacccctctgccccatctccaaggcaacctgtcagtgagacgaggacaaagggcacaggaaggggccccaataggaaacataagtggaagcacaaagctgaccaagctacaggaacagacccctccctgcaacaaagccccttgcctcggctttatgtttccttcgcaaaagacttcgtcatctcccttcccatccctaactctactttctttttcttttcttcttcttctttttttttttttttttttgagatggagtttcgctcttattgcccaggctggagtgcaatggcaccatctcagctcactgcaaccttcacctcccgggttcaattgattctcctgcctcagcctcccaagtagctgggattacaggtgcccaccaccccgcctggcaaatttttgtatttttagtagagacagggtttcaccatgttggccagtctggtcttgactccctgacctcaggtgatccaccccccttggcctcctaaagtgttgggattacaggcgtgagccacctcacccggcccctaactctatttcctatgccca

SEQ ID NO: 35828 - DNA, 2300 bp, Homo sapien
aaacctttatgacctgctgaaaaaataaacccagaattccagcctccatatcctgaatttctctcctgtccaaccatcccttctctatcctcctcatcaccctctgtccaacaaaagacctacagttccagaaaaccatggtggagtgcaagaacacagaactaaaacagagcttgaaacttaaagaaagggagagacttgggggaggagtggggtggagtgacgtgatgtgctgctggaaaccagcagttggtggtttcctcttgtgcttcctcttctgtgggttttctcctgcttgtgggagggcctttttctctcctcccgacagaaaggctatctttggtgttcgttcccttgaactgtaacatcctgtaagggtatgattccatgcctctgtgtgggtgtgaattccctcatggtgaccctcaaaatctgcacacaggaccccttcccattgaggggaggggatcaaaacaactctacttctcagggtcctctcctgttccaactggtctgtgtccaagagaagccttaggtaaatggggccagcttgaagatcaaacaggtttggcagcctctcccggcctctcttttctctcctacagctttatagctacagctgccttgatatcaatattgactttggctggctggcatgactacccacagggtatcgtgccttaatttaccaggtgacaggcaacgctgccctctcctggaaccatccagcagagccagggctgtacccccaaatcctgcaacagaggtttccctccatctcacctccctgtccctgcatttctcctatctcagtagctcctctttccctctctgggcttctctttccactccctccccttcctgggcttggtaaactagtccctaatctcttcacaccccagattggaaggtgggtccctccctgacactccccagagctgtcaccaacctcctccaagtttctatagctccattgctcaacagatttgccaggggtaaccattaacccagcccttaactctgttcccccacctttcttgctggaggggattttccaattactggttagcacagctaggtcatctcacccccaccatctttcctaacttcttgggttggggggctggggaggaatctccccatctcagggtactaggaacaaagctggggaggatggtgcatttaaagggattatatatatatatatatatattttttttctttctccctcataaccccacccccgcaacacacacacacacacacacacacacacacacacacacagacgcacaaataagctttatggagcagtgacttcattatgttcaccgctttgagtccaacccctggcccaaaataggcactaaatagttgccgaatgcatgaatgatagatacctctctgtcttcaggggtgtgtagaagtgcgaaggggtatgggcatgtcccagtaggggtgtgagtgttctgatcagaactacttctctctgccagaatttgatgtaattcgaatgcttccacctctgcttgaagggtttaaataataaattaggccctgtcgtgccattatgggggtggtcataccctgtacccaggaaacaggcacggtagggctgagacagaagtcctgcttgtttccgcttatttatttgaaacaccgctcatttaggtcttactttgtttgccaggcactgttctaagctctgtataaatattaactcagagggtacaaatattaacttaagagttgttgcaggaaaaaaaataagcgcctctggctctttaagtttggcctccccctcaaaacccccgcaacggtcccaaaccccttccagggactgggactacggaccctggtccgaccttctcgcgggcttcccactgcgccaatcaaatcccagaaacagtgagtgctagaggcccggctgctaagcaacggcagagggcgggaagtttgaacgttctggacccgccccgaaggcaaataggccaatcagcgtccagactcttcagctacggcagtccgcttctcctcctcgccctgtcggatctctaggctggatccgggcctctccaatcaacagcggttaggagggcggggcgcgtgcgcgcgcacctcgctcacgcgccggcgcgctccttttgcaggctcgtggcggtcggtcagcggggcgttctcccacctgtagcgactcaggttactgaaaaggcgggaaaacgctgcgatggcggcagctgggggaggaggaagataagcgcgtgaggctggggtcctggcgcgtggttggcagaggcaga

SEQ ID NO: 35829 - DNA, 2300 bp, Homo sapien
tccctcacaggaatcctcaacagatgccactgtaagtggggagagaagctgctcaggtgagtgggtcccacacatactacacactaatgcatgaattccatatgcacactacatactaaagcctactaatggcagtatacagattctcacatacaccaccccacctagtagtagtaaagcaactgccctttactgagcactggctaactgcatttcatccttataacagctttgtgtagtagctgatatgcatctcattttttgttgtcagcgcaggtacacatatacccattgatgatacacagacttgcacacatacaagcagcaggaaaaaacacaaaatgtaaggccgggcacagtggctcacacctgtaatcccagcactttggggggccaaggtgggtgaatcacttgaggtcaggagtttgagaccagctggccaacatggtaaagccccatctctactaaaatgcaaaaattagccaagcgtgttggtaggtgcctgtaattccagctactcaggagactaaggcaggagaatcgcttgaacccaggaggtggaggttgcagtgagccaagattgtgcactgcacttcagcctgggcaacagagtgagactccgtctcaaaaaaaaaaaaaaatgctaatgtaacacatggctatgttagcatggttatctttagttatagaaaacacacttcacatttctgtgatgactctcaaatttgtgtctctagttttgaactccgtatgtgaatgttaattgcatatcaccacctgcagttttcacaggcagctcaaactcagagcatccaaactgatgcccaccagatctgttcctcttcctgcattccctttgctggttaatggcattgctggcagtacaccttctcaagccatgaaccttggattgatgctagaaacaaaaaacctgtcattccaaaacagagatctaagcatgtcactcctttttttttttttttttttttgtgactgagtttcgctcttgttgcccaggctggagtacaatggcacgatctctgctcactgcaacctccacttcccgggttcaagcaattcttctgcctcagcctcccaagtagctgggattacaggcgcccaccaccacacctggctaatttttgtattttcagtagaggcggggtttcaccatgttggtcaggctggtctcgaactcctggtgatccgcccacctcggcctcccaaagtgctgggattacaggcatgagtcactgcgcctggccgtcactccactttttaaatagcctaagtagaaagaaaataacataaaccttaggaggttttcccattaccttcaggattaagattagcatcttaagcagtataatgatgttcagggtccatcacgtttaccccagttttaatttccagactcaccttccaaagccccttctaagtcctttcctactggatctaccttatattctagtcatttagggccacttgccattatggaaacatgtcatgcctgtgtttatgctgctccttctggaaagtctttttttttttttttttgagacggagtctccctctgtcacccaggctggagtgcagtggcgcggtctttgctcactgcaacctccacctcccaggttcaagcaattctcctgcctcagcctccggagtagctgggattacagggacccaccaccatgcctggctaatttttgtatttttagtagagatgggatttcaccatgttggccacgctggtcttgaactgctgacctcgtgatctgcccacctcggcctcccaaagtgctgggattacaggcataagccactgtgcccggcctggaaagtcttttccttgttctgtacctatcaaaatcttacatccaggtcaggcgcggtggctcacgcctgtagtctcagcattttgggaggctgaggtgggtggatgatttgaggtcaggagttcaagaccagcctggccaacttggtgaaacttcacgtctaccgaaaatacaaaaattagcccagcatcatggcgcatgcctctagtaccagctactcaggaggctgaggcaggagaattgcttgaactcgggaggtagaggttgaagtgagcccagattgccccactgcactccagcctgggcaacagagtgagattctgtcttaaaaaaaaaaaaaagtgcatcctcttcaaggtgcaatccaactgttaccctttggcttttacaggtacctgtaaggagttgatgtgcaccttctttgtgctcacatagtgcttgtttatgtttttctagttgcac

SEQ ID NO: 35830 - DNA, 2300 bp, Homo sapien
attattttgtgggttttgttgtcgtttgtttgtttttttaaataaggtcctgctttgtcacccatactagagcagagtggtgcagtcatatttcattgcagcctctaacttctgggctcaagcaatcctcccaccttagcctccagagtaactgggactataagcctgagatgctgcacctggctttcttggattattttgaagcaagtcccagccattatatcatttcatccataaatatttcagtgtaatttcttttttctttttttttttttttttgagatggagtctcactctgtcaccaggctggagtgcagtggcatgatctcggctcactgcaacctccgcctcccaggttcaagcgattctcctgcctcagcctcccatgtagctgggataacaggcacatgccaccatgcccaagttttttttttgtatttttagtagagacagggtttcaccatgttggccaggatggtcttgatctcctgacctcgtgatccacccgcctcggcctcccagagtgctgggattacaggcgtgagccacctcacccggccaatatttcagggtaatttctaaaagaaaattattttttaaaaagaataacagtattgttatcttactttaaaaattgtattatttggtatcatcaaatatctgaaatttttcttttttgagacagggtctcactctgtcacccaggcttgagtgcaatggcacaattgtagctcactgcagcctcaaactgttgggctcaagcgatcctcccccctcagcctcctgagtagcagggaccacaggtgatggccatcacaccgaactaagtttttattttttgcttgcatttatttatttatttatttatttatttatttatttatttttgagacgggattttgctcttgtagcccaggctggagtgcaatggtgtgatctcggctcaccgcaacctccacctcctgggttcaagtgattctcttgcctcagcctcccaagtagctgggattacaggtgcgtgccaccacgcccagctaattttgtatttttagtagagacagggtttctccctgttggtcgggctggtctcgaactcccgacctcagatgatctgcctgccccggcctcccaaagtgctgggattacaggcgtgagccattgcacctgaccaattttttattttttgtagagacaggatctcactatgttgctcaaggtggtctcaaactcctgagctcaagtgatcctcctgcttgggcctcccaaagtgctgagactattggtgtgagccacgatgcccagtcagatgatggccctagtcctttttaatctaccggttccttctctatcttttctctcttgttctttctttctttttctctttttcttctcctggcaatttgttgaagaaactagattattatttgtcttatagtgttttccattagcctggattttgctgtttgcatttcctagatgtttttggcacatttctctctcttctatagtttctgtaaattaatatttagttctagaagcatgattaggttcagagttttttttttttcaatactgttttagaagtagaggaacataatgtctgatatgtccgattgtctctctttttctgatgttggcaaatgttctgatgtttaatacctaaatctattattcatttatttatttatttatttagtttgaggtgagtctccctctgtcgccaggctgaagtgcagtggcacgatcttggctcactgcaacctccgcctcctgagttcaagtgattctcctgcctcagcctcctgagtagctgggacttacaggcgcacaccaccacgcccagctaatttttgtatttttagtagagacgggatttcaccatgttggccaggatggtcttgatctcttgacctcaggtgatccacccgcctcagcctcccaaagtgctgggattacaggcgtgaaccactacacccagccatctattaattctttagcaattacaaagtagtagcatttaaatctctgattctttcttcatttattagccagaaatttctgtaaagagaaacttccttttatgtactatttggttgccaagtgatagaaatcatatagaaatacagaaaattgcttgatatttcccccactcttttttttttgagacagagtcttgctctgtcaccaggctggagtgcagtggcacaatcttggctcactgcaacctccacctcccgggttgggtttcaagtgattctcctgcctcagcctcccgagtagctgggactataggcgtgtgc

SEQ ID NO: 35831 - DNA, 2300 bp, Homo sapien
ctgggacccagtgtccggcagtgactgcttggtttcctgtctccatggagctaggcctcacctttctccctccctggcaggtttcctggaagtggcggatgaggccacgggcgccctggcatcggcggtgtcgggctacgtgcaggccctggccagcgcaggtgtggtggctgttctggccctgggggctcccgccccccagggttgcgctgtggctctggcttctgatcgctgctccatccacctgcagcttcaggggctggtggaccctgcacgggagctgggcaagctgcaagccaagcgagttgaggcccagcggcaggcccagcgtctgcgggaacgccgtgctgcctcgggctatcctgtcaaggtgccgctcgaagtccaggaggcagatgaagccaaggtgtgtggcctgggtgggcatttcccacaccatccccttcctccatcaaaaccctggtctgggctggtccgagtgcagtggtgttgacaactaattgatcgtaaccagttacagatttctttgttccttctccactcccactagccttaaaaaacaaaacagcctggctcagtggctcacacctgtaatcccagaaatttgggaggccaaggtgggtggatcacttgagcccaggggtttgagaccagccaacatggtgaaatcccatctctacaacaaaaatacaaaaattagctggccatagtggcacacacttggggtcccagctactcggggggctgaggtgggcggattgcttgagcctgggaggtcaagactgcagtgagccgagatcatgccactgcacttgagcctgggcaacagagagaagaccctgtctggaaaaaaaacaaaacaaaacaaaaaccaatcctggtctggaagctggactctgtacccaaccctggggaatccactggggagcatggagcccaggcgctttgagcagggaccatagaaggccctccccttacacatggggagcagctgggggctgggcacaacccagggtcacacaacaggtgggagacggaggctgacctagaaccaggcatcctatctcccagccagacccttcgtaccccacccagctgcccaaaatgtggaaacctgcatgcctggggctgggcttggggtccacatgtagtcggggagccctgggcctcccaccacttactttcaagcctactgggctgaccctggaaggccagtcttgtttgtcccctgcctcctgggttccgccagagagaagcagtggagtaaactgcacagacacagagaaaaccagtcatggaggccaagagctagagagccttgagtggacgtggttaatctcacttggttctcccaagagccctgggaggggggcaatatcatcatcatcatctgacaaatgaagtgaccggcctgggagactgtgctctcctgcttaggtggggacactgaatggggaacacgtaggctctgaggttcctttgttcttggggactcaccacttggtggaaaaaggcaagacccaagaggtggtggtggaagtgggggtgctggtgggaatgggtggggagccaggccagccaggttcacgcctcctctgagctactgacctcccatggtcctcgctcatctttccaactttgttgtcctgggtgtttgggggtctcttcacttggacctgggtcctcacccaccccctggttccactccagctccaacagacagaagcagagctcaggaaggtggatgaggccatcgccctattccagaagatgctgtgatccaccacccagcttcacccctcacccccagcggctcaccatggggatggcagcaataaaatattttcccacaaaatcctcttgtcgtctgtggtgggggcagagaggggagcagaggggctgggtgcctgaatccttgggggctgcagggtgggagtgaggccctggttctggagggcagaggggtgcgtctatctgggtctgtccctggcactgtgccaggcctgagtcacgctgcttactcccttcctcctccccagctctcactcacctccgcactgcagccaagggaggcccgccctggcgtgggctgctgcctgtggctttgggcaggcaggagcgaaagggccaggggttgcctgtcctcccccaccctgttgaggccttcctccccctctgctgagcctcggttaattataactctgacctaagtgccctgtgacgtcaagcccgggccagccctgcccaggagacccagcaaccaggtaggggagggcctgagaggactcaggcttcctgag

SEQ ID NO: 35832 - DNA, 2300 bp, Homo sapien
agctgccagcagatgaggtcgacacacagttgctacaggatgcggcaaggaaggaagccctgcagcagaaacagtgatggctcctcctcctcttcccctccctctttcattggtgacccataaccccaagtcccagcccagaacccctaacccccaatacttgaaggggttttgtttttttactaatgatggttttgtgggttttttttaagggatgagtggatgagaggagtaatagggaacagctatcctctcttgagaaggggaggataagtaggctgggaaacttcaaagccttcccagtccccagcacctgcctttctcactacttctctggagatggtaggagagtttcctaggtctttccagggcagcatgtgattcatttggggatggaaggaatctgtcccgcatcgggaataaaatttatgatgcaaatttgtgttttggttctgttactatgtgttgggcagggggctgggacatggaaaaggatgtcgaattcatccaagcccctgttactctgcgttaacccagccaagaatccaactcagcttcccactactctccttggtataaagcatataatacagttgctctacaccatgtttccccaacatgtccctacctgtatgttctccctgtggccttttgcttataccatacctgcaactggagtgcttgctgtccttccattaatgtgatagtgtcataagatacatttcatgctaccagacttcaccaatccaaccaaatcagttcatgttttctgaatatgtatagaagataaatacaagtgatgtaatttatattttagagaaaagttgtgactgggaattactaaacttcattcactcattcagcaaatatgagttcatgatacagatgagacttctcagccttaagggacccttagagaccatctagtgtgaccctcctttttgtttttgagacgggagtctcactctgttgcccagggtggagtgcactggcttggtctggctcactgcaacctccgcctcccggttcaagcgattctcctgccacagctcctgagtagctgggattacagatgcccaccaccatgcccggctaattttttttttttttttttttttttgagatggagtctcactttgtcacccaggctggactgcagtggtgtgatcttagctctgcaatctccgcctcccaggttcaagtgatcttcttgcctcagcttcccaagtagctgggcttacaggtgtgtgccaccacgcctggctaatttttgtatttttacaaatactgcagctctgtcgccaggctggagtgcagtggcacgatctcagttcactgcaacctcaacctccagggttcaagcaattccctgcctcaggctccggggtagctgggattacaggcgcctgccaccacacctggctaatttttgtatttttagtagagacggggtttcaccatcttggcctggctggtcttgaactcctgacctggtgatccacccgccctggcctcccagagtgctgggattacaggcgtgagacgggctttcaccaccttggccaggctagtcttgaacttctgacctcaggtgatccgcccacctcggcctcccaaagtgctgggattataggcgtgagccactgcgcccggccgtcacccttttttcatacatgaggagatgaggctcaaagaggaagctggacgccagggcctcggcaaatggacctccccttcggtcctcatcaggcggctccctgctgggcacctccccgctaccgggtggggaacgccctccaccggcagggccggccgaccctcttgggccagttccctagctgcccgctgggcgccgccctcgccacccggccgaggacccgcacaaggtgcccgtggcggcgcctgacgggagcgtcgtgctcaggggtgtcctctcgtcctgcgtccgcgcccagcgccccgcgccccgcgctgttcctcgtgagaccggcgggcggcgagccgcgcggcccccggggcagtgtcggacacggcgggcgcgcactcgcaggcggggcacggccgcccccgccaggacccgcaggcccggaaacgctccctgtcacaaaggggggaacacgtgggcgccggctgccggggcggcgatcttagggaactagggtcacctggagagccgcccaccgtctctgcccgctcgactcctccgcccgggccgctcggccggtccagccgcggccggcgcctggctgtgaggtggattcccggcccagtctgaccatctccctccagtacgtacacgc

SEQ ID NO: 35833 - DNA, 2300 bp, Homo sapien
agcatctatgcactcacagagttcattgtttacatccattacatggagaaaatatttcttttctttttttttttttttggaaacagtttcgctcttgtcgcccaagctggagtgcaatggcacgatctcggctcactgcaaactttgcctcccagattcaagcgattctcctgcctcagcctcatgagtagctgggattacaggcgctcaccaccatgcccggctaatgtttgtgtttttagtagagacgggatttcaccatgttgaccaggctgttctgaactcctgacctcaggtgatccacccacctcagcctcccaaagtgctggaattataggcgtgagccaccgtgcccagccccagaaaatatttctataacaaactcttgacaaataagtatgtctatgcaagatgacaaatacaagttttatgaagtctcagtccatgaaaaaatatttttaccagctgggcacagtggctcacgcctgtaatcccagcactttgggaggccgaggcgggcggatcatgaggtcaagagattgagaccatcctgcccaacatggtgaaaccccgtctctactaaaaatacaaaaattagctgaggacggtgatgcgtgcctgtagtcccagctactcaggagggtgaggcagaggaatcgcttgaacccgggacgtggaggttgcagtgagctgagatcgtggcaccacactccagcctggtgatagagcgagactccatctcaaaaacatttttttcttttacctgtgtcctaatacatatttataaaaacctgggggatatgagttagaataatatgtaactgcatttctgtctgtttgtgtttgaaacatttaacagtgaaatgttagactgggttatttgtatctgtgagccacagtctctttagttttacacagtcctttacaggacagtcttggcaaaagtgtgtaagaaatgcggagattgaggttggctcctttggagaaatgtatttattggtaacctttgataaaatcaaaatttgtgctccagctcctccttatctctgggactgctcaacgttgtttgtttataattttcttttttctagagagagtctcgctctgtcacccaggctggaatgcagtggggagattgtagctcactgtaactcttgggttcaaatgatcctcctgcctcagcctccccaaatgctgggatttacaggcctcaacattttttgttttttgggatggagttttgctcttgttgcccaggctggagtgcaatggcaagatctccactcactgcaacctatgcctcctggatttacaggcgcgtgccaccacacccggctaatttttgggtttttagtagagacagaatttcgccatgttgaccaggctggtctcgaactcctgacctcaggcgatccacttgccttggccgcccaaagtgctgggattacaggtgtgagccactgctcccggtcattttttttttttttttttttgagacggagtcttgctctgtcgcccaggctgcagtgcagtggcgcgatctcggttcactgcaacctccgcctcccaggttcaagcgattctcttccctcagcctcccgagtagctggtattacaggagcctgcgaccacgcctaattttttttgtatttttagtgaagatggggtttcaccatgttggctagactggtctcgaactcctgacctcacacaatccacccacctaggcctcccagagtgctgggattaaaggcttgagccacggccctcggcctttttttctttttatcagctgaatttaagattcaaaacattttttaattttattttttaaattttatgtttttactttaacaaatatagaaaagtgcacacttcataatcttaacaaactccccacaattctcgataggaagtgtgtgtagggcacaaacacatcacgctgtagatggcaggattctggaaaagaacaaaatcctttgagctcaggcgctgagtcccgccacccgtctggcagcccaggctagggtccgcgcctgcgcaatgggagccggccggccagggaggaagtcggaatgaaggaaaccccgcccctttcccggcttcctcctcccctctactctacccagcttgcgctccccagccgcaagtcggccgcgctttgcccgtcagcgcttggagctttctgcgtcgcttcccgctgcgcctgcgcggtcccgcctcgccccacgcgcgggctcgcgcttcggtttccccagacctgctcgcagcaccctgctgtcttcccggtccggcccgct

SEQ ID NO: 35834 - DNA, 2300 bp, Homo sapien
tccagcctcagcctcccgaggagctgggactacaggcgtgcactgccacgcccagataatttttgtatttttagtaaaaacagagtttcaccatgttgaccaggatggtctcaaactcctaaccttaagtgatccgcccgcctcggtctccctaagttctgggatggcaggcatgagccaccaccgcacccggcctatatacattttgcttatctatctctcgatggatacagattacagaatttacagaataatgttgctatgagcaagcctatacaaatacatggagacgctactgtcatggcagactgctttttggacagggtagacaaaagtattctcagctactcaaagaagttgggaagcaagtagctgtatattgttttcaatttcccaagtgacctaattctactgtcctgttcctatatattttactgtgggattctgtctctttatgacccaagagtagtgtacattctggtctcttcaagagacatcagcctccacacttgagttctgctgccttcctgggataatattctctattaggggttcaccggcagtaaattccagtcaggctgaagatgactgctagaaaaccacaagccttccagttttctcaaacgacatggcactccagacagtatctgtatccttctcctaaataaaactcctgttttctggagccaataactgatcaataaagggtttaagggcggggggcggtggctcacgcctgtaatcccagcactttgagaggccgaggcgggcggatcacggggtcaggagaacgagaccatcctggctaccatcctggctaacacggtgaaacctcgtctctactaaaaaatagaaaaaattagctgggcgtggtggcgggcgccagtagttccagctactcggatggctgaggcaggagaatagcttgaacccgggaggtggagcaattagccgggcgcggtggcgggcgcctgcagtccctgctactcggaaggctgaggcaggagaatggcctgaactcgggaggcagagcttgcagtgagccaagatcgtgccactgcactccaccctgggcgacagagcgagactccgtctcaaaaaaaaaaaaaaaattaaaaataaataaataaaaataaaataaagggtttagtgtctatccctctccacaccgcagattcctaggccgcactccctttcccccgcttcccagttaccccgcctcccccttaccccgccttccccgcctccccatttccccgacaggccgcactcccttcccccgcctcccccattctggctgctccgaccaatcaatctgaagccatcttagctttccccaagtgctcctcctacccggatcagccaacgcccacatacctcaggcttaaaccaactagggaactttccagtactttcccaaacaaggacctactgagcctttcaggttcacaatcaatcagatccctactggctcacctagtctcccgacgccttcgcttcagtttggaaacgtccagattacgcagccccagcgagtaggtgggggctccctcaatatcaaactgcacaaccggggtccccccaccccccaccccgtccctccctgcaaatttgagacggctccaactcagtaatctttttccaaactggcccatgaggtcagagacagtatctccattgtaacgtggccgggcggtgtcaacacaaacgcccccaccctcccctggacgcgcgtaacccgctccccgcaccagccccctgcccacaactgcgcaggcccagcaagcccccacaattaaaagcccagcgccgacccttcctgtcaattaggcgctgaagcgcaggcggtcagcatcgccatggagaccaacacccttcccaccgccactcccccttcctctcagggtccctgtcccctccagtgaatcccagaagactctggagagttctgagcagggggcggcactctggcctctgattggtccaaggaaggctggggggcaggacgggaggcgaaaaccctggaatattcccgacctggcagcctcatcgagctcggtgattggctcagaagggaaaaggcgggtctccgtgacgacttataaaagcccaggggcaagcggtccggataacggctagcctgaggagctgctgcgacagtccactacctttttcgagagtgactcccgttgtcccaaggcttcccagagcgaacctgtgcggctgcaggcaccggcgcgtcgagtttccggcgtccggaaggaccgagctcttctcgcggatccagtgttccgtttcca

SEQ ID NO: 35835 - DNA, 2300 bp, Homo sapien
gcgccccaacagattgttgtctttcgtcatggccctctcgccctcgtacacctggatcagcaccccgggttggttgtcggagtaggtggtgaagatctgcgtctgcttggtggggatggtggagttgcgcttgatcagggcagtcatcacgcctccggccgtctccagccccagcgacaggggagccacgtccagcagcagcaggtcctgcacgttctcggacttgtcccccatcaggatggccgcctgcaccgccgccccgtaggccacagcctcgtcggggttgatgctcttgttcaggtcgcgcccgttgaagaagtcctgcagcagcttctgcaccttggggatgcgggtggagcccccgaccaggaccaggtcgtgaatctgggccttgtccagcttggcgtcgcgcagagccttctccacgggctccagggtgcttcggaacaggtcggagcacagctcctcgaacctcgccctggtgatggacgtgtagaagtcgatgccctcaaacagggagtcgatctccaggctggcctgggtgctggacgacagggtcctcttggccctctcgcaggcggtgcgcagccgcctcacggctcgcttgttctggctgatgtccttcttgtgttttctcttgaactcctccacgaagtggttcaccagcctgttgtcaaagtcctccccacccaggtgggtgtccccggccgtggccttcacctcgaagatgccgtcgtcgatcgtcaggatggacacgtcgaaggtgcccccgcccaggtcaaagatgagcacgttgcgctcccccttgcccgttctgtccaggccgtaggcgatggcggcggccgtgggctcgttgatgatccgcagcacgttgagccccgcgatcacacccgcatccttggtggcctggcgctgcgagtcgttgaagtaggccggcacggtgatcaccgcgttggtcaccgggtagcccaggtacgcctcggcgatctccttcatcttggtcagcaccatggacgagatctcctcggggtagaatgccttggtctcccccttgtagctcacctgcaccttgggcttgtctccgtcgttgatcacctggaaaggccagtgcttcatgtccgactgcaccaccgggtcgccgaacttgcggccaatcagccgcttcgcgtcaaacacggtgttctgcgggttcagcgccacctggttcttggccgcatccccgatgagccgctcggtgtccgtgaaggccacgtagctgggggtggtgcggttgccctggtcgttggcgatgatctccaccttgccgtgttggaacacccccacgcaggagtaggtggtgcccaggtcgatgccgatcgccgcggctttggccatgccggttccctgctctctgtcggctccgctctgagattgggggctggaaacggaacactggatccgcgagaagagctcggtccttccggacgccggaaactcgacgcgccggtgcctgcagccgcacaggttcgctctgggaagccttgggacaacgggagtcactctcgaaaaaggtagtggactgtcgcagcagctcctcaggctagccgttatccggaccgcttgcccctgggcttttataagtcgtcacggagacccgccttttcccttctgagccaatcaccgagctcgatgaggctgccaggtcgggaatattccagggttttcgcctcccgtcctgccccccagccttccttggaccaatcagaggccagagtgccgccccctgctcagaactctccagagtcttctgggattcactggaggggacagggaccctgagaggaagggggagtggcggtgggaagggtgttggtctccatggcgatgctgaccgcctgcgcttcagcgcctaattgacaggaagggtcggcgctgggcttttaattgtgggggcttgctgggcctgcgcagttgtgggcagggggctggtgcggggagcgggttacgcgcgtccaggggagggtgggggcgtttgtgttgacaccgcccggccacgttacaatggagatactgtctctgacctcatgggccagtttggaaaaagattactgagttggagccgtctcaaatttgcagggagggacggggtggggggtggggggaccccggttgtgcagtttgatattgagggagcccccacctactcgctggggctgcgtaatctggacgtttccaaactgaagcgaaggcgtcgggagactaggtgagccagtagggatctgattgattgtgaacctgaaaggctcagtaggtccttgttt

SEQ ID NO: 35836 - DNA, 2300 bp, Homo sapien
aaccggaaaaaaagcaagttcagtacttcaccaaaaaatttcaacattgcaaacacaggaaattgagaactgacaaacagaaatactaggaaatgcaaagtcttgaagctccaaaacaaaaacagcaatcttggaaaggcccctaatctacctcctcaatggtggggcctgacccagaccctcccttgggaccctgagccccgaagcccccaggcccgggaccaccggcaccctggtacagtccgctgatgatggggttacacacctgctccagctccttcctcttgtgctcaaactcgtccttctcggccaaggtgttggcgtccagccacgagatgacctcttgacacttgtccagcaccttcttcttgtccgcctcgctgatcttgcccttgagcccctcatcctccacggcgctcttcatgttgaaggcgtaggactccagggcgttcttggctgacaccctctcgcgctgcacctcgtcctccgctttgtacttctccgcctcctgcaccatgcgctcgatctcctccttgctcaggcggcccttgtcgttggtgatggtgatcttgttggccttgccggtgctcttgtccgtggccgtgacgttcaggatgccgttggcatcgatgtcgaaggtcacctcgatctggggcacgcccctgggggccggagggatgccgctcagctcgaagcgccccaacagattgttgtctttcgtcatggccctctcgccctcgtacacctggatcagcaccccgggttggttgtcggagtaggtggtgaagatctgcgtctgcttggtggggatggtggagttgcgcttgatcagggcagtcatcacgcctccggccgtctccagccccagcgacaggggagccacgtccagcagcagcaggtcctgcacgttctcggacttgtcccccatcaggatggccgcctgcaccgccgccccgtaggccacagcctcgtcggggttgatgctcttgttcaggtcgcgcccgttgaagaagtcctgcagcagcttctgcaccttggggatgcgggtggagcccccgaccaggaccaggtcgtgaatctgggccttgtccagcttggcgtcgcgcagagccttctccacgggctccagggtgcttcggaacaggtcggagcacagctcctcgaacctcgccctggtgatggacgtgtagaagtcgatgccctcaaacagggagtcgatctccaggctggcctgggtgctggacgacagggtcctcttggccctctcgcaggcggtgcgcagccgcctcacggctcgcttgttctggctgatgtccttcttgtgttttctcttgaactcctccacgaagtggttcaccagcctgttgtcaaagtcctccccacccaggtgggtgtccccggccgtggccttcacctcgaagatgccgtcgtcgatcgtcaggatggacacgtcgaaggtgcccccgcccaggtcaaagatgagcacgttgcgctcccccttgcccgttctgtccaggccgtaggcgatggcggcggccgtgggctcgttgatgatccgcagcacgttgagccccgcgatcacacccgcatccttggtggcctggcgctgcgagtcgttgaagtaggccggcacggtgatcaccgcgttggtcaccgggtagcccaggtacgcctcggcgatctccttcatcttggtcagcaccatggacgagatctcctcggggtagaatgccttggtctcccccttgtagctcacctgcaccttgggcttgtctccgtcgttgatcacctggaaaggccagtgcttcatgtccgactgcaccaccgggtcgccgaacttgcggccaatcagccgcttcgcgtcaaacacggtgttctgcgggttcagcgccacctggttcttggccgcatccccgatgagccgctcggtgtccgtgaaggccacgtagctgggggtggtgcggttgccctggtcgttggcgatgatctccaccttgccgtgttggaacacccccacgcaggagtaggtggtgcccaggtcgatgccgatcgccgcggctttggccatgccggttccctgctctctgtcggctccgctctgagattgggggctggaaacggaacactggatccgcgagaagagctcggtccttccggacgccggaaactcgacgcgccggtgcctgcagccgcacaggttcgctctgggaagccttgggacaacgggagtcactctcgaaaaaggtagtggactgtcgcagcagctcctcaggctagccgttatccggaccgcttgcccc

SEQ ID NO: 35837 - DNA, 2300 bp, Homo sapien
aaagtgccaattgagcaaagtgtttaaaaacaggattattccttcatcagtaacttcttcctttcatttgtgctcaaggaatatcgccatggcaatgaggctattttttttttcttttcttttttttttttgtggtaggttgtaaacacagtactattgcttcaaccccctcacattttcctttcagacgcctaacaaagggtcttgcattcacactaagaatgaaggaaaaaaacaaagggaaagtaaattactaaatgcaaccgtatttaaaacaggaggaaggagaatccgcaggaagttggaatctaggataaaaacttagacacattcagcctggccaacatggcgaaaccctgtctctattaaaaatacaaaaattagcccggcgtggtggcacatcctgtaattccagctattggggaggctgaggcagcagaattgtttgaaccccaggggcagaggttgcaatgagcagagatctcaccactgcactccagcctgggcgacagagtgagactcagtctcaaaacaaacaaacaaaaacaacaggccgggaatggtggctcacgcctgtaatcccagcactttgggagcccgaggtgggcggatcacgaggtcaggagttcgagaccagcctgaccaacatgggcggatcacgaggtcaggagttcgagaccagcctgaccaacatggggaaaccctgtctctactaaaaatacaaaaattagccaggcgtggtggcgcacgcctgtaatcctagctactcaggaggctgaggtaggagaattgcttaaacccgggaggcggaggttgcagtgagccgagatcacgccactgcactccagcttgggcgacagagcgagactgtctcaaaacgaaaacaacaaacttaagacacataacctgaggtgttaagaggagctagtaactagaacctgggtcccaacccctcctgctttccagcatcactccacacagtttgcttaaagagggccacctgccaaacagctgtagtatgtgatgttaaagagagctaaacaccccccgcacctccctcccagggtcaccatcttgttaaatttgacctaaaaacggtaacagcctaggggtttcagggacagacagaaaatcttactcgggactgtgaggtcctacttctacacaccgtccaggagtgaaccaggaattgagaaagtaggaaggaggtgtcccagaccccaagctaggaatggggagggaaatggaggaatcccaaatgccttaaggacggcctacatactaaggaaaatttttttctaactcctggttgcagctgaggggagcggctgagggcggggacaggggtgcggcggacccactgctcccattacccgaccagcgcctcccttcctccttggatgggtgcccctgtcttgctaagaactgcctgtttacacaactgctttccttgtgaaaatttaaaggctcctattcccagttgttctatccttgtaggttaaagattatgtcaaaaactatattgcattatctctttccttctccttcccattaagacggaaaaaacatccgggagagccggtccgtttctcaggcagactaggccattaggtgcctcggagaaaggacccaaggctgctccgtccttcacagacacagtccaatcagagtttcccaggcacatcgatgcaccgcctccttcgagaaacaaggtaactttcgggttctggttgtctccaaagtcatccgaccaatctcgcaccgcccagagcgggcccttcctgtcaattacctactgaagggcaggcggccagcatcgccatggagaccaacacccttcccaccaccactccccctttctctcagggcccctgtcccctccagtgaatcccagaagactctggagagttctgagcagagggcggcaccctgccctctgattggtccaaggaaggctggggggcaggacgggaggcgaaacccctggaatattcccgacctggcagcctcatcgagcttggtgattggctcagaaggggaaaggcgggtctccacgacgacttataaaagccgaggggcgcgcggtccggaaaacggccagcctgaggagctgctgcgagggtccgcttcgtctttcgagagtgactcccgcggtcccaaggctttccagagcgaacctgtgcggctgcaggcaccggcgtgttgagtttccggcgttccgaaggactgagctcttgtcgcggatcccgtccgccgtttccagcccccagtctcagagcggagcccacagagcagggcac

SEQ ID NO: 35838 - DNA, 2300 bp, Homo sapien
aaaaaaaaaaaaaagaggaactaaagcctctgaccatagcacttagtaaaggcagcttaactgccaaaacagcaggaattagggctttctgtatatatatatattttttttaaggcagggtctcactctgttgcccaggctagagtgcagtggtatgatcacggttcatggcagcctcgacctcctgggctcaattgatccttagcctcctgattagctgggactacacgtgtatgccaccacccatagctaatcttttttttatatacttgccaggcagtagagggaacaaatactttagctttgagccatggctctccaccgtaatggaacaataaaacgattaagggatgctaaaaaaatacagatgccaggcctctctcaggccaattcagaatctcaaagagggcagtgtagacatttaaagctgcccaggtgtttgtaatttgcagccaatgtggagaaaaccactgaactgggctggccacggtggctcacgcctgtaatcccagcactttgggaggccgaggtgggaggatcactgaggttcaccagttcaaaaccagcctgggccaacatggtgaaaacccctgtctctactaaaaatatataaaattaactgggtgtggtggcagatgcctgtaatctcagctactcaggaggctgaggcaagagaatcacttgaacccgggaggcagaggttgtagtaagccgagatcatgccactgcactccaatctgggtaacagagcaagaccctatctcaaaaaaaaaaaaaaagaaaaagaaaaaaaaaaaaaggaagaggccaggctcggtggctcacacctataatcctggcactttgtggaggcctaggcaggcaaatcacctgaagtcaggagttcgagaccagcctggcttacatggtgaaaccctgactctactaaaaatataaaaattagccaggcatggttgtgtgcacctgtaatccttgctacttcggaggctgaggcaggaaaatcgcttgaaccgaggaagcggaggttgcagtgagccgagatcccgccactgctctccagcctgggcaacagagtcagactccgtctcaaaaaagaaaaagataccaacacacacaacacacatcaccaaacatcatacgcgtttataaatgggggcgataggaaagggtccagaaaggatttgaaatgacttatgagtttcaataatttttttttttttgagacagagtctcgccctgtcgcccaggctggagtgcagtggcgcaatctcggctcactgcaagctcggcgtcctgggttcacgccattttcctgcctcagcctcccgagtagctgggactacaggcgccgccaccacactctgctaatttttttttagtagagacggggtttcaccgtgttagccaggatggtctcgatctcctgacctcgtgatccacctgcctcggcctctcaaagtgctgggattacaggcgtgagccaccgcgcccggcctaatttttaaataaatagagacgggggttgggtgtcactatttgcccaggctggtcccgaactccgggcctcaaatgatcctctgcctgggcctgtccaaagtgttgagattacaggcgtgacctattacgtccgacctgccttttgggtttttggtttttgttttgttttgtttaattgaaggttagggtgcctgacagtctgcgggatcgaactgggaggcaaattcagatttcgctgggggaacggagtgcgaagtgtcagggtagctggacgctaaactggcgcagctgcgcgcgcccgcgcgcgcgcgggaagagtcccagggtcattaacggaccatgggctgctgggaaacggcttaggagcagcacccggctggcgctggccggccggcgccggggactttcttccgcctggccagacagatccctgttttttgtttttcaaaattcagaaagcatctccgaatatttgcccagaggagtgtgaaacatactttcctggtctttctttcactttgttttatttctgtgtggacaaacaatggggaaaatgccgcgcgtctagccaggcagataagaaaacaactatacccgtcaggcccccaacccggcgccgccataaatggccccggcctcgccattttagttctttttgcgaagtgggctcgtgggttggcagtatgagagttgtaatggcccgactgttgagtgagggggagcaggggatcccaacggcttgcgctgcctttgcgcagcagccggcgggcggccacgtcgcggcctggctggggtaggagagg

SEQ ID NO: 35839 - DNA, 2300 bp, Homo sapien
agggaccagaagctgtggggacagagggtaggggtgctgggcagctgaagaggtggcctcagaggtgcagcactaacccccagaattattccacaggggtcctgtccttcttttttttctccggtcgcatcccggggctgggtaaagactttaagagcccccacctcaactattactggctgcccatcatggtgagtgactcccctctctgctgctccacccccaactccccagaggaacccaataaccccaacgggtcatgtcttccagacctccatcctgggggcctatgtcatcgccagcggcttcttcagcgttttcggcatgtgtgtggacacgctcttcctctgcttccgtgagtgacacccccagccacctgtccccaaccttaaagtactgagccgttcaagcatttttttttttttttggagatttggtgcttctagaaacaatgcctttgtgagctaaacgaaccagagggagcttcttgtgacatcctgaggccaggcgtttagggaagaaggaagagagtgagcccccaggccggtaggctctccaaagaaggagcattctgatggagaggtctctgctatcttccctaagaaatctcgggtagaagttagccattagaggccaggcatggtggctcacgcctgtcatgccagcactttgggggaccgaggtgggcagatcaccctgaggtcaggagttcgagaccagcctggcccacatggtgaaacccctctctactaaaaatacaaaaaattagctgggcgcggtggcgggcgcctgtaatcccagccacttgggaggctgaagcaggagaatcgcttgaactcaggaggcggaggttgcagcgagccgagattgcgctactgcacttcagcttgggcgacagcaagactccgtctcaaaacaaagaaaaaagattaaaaaaaaaaaagagccattagagagacttcccagcaggtggctgtagcggcaggggattttcttactctacagcatgcatccattcagggtttgccagtctcctcctaagcgactgacatgcattttttccgctaattcttatcatcgctctatgcaacataatattcccgaccccacttcacaggaggaaactgagattacataacctgcccgggggtaagggtggtggtgcagcttggattccaaatcccgcaggcagcttgcctcccagtccccgatttcctggccccagggtccgctctaaccggtctctgttgcggctcagtggaagacctggagcggaacaacggctccctggaccggccctactacatgtccaagagccttctaaagattctgggcaagaagaacgaggcgcccccggacaacaagaagaggaagaagtgacagctccggccctgatccaggactgcaccccacccccaccgtccagccatccaacctcacttcgccttacaggtctccattttgtggtaaaaaaaggttttaggccaggcgccgtggctcacgcctgtaatccaacactttgagaggctgaggcgggcggatcacctgagtcaggagttcgagaccagcctggccaacatggtgaaacctccgtctctattaaaaatacaaaaattagccgagagtggtggcatgcacctgtcatcccagctactcgggaggctgaggcaggagaatcgcttgaacccgggaggcagaggttgcagtgagccgagatcgcgccactgcactccaacctgggtgacagactctgtctccaaaacaaaacaaacaaacaaaaagattttattaaagatattttgttaactcagtaaatctgtgactcattctctccacgacgacaggcggcctttttttttccgcgcccggctctttaaaatcggccccgcccctgtgacgtgtcctggtgccgcggccaatcaaaaagcccaataaggatggtgccagtcccttcttcaccccagccagtccgcttcccgttcgggtcacgcgctccgggcctccaagagggcctccaagagggccaatcggaagggcaagcttcgagatgctgcgtgatcacgtgggaggagatgagctacttgaagaccaattagagtccgggaagcgcggcggggcctccagaccggggcgggcttaagggtgacatctgcgctttaaagggtccgggtcagctgactcccgactctgtggagtctagctgccagggtcgcggcagctgcggggagagatgactggggagcgacccagcacggcgctcccggacagacgctgggggccgcggattctgggcttctggg

SEQ ID NO: 35840 - DNA, 2300 bp, Homo sapien
ttcagggaggctgaggtggggtggggacagcagggaaaggctgtggaagagcacggacaggtctggagcctgagttgggggggtgtctcctgcccaccctacctcgcctcgctcctgcactcctcttctcgcctttgtactcacttgttctcccccatgccacagtaggccccagtagagttcctggggtagaggacttgccgggggtctccatacaaccaggctgcagacagaggcacagatgagtcattggagggcagggacttagtggggcagttatgggaatggtccctccctgggttcctgtccctcacccactgccctggctctgagcagctggaaactcacccacaatccccaccacgatgtaacctagaatgaagagcaggaagaggacgcagcagatgacatctgtgcagcttctgagagagaaacgaaacgggaggctgagctaaggagacttggggaggtagggcttatggtctggaggggttaagggttagagagttgggtgatgctgcagcatgggcatcagtaggctttatttttatttttttattgcttttacttttttattttgagacagggtctcactctgtcacacagactggagtgcagtggtgcaatcttggctcactgcagcctctgcctcctgggttcaagcaattctcctgccttagcctcccgagtagctgggattacaggcgcgtgccactactgcccggctaattttttttaaatattttatttagaaaacctagccaggcacagtggctcacgactgtaatactagctacttgggaggctgaggcagggcaatcccttgaggccaggagtttgagaccagcctgggcaacatagtgagatcccatctcaaagaaattagcctggtgtgatggtgcatgcctgtagtcccagctactcggaaggctagggcaggaggatcacttgagcacaggagttcgagcctgcagtgaacccccatctccaaaacacaaaaagaaagaaaacctttttctgggtgggtaaactttcttctgaagtaaaagacagaaaagcacacaactcgcaagggctcagctgggtgagttctctcgcttgtgaagccggcacttaagtcaagaaacagaacatccccccagaactgggaagccctcgatgcctgctccagacacaacaatccccccagggcaccacccatctggggcaggagtttctctttttcacaagtttcctactaatattttagcaaatacaaagcaaatactggattccacactgcacccaccacccccgccagcccccggagcagtgcccagagctcacctgttcttgatggggcctcgaaaggaggggtcgtatttgactggcttccctgagggacatgagaagaggtgtggaggatgagtctctctctgcatatcttgtcctgctgagtcctcctagccccaggatcctacccaggcctcaggtgtttggagggagatgggctagggcaggactggcaggaggggaaaactggggagcaggaaaggtaggatccaggcctggtcagcagctcagcagctccctgggagctccacccaggctgccatggggaggggaaggaaggcctttatagtttccggctcacatctcaaggcagtcagtctgggaaatggccttggtcccctgccctaccctggcacggttctcctgagtctccctttagctgggatgtgggactcccagtggctctcactccctcattctcatccctgcctcctccctaatccctccccagggaccacacagacccacagcccctcagggaggtcatggcctcttcccctatctgccccaggccctaccttaccctctggttcaaggctatggggaaagaaactggagacaaaggtgtcaaccccagcagggcctggggagggaagcggccctgtacatcctcactctggtgggacctcagtcccctggccacagtgtgctccgggctctgggccagcagtcagagtgacacctgagcccagccatagagattgcaggcacgttgagttcctggtcctccctgagtacacacacagggaggaggagggctgggcagtcagggttccttgtgggcactgaggagggagagccgagggctgggcaggagtctgggaaggagcgggtggggtccactttccccaggtgcgctggactctgtccctccatggctcatggacaatgattgacctgaagccgctccaggaagtctactcgggagtcctcactgcctgctcccctatggccctaagggactcaag

SEQ ID NO: 35841 - DNA, 2300 bp, Homo sapien
cacaggtatgtcggggagctgatctctgatgctgaggctgatgtgagagaggatgattcttacctcttcgacttagacaacaaggtgagcaggagaccctccttaccctgctgctccccagggctggctttcaggagcctctgggaagtcagcaaatggaaacctggggaggagggactggggagtcagtgggtggggagggcaagcagggtcgggggagatgtgaagagtgccatccccctgccccaggatggagaggtgtactgcatagatgcccgttactatggcaacatcagccgcttcatcaaccacctgtgtgaccccaacatcattcccgtccgggtcttcatgctgcaccaagacctgcgatttccacgcatcgccttcttcagttcccgagacatccggactggggaggagctagggtgagactctaggggtctctaggggctctgccagggggtgggagatgcagcaaacctgggacctgaaggctggcatgtacctggtgtccaggcatggagtagtgcagagcttctcagatttcagtgtacataagtatttcctggaggacttggggaaacagtcctgtgcctcccagagagattttgaatcagtaggcttgggatggggcccaggattctgcatttctaaaaagtccccaggcaatgctgatgctgaaagtccatagaacatacaaggggctcagatcccatctggagaagataggttgggtgtcgggtccctctcagggagcaggatccacagggtcttcggggtgggctcttggtggctgggtccaggtcccacaagctcctgttttcctctgacaggtttgactatggcgaccgcttctgggacatcaaaagcaaatatttcacctgccaatgtggctctgagaagtgcaagcactcagccgaagccattgccctggagcagagccgtctggcccgcctggacccacaccctgagctgctgcccgagctcggctccctgccccctgtcaacacatgagaacggaccacaccctctctccccagcatggatggccacagctcagccgcctcctctgccaccagctgctcgcagcccatgcctgggggtgctgccatcttctctccccaccaccctttcacacattcctgaccagagatcccagccaggccctggaggtctgacagcccctccctcccagagctggttcctccctgggagggcaacttcagggctggccaccccccgtgttccccatcctcagttgaagtttgatgaattgaagtcgggcctctatgccaactggttccttttgttctcaataaatgttgggtttggtaataaactgcgatttttgtgttggggtggggagaaagcatacttggctagagggaatgtgggtccaagggccagaataggatgggaagcaggctggacaggtgtggctggtgtgatggccgcccagtgcggggcagggaggtggggggccactatgaagatccagtttcacaggcacggtggctgacacctataatcccagcactttgggaggccaaggcaggcgaatcacctgagatcaggagttcaagaccagcctggccaacttggtgaaaccccatctttcaaaatagaaaaaatttgctgggcgtggtggcaggcacctgtaatcctggctactccagagactgaggcaggagaaccgcttgaagccaggaggcggaggttgcagtgagccaagattgagtcactgcacaccagcctgggcaacaagagcgaaactccatctcaaaaaggaaaaaacaggtccaatttccacactttaatctttggcgggagcgtgttgggagtgtacggcagttaaggtagttggcgagattataaagcgttttcttatcagagcatgccaggtcgttcactgtggtccgtagtgcccccaggaaatagccctgagcccccgtcccaggctccagctccccagcccgctgggcacaaagttgagaagaaggaactagagtgtgtcggggaccacaggcgggggtggggctgtgacgtgtgggagggcggggcgggcagcaggtgagacgccaggtctccagggctccaatcactccggagactgagccatggggggaaagcagcgggacgaggatgacgaggcctacggtgagactggggcgaggcccgggaccctgtggagggaggggaggacgggtactttgggaatggtgtctggggctggctccagggagaggaactaaggagagtactgtgtccctgaggggagggcccgggaaccgggagccatg

SEQ ID NO: 35842 - DNA, 2300 bp, Homo sapien
ctctcttctcacccatcctcactgcgcacagctgtcaggctgcaatgccgccatcctcaagcgggagaccatgaggccatccagccgtgtggccctgatggtgctctgtgagacccaccgcgcccgcatggtcaaacaccactgctgcccgggctgcggctacttctgcacggcggtgagtgaccagtggggcagacaggtagcatgccctgtggcagagggggccccagtaacctgaccatgtcgtttccctgctcccagggcaccttcctggagtgccaccctgacttccgtgtggcccaccgcttccacaaggcctgtgtgtctcagctgaatgggatggtcttctgtccccactgtggggaggatgcttctgaagctcaagaggtgaccatcccccggggtgacggggtgaccccaccggccggcactgcagctcctgcacccccacccctgtcccaggatgtccccgggagagcagacacttctcagcccaggtactggcctcccccttctgtactgtctgttccctcccccacccctattgctcctggacatgagctccttcttccacagtgcccggatgcgagggcatggggaaccccggcgcccgccctgcgatcccctggctgacaccattgacagctcagggccctccctgaccctgcccaatgggggctgcctttcagccgtggggctgccactggggccaggccgggaggccctggaaaaggccctggtcatccaggagtcagagaggtgagtggggagttgctcaggcacagcaactggggctgaggccagaggagtggtgtcgaggctgatgctggaatctgaggagctccccttctctccccgctcccgtgctcccttggcaggcggaagaagctccgtttccaccctcggcagttgtacctgtccgtgaagcagggcgagctgcagaaggtgatcctgatgctgtgtgagtgccacccattccttcagcagaccttgaccaagcttcatgtatataccaggcactgggtacagggccaggagtacagtcgtgaaggacacagtccttgccctgaaggacttagtgtggtggggaaaagacacatgtaacccataacgatggggatgtggtgactcataggtgctgggtcctgttctgagtgcttatacctgttagccttggcttgcacagagaggttagggaccttgcacagtgcacagtggtactgagaagcaaggcagggtttgaattcaggcagagctgatgcctttgactccttattctgataaatgctgtggtggaggcaagctcggagaatgccaggaggggccctgatccagcttggggccctgagaagccttcctgaaagaagtgccacctgccccctagcttgcttaccacttgtccctccctctcccggtgtggcgggctctccccgcagtggacaacctggaccccaacttccagagcgaccagcagagcaagcgcacgcccctgcatgcagccgcccagaagggctccgtggagatctgccatgtgctgctgcaggtcagcacgggcccggccccatgcctcattcaccaggcccttaggcccctcccctgccccatgcctccctggtgccagccctcctgccccctcacaggctggagccaacataaatgcagtggacaaacagcagcggacgccactgatggaggccgtggtgaacaaccacctggaggtagcccgttacatggtgcagcgtggtggctgtgtctatagcaaggtgtgcgcgcaggcagcagggcgtggcccccggagtcagggaccaggtttggggtgccagcccaaaggctcatttgcccgtgtctccctcaggaggaggacggttccacctgcctccaccacgcagccaaaatcgggaacttggagatggtcagcctgctgctgagcacaggacaggtggacgtcaacgcccaggtcagcggcccacccagcccagcccctctgggtccctggtgcctgggttccttggcttggcctcaggctttgggccgcctttcctacatctgacctcacactgctcgtgtctgtcctcattgctttcttcttcctcatttgtatttctcttcattcttttctttctcgtttctttctctttatcaagtttcagaataatcagttcctgtcttaatctctgaaagtgtccagtgaggctttttattaactcttgggttgtcatacattggatgtgttttagtcatttattggcattcttctcagtctttgaattattccatcattgtccagaagaagccccttt

SEQ ID NO: 35843 - DNA, 2300 bp, Homo sapien
ctatcgagattgtctatcttggtgtatatcatttatacttaaattgtccgctgggctatgacccacggagtacctgactgtgcttatgaagtgttcggcaaaaaaggtttacttactgcagtgtcaccagtcagtaatgacgttcgggccgctgggcttacctggatccctagtgcgtgtgaaggtgtaacacgcctgatataaacagaagagacatttagccacaggttttcagaagggcacgctgctccaggggacatgaagcagcatgctagaaccagccaagaataaaggtgtcctccgcgtccctatcgccccttcgtgctcgttagaaagagcaaaaaggcgaggccaaaactgaggccaagccttctatctggtaacccaaaaactagaaaggcagaaaagcaaccagaggcgggaaaagcccaaccaggccagaggaaatacagccgctgccgagagccgagaagttcagaagctccgcttgttacctaaaaccagatggggacagagacgccacacctgggcccaggcgtgtctcgccctcggtccctgcagaactgaggccaggaatgacaggaattctcccttgcagctcccagcttaggacagtcacagccatctccgaggccgctctcaggggaaaatggccaaaaagcatgtagcggctcctttaaggctcctcctcgccctccctccctcgcccacgtgacccggggcggccgcgcgccggctcggcccccagcgcaagcggcgatggcggcggcggcgggagctgcagcggcggcggccgccgaggtgcggaaggggagggggagaggcgggtgcatgcccgcgcgcgcgcccgggggaagcgcgcgcccgtgcaatgctccgggggtgcaacggggccggggggcccgggcgggacttgcagcaatccagggggccagcaccgggggcggatgaggggaccagggtgtgggaggtggggggagtgggcacggaggcgcgcgtgcagccgccggctgcccctgagtgggcgacgggcgccggggccccaggagcacgcgtgaggggcacgaggggccgtccaccgggctggggggcagcgggtgctggaggggttggtgcccggggtccccgcggcctgggggacaaagggggagcggcgcgtgcagccgggaggagggggcggggccggggcgcggaggccccgccccctccccctcctcttctctcggccccagagatgcggggtctaccgagagggagggggttgatgcgggcccgggggaggggtcgtgcggcccctccgggcagccgaggccgcggaaggggggggccccacagaggaagaggtaggccccggagcctactctctcttcccagggcccaggcatcctggaccccccaactctctactgggctgaccagccctcctgtcccttgtctcccctcccagggggaggcccccgctgagatgggggcgctgctgctggagaaggaaaccagaggagccaccgagagaggtgagtgcagctaaaacgggccccaattggaccgtcaccttccctaaacacaggatctcctgagcccttagctctgaactttttctcttcctctacagttcatggctctttgggggacacccctcgtagtgaagaaaccctgcccaaggccacccccgactccctggagcctgctggcccctcatctccagcctctgtcactgtcactgttggtgatgagggggctgacacccctgtaggggctacaccactcattggggatgaatctgagaatcttgagggagatggggacctccgtgggggccggatcctgctgggtgagaggctgggtagcctggggggttggtgggaaatttctgactcttgccttctttcttatcttgccttttgcttgcctgttttctaggccatgccacaaagtcattcccctcttcccccagcaaggggggttcctgtcctagccgggccaagatgtcaatgacaggggcgggaaaatcacctccatctgtccagagtttggctatgaggctactgagtatgccaggagcccagggagctgcagcagcagggtctgaaccccctccagccaccacgagcccagagggacagcccaaggtccaccgagcccgcaaaaccatgtccaaaccaggaaatggacaggtgagtgggatgggagagatgggataatcaaccataaacctttggtgagctcttttacagtttcacttaaggcttctactccatttactcattcacatatttaagcaaggggctgctgtgtgtcaa

SEQ ID NO: 35844 - DNA, 2300 bp, Homo sapien
acaaaaaaaaacttttttttttcctttacactctggcaactgcgtgtacatgactatcctgccctagacagcctctccctgtgatgctgcgttcttaatacctagaggtcacaactctgcatatcccttgcctgaaggagcccagccctaaacatgggagaggagtgtgacaagtgagctcctctggtcagggactcccccaagtccccacccccagccctccaccagttctgcaatctcaacacttagccaggtacctcacagtacaagtgattggcagtcgtggggatgcacatgaactctatttgagggacttaggatcagtgctagggatgagctacaggtggccaacctgcccacggaaattgtaagcaggagtctgtttggtcatattttgtctggggtaaataggtcatgtcttcaggaaagctaaaaaaaaaaaaaaaaagctaagtttggattaaggtgcagggaaaactacaattcccagaaagctctggaatagttaaccaaagagaactacagttcccagaaggcctttaattggcctcaggtgccccacctgcctgtgtcaaatactgcgtgtgaaatcatacagatcttttccaaactcgaccaaaacgtaatacctaaagggatggtaccctaaatacagctatcgagattgtctatcttggtgtatatcatttatacttaaattgtccgctgggctatgacccacggagtacctgactgtgcttatgaagtgttcggcaaaaaaggtttacttactgcagtgtcaccagtcagtaatgacgttcgggccgctgggcttacctggatccctagtgcgtgtgaaggtgtaacacgcctgatataaacagaagagacatttagccacaggttttcagaagggcacgctgctccaggggacatgaagcagcatgctagaaccagccaagaataaaggtgtcctccgcgtccctatcgccccttcgtgctcgttagaaagagcaaaaaggcgaggccaaaactgaggccaagccttctatctggtaacccaaaaactagaaaggcagaaaagcaaccagaggcgggaaaagcccaaccaggccagaggaaatacagccgctgccgagagccgagaagttcagaagctccgcttgttacctaaaaccagatggggacagagacgccacacctgggcccaggcgtgtctcgccctcggtccctgcagaactgaggccaggaatgacaggaattctcccttgcagctcccagcttaggacagtcacagccatctccgaggccgctctcaggggaaaatggccaaaaagcatgtagcggctcctttaaggctcctcctcgccctccctccctcgcccacgtgacccggggcggccgcgcgccggctcggcccccagcgcaagcggcgatggcggcggcggcgggagctgcagcggcggcggccgccgaggtgcggaaggggagggggagaggcgggtgcatgcccgcgcgcgcgcccgggggaagcgcgcgcccgtgcaatgctccgggggtgcaacggggccggggggcccgggcgggacttgcagcaatccagggggccagcaccgggggcggatgaggggaccagggtgtgggaggtggggggagtgggcacggaggcgcgcgtgcagccgccggctgcccctgagtgggcgacgggcgccggggccccaggagcacgcgtgaggggcacgaggggccgtccaccgggctggggggcagcgggtgctggaggggttggtgcccggggtccccgcggcctgggggacaaagggggagcggcgcgtgcagccgggaggagggggcggggccggggcgcggaggccccgccccctccccctcctcttctctcggccccagagatgcggggtctaccgagagggagggggttgatgcgggcccgggggaggggtcgtgcggcccctccgggcagccgaggccgcggaaggggggggccccacagaggaagaggtaggccccggagcctactctctcttcccagggcccaggcatcctggaccccccaactctctactgggctgaccagccctcctgtcccttgtctcccctcccagggggaggcccccgctgagatgggggcgctgctgctggagaaggaaaccagaggagccaccgagagaggtgagtgcagctaaaacgggccccaattggaccgtcaccttccctaaacacaggatctcctgagcccttagctctgaactttttctcttcctctacagttcatggctctttgggggacacccctcgtagtg

SEQ ID NO: 35845 - DNA, 2300 bp, Homo sapien
agagagggaagatgattccttggagagacttgctcttgagagtgcaagaatctggagctgggaaaagggttcttggaggccaggggaatacggggtcccagagaaagatttccttctcttagaagtgcatgtatatgtggagggagggaaaagggtcctatagaatgagggaagacaaaaatgttttattcctggctaaggctgcccaggggaaggttctgacatttctcgagataagaagggttggggggtgggtgggaacagggagggaatttggcaggaggacatgctcctgcttagaatagacctggggtgagggagtggtaaggggaaaagattactgagtcccagaaaaggaagtgggagacagttcttgcatgctggggaaatgagactgcgagtatgaggcttgctgaaatttgagggagaacaaagtaagacgccaggtaagagaacgtggggtgcgcatcctgggtagatattgggaagtgggggtacaatagcaagaaacaatggatagtcatgggggtgggggggatagggcacttagaaaagaaagaacacaagaagggctgttgggagggagggagaggagtagagacatacagtattttttaagaaaaaacatattttttaggattttttctggagtttggggttttagtttttctgcttttgttttccacaaaataaaaaacaaaaaaaaacttttttttttcctttacactctggcaactgcgtgtacatgactatcctgccctagacagcctctccctgtgatgctgcgttcttaatacctagaggtcacaactctgcatatcccttgcctgaaggagcccagccctaaacatgggagaggagtgtgacaagtgagctcctctggtcagggactcccccaagtccccacccccagccctccaccagttctgcaatctcaacacttagccaggtacctcacagtacaagtgattggcagtcgtggggatgcacatgaactctatttgagggacttaggatcagtgctagggatgagctacaggtggccaacctgcccacggaaattgtaagcaggagtctgtttggtcatattttgtctggggtaaataggtcatgtcttcaggaaagctaaaaaaaaaaaaaaaaagctaagtttggattaaggtgcagggaaaactacaattcccagaaagctctggaatagttaaccaaagagaactacagttcccagaaggcctttaattggcctcaggtgccccacctgcctgtgtcaaatactgcgtgtgaaatcatacagatcttttccaaactcgaccaaaacgtaatacctaaagggatggtaccctaaatacagctatcgagattgtctatcttggtgtatatcatttatacttaaattgtccgctgggctatgacccacggagtacctgactgtgcttatgaagtgttcggcaaaaaaggtttacttactgcagtgtcaccagtcagtaatgacgttcgggccgctgggcttacctggatccctagtgcgtgtgaaggtgtaacacgcctgatataaacagaagagacatttagccacaggttttcagaagggcacgctgctccaggggacatgaagcagcatgctagaaccagccaagaataaaggtgtcctccgcgtccctatcgccccttcgtgctcgttagaaagagcaaaaaggcgaggccaaaactgaggccaagccttctatctggtaacccaaaaactagaaaggcagaaaagcaaccagaggcgggaaaagcccaaccaggccagaggaaatacagccgctgccgagagccgagaagttcagaagctccgcttgttacctaaaaccagatggggacagagacgccacacctgggcccaggcgtgtctcgccctcggtccctgcagaactgaggccaggaatgacaggaattctcccttgcagctcccagcttaggacagtcacagccatctccgaggccgctctcaggggaaaatggccaaaaagcatgtagcggctcctttaaggctcctcctcgccctccctccctcgcccacgtgacccggggcggccgcgcgccggctcggcccccagcgcaagcggcgatggcggcggcggcgggagctgcagcggcggcggccgccgaggtgcggaaggggagggggagaggcgggtgcatgcccgcgcgcgcgcccgggggaagcgcgcgcccgtgcaatgctccgggggtgcaacggggccggggggcccgggcgggacttgcagcaatccagggggccagcaccgggggcggat

SEQ ID NO: 35846 - DNA, 2300 bp, Homo sapien
taagtaacttgcccagtgggcctcatttggtacaggaatagggcttttattttatttttttaatgatttgcgaatctggcagccttctgagccagagtaggctcagaaactcctaggaatgtggctttaagcctaggtgcgtctgacacaaaatcaggtgttcttcctcaaatctacaaggcctaaatacaaagagagcagtttagaacagactcttagattcaacagagggaactgggtgcgggcatacaaatcagagaatttaaaagaaaaaggcaaaaagtcaaggtaccacctaaacactgtctacgctgcctccaccctcctgccaaacagcatcccttgagttcaagaattcagtttcagctcaagaacaaactttttatgggtggatgctggctgagccaaagaggaattacttcaacaatcatttgttgcatgaccttttttggtgttttgttttgagaaggagtcttgctctgtcgcccaggctggagtgcaatggcgcaatctaggctcactgcaaccttcacctcccaggttcaagcgattctcctgcctcagcctccccagtagctgggattacaggcacctgccaccacgtccagctaatttttgtatatttagtagagtcagggtttcaccatgttggccaggctggtctcgaactcctgacctcaggtgatccacctgcctcggcctcccacagtgctgggattacaggcgtgagccaccacaccctccctattgcatgatttttatttgcaaaacaaaacccacaacataattcctgcaaccaagaagtttatagtctaatggggaaaccagatattgaacacataataagaaacttcatcagaattgaaatgtatggaaaacgcactagtctcctgaaggacgtaaaaaagaaatccaattggcaggaaacagtggcatcttcacgcggacttggataggtggggaagtgggtgtaggtacgaggaagtggaagggaaggcaccagccttcaagacgctcctaagtgctgtcgctgaagctgtggagactataacttagtctgagagagacaagagaaagagaaggcccgggcgcagtgttgaagggaagttttgtttagagctggaccttgtcagtctggaggagaggtgaggaataagggggacggagcggtggaagattagagtagaatcatactaacataataaatcacatcattaaaattagtcctagggttaattatatactaaaggtgaaatgggcaaggtcatcgatagcacaagcggagggcgactgccttggcaagaagttgggatcaatcctgagaatggaggggagggcgggtgtgattttaaaggactgacatggagtggaggaaagttgagggcactggatcgtctggctttgtggaaagtgaaatcatatttcaggcctgaagggctgaggcggttactagctttacaagagttggaaaagcctgggaatgtgtctggagcaactgtgagcacactcagcagaggaggcaggcgtgggtaatagctaccaacagctctgttagccacggggcggatggggccctgagaggtgccacggatgcacccagggcagcgctcggcacagctggaccggagacgcaccacccctgggagcaggtggcagcgcccgcagccgagagaacgggtgcgcgcgcgcgctgcgggatgcggcgcgggcggggcgcggggacgcggagcgagtagcgccatgggcagccgggattggggggcgggcccgagtgagcgggcctccgcgcggcacttggcacgcacgcgcaaactggccgcggggcttggaggtacagaggagggggagcgagaaagaggggggtgtggaacgtatttccgctctggcggacaaataatcccggccaaagaggaggcaaggccgtccggccctttaaccgcgtgggggtgctggtgaagaaaggggggtcgggaaggggggatcctgctcctttaattccctcccctcttcctcctccccgagtcctagccgacgccgccgccgccgcgcgcgcggggcctggaacacacggcacgagccgcccccgcccctccccccttacgcccacgcggagccggccccgcgcgcgcgcgcgtcccgtgcatccccgcgcctgcgcgctgcccaggccctgcccgtgtgtgggggtcgctgccggccccgggggggggtggggaaaataagggattaaaaaaacagcgcgcggaaccgggccaggtgagaggagcgtgcactcagggtcgtggggctgggggggcgtg

SEQ ID NO: 35847 - DNA, 2300 bp, Homo sapien
cccgggttcaagcgattctcctacctcaacctcctgagcagctgggattacaggcgtatgccaccacgcccagctaatttttgtatttttagtagagatggggtttcaccatgttggtcaggctggtctctaactcctgaactcaggtgatccccctgcctcggcctcccaaagtgctgggattacaggtgtgagccactgtgcccggctggtactgtgctttcgatatcacccagggatcttggctggtggagcagccaccatctcagacgttaccatacagaggggaagagcagggtgaagactacattgagcttccatcaggaagtgatacatatcacttgtactcacatcttattggctaaaacaagtggctggggaaatcctatcctaccatgtgattgaaagaagacaaggctacagtatttgtgaacatccttaaataccccccacctttacgatagtttatttctctcttgtaacaatctaagtggctgtgcagggctggtatgacatcaacactgtgtcagacacccaggctcctctgtctgtttgctctgtcatccccagcatgttgccctcatcctcctggtggaagacggatctccgctaggtttatattccagcccatgaaaagaaaaggcacactgcctttttattttagggacataacttggaaatgacatacataagttctactaacatcccattagccagaaccaagtcacctggctacctagctgcaagggaagctaggaaatatggtctttagctgggtgactgtgtgttcccctaaccatctcttactgtggaaggagggagaaaagatacttgaggggcaggggaggcactagcagctctgccacagcagccactttggagtccctaacaccaggatgtcctgattttcatgcacttagccctgtccaaggggagtctcaatttgtgtactcttttttttttttttgagacagagtcttgctcttgtcacccaggctggaatgcagtggcatgatcttggctcactgcaacctctgcctcccgggttcaagtgattctcctgcctcagcctcccgagtagctgggattacaggcccctgccaccacacccggctaattttttgtaattttagtagagacggggtttcaccatgttggccgggctggtctcaaattcctgacctcatgatccacccgcctcagcctcccaaaatgctgggattacaggcgtgagtcactgtgcccggtcttattttttttttttctttttgagatgtagtcttactctgttgcccaggctggagtgcagtggcacaatcttggctcactgcaacctccatcttctaggttcaatcagttctctaaggactcacttataaatcaaaagggtttttacgaacctaaatgatcacttcagagaggtttcatgttcatttttttattggtcttatttatttttaccctacattgttcaaaaaggtattgaaaagacttctgtgggtcagggagactaacacactagcttcaagtttctttgcttcctgcatttcatacaagtgtaggttatgatttaaaggcatatcccagcccccgcaaaagttttattcctttgagtaaccaaccccaaatgtatttactttgccagttgggaatttcatctactagactttccgtaaaaatgttgtaaacatttttcctgtctccaaaactaagtgttgatttcattttttccacctagattatctctagggaaggattgtagggaataaaaaagtattgtcaatcttcctatttatcaagaagttctaaaaaaattagtttcacccccctcggaagtttatcttcaagaagacagaactgttctaggctctcaggaagtaaaacccacttggtacaacccaaaagaacactaaaactttacttaaatgaaatattttgcaatatcttggatggtttgtgggtttgtgtgctttagactattgactattcacacaagagcaaggtgcatgtgtgcacacacgagcccaaatatgtgtttgcctgcgtgtttgtgagcatgcgtgtatggtgcacatgtgcacgcatgggtgggtggagcgtgggggcagtacacaaagcctgtgggggagatctattgaccctatagatatattagcatcagggagacagggcaaaggtttcacccttcagttcagtccccaatccctgcttattatttccctaacagaagaccatcccccttgccactccctggtttttcttctctggcagcaatgaagcagctgctgacccagctctag

SEQ ID NO: 35848 - DNA, 2300 bp, Homo sapien
gacccttgctcttctccccaggcccatctgccttccctgcacgatggaggccaatctggctctgcggagacctcaaggcagcacctgtagggaccatggtgagtgctgggacttatggtgcttgagagctggggccggggtttgggggtgataacaaggactaggctgcagtccccaagccaggaacctggattctgggtaaaaggaccagcaccaacatccccttctcttgactatagagaatgaactgctgaacaaacagagtgttcctgctcattttgtcgccttgaatgggagcaaactgaacattaaccttaagatgggagtggaggtgagggtctcaggttggggatgctgggatccccctgtgacagctcccagaatgtctctcttccttctccaggtctggctgctttctctctctgacgcgggtcacccctcctcccaagcctcacaaacctgctaggtgtccctgggtctgcttattctttttttgttgttattgagatggagtcttgctctgtctcccaggctggagtgcagtggcacgacctcagctcactgcaacttctgcctcctgggttcaagcgattctcctacttcagcctcccgagtagctgagattacaggtgcccaccaccacaccagctaatttttgtatttttagtagagacgggatttcgccatgttggccaggatggtcttgaactcctgacctcaagtgatctgcctgcctcaacctcccaaagtgctgagattacaggcgtgagccactgcacccacccgggtctgcttattctacccttctctctggttccacccctgctgcagtggacaagctgtgccgaggttgtctcccaagaaaaaaccatgttccccaacttgacagatgtcagggaggtggtgacagaccagttcctatgcagtgggacccaggaggatgagagtccctgcaagggtgagtccctcaccatgcctggattcccaaggggaaggccacctgtgtctctgtggccagcatgcatgccagaacaccagtccactgccctagatgacactgtctcctgtcaccctttgctggcaggagaatctgggggagcagttttccttgagcggagattcaggttttttcaggtgagaaggtagaagcttgcaggacccaggggttacaggatctcagccttgttggggggatgagggaggcctttgagggatctagggaggttggggcttacagttggggctgtggcagcctcccagccagttctctccttttctccaggtgggtctggtgagctggggtctttacaacccctgccttggctctgctgacaaaaactcccgcaaaagggcccctcgtagcaaggtcccgccgccacgagactttcacatcaatctcttccgcatgcagccctggctgaggcagcacctgggggatgtcctgaattttttacccctctagccatggccactgagccctctgctgccctgccagaatctgccgcccctccatcttctacctctgaatggccacccttagaccctgtgatccatcctctctcctagctgagtaaatccgggtctctaggatgccagaggcagcgcacacaagctgggaaatcctcagggctcctaccagcaggactgcctcgctgccccacctcccgctccttggcctgtccccagattccttccctggttgacttgactcatgcttgtttcactttcacatggaatttcccagttatgaaattaataaaaatcaatggtttccacatctctcagtgcctctatctggaggccaggtagggctggccttgggggagggggaggccagaatgactccaagagctacaggaaggcaggtcagagaccccactggacaaacagtggctggactctgcaccataacacacaatcaacaggggagtgagctggatccttatttctggtccctaagtgggtggtttgggcttactggggaggagctaaggccggagaggaggtactgaaggggagagtcctggacctttggcagcaaagggtgggacttctgcagtttctgtttccttgactggcagctcagcggggccctcccgcttggatgttccgggaaagtgatgtgggtaggacaggcggggcgagccgcaggtgccagaacacagattgtataaaaggctgggggctggtggggagcaggggaagggaatgtgaccaggtctaggtctggagtttcagcttggacactgagccaagcagacaagcaaagcaagccaggacacaccatcctgccccaggcc

SEQ ID NO: 35849 - DNA, 2300 bp, Homo sapien
cctcaagggttcgagaacgcttgaagcctgagttcttggtctcagccttgatggcactgatggctcctgacttcaccagctgctttgcctgctctgttgctgtggctgtgtccatgacaggctgctctgatagtgctggagagacaaggggaagaggcattatgttggccaagccatgatgaaggtcagctccatgctgcccacttccagtccatccccatttcccctgtcactcacagcgtttgacaccaccttggctggttgtgctgctgctactttgcttcttcagagccagcaatgcctttttctgggaacaagggtgagaagagagaggtaagtgagggccagcccctagccggttcctctcctaaggcccctgggcacatcactccagggaccgtctttcttgatgccctcagagtggtacactgatgtgctctgcctcttgcctctggtcccctagatcatgtatgatgctggaaattcctaatctaaccaaaccacggaacccagaggttttccagagtgttacatttttgaagttgaagacaaataactcaatcatggactagaatcctaggatataagctgcaagtaagtataagtttatgtgcctttcctggaagcttcatccatctatttcctgcatattgaatgaggcccagccatgacttcgtaacagggatatccaggaggctaatgcattgttcctaccctcaagaagcttacagtctgagaaataaaatacattgagttagcaatacaattataagaggtgcagattattcatagctgaaagctagtaagattttctgatgtttaatggctattaaactaggccctctcccgtatctctgcacaacacagagaggagaagggtattttagaaaaagaaaacagggtggcaaagatgcagagataagaaggctttgggaatgcatcttttggaagtagtgaatagttctactttactagacaaggctgccaaactaaggttttgaggcttttttatagacaatgtgaagccatttatggtttttgagaaacagagggagcagaattttgtgttttcaatggatcatttgaacaggagtgaagaagtctgttcaaaaaaaaagactgagaaatttgttgagagaccattacaatggcccacatgaatgtcaataaagccctgctcgggggaatgcacagtgaagaataaacaggaaaaattacttcaaaagaagaaacaataagacttggcaaaggtttgactatgcaaatagtggggaagtcagagttttgagtccaaacatgtggcagaattggtgtagtcaatcttatttggaagatcaagaatagaaagatgatagcttcaacactgagtatctgaagtttttcagtataacactggatagaactggaaaaaacaaacttggggatcatcagctcttaagcggtactaaaagccatgggaaaggaagacaatccatggcaaattgcatagaaaagacagaaggtccacaccaaggcttgggaaagcccacctctcgaagctacactgtgaggtgatatgtctctaggtatgggccagaaaaacttccccattcgctcacactcaccccatatcttctcagagtgcagagtctgtgaaaggttaggccatgtccacacacagtccctcacctttttcttgagcttgttgaatttcttctgcagagcctcctcttcctcgctcagtccggggggtatcaccaacatggtggctcctagttcaggggcagggcccaagacatctttctccactgttaccacccggggttcacacgccgtccacactgtacccaaccccaccccttcaggtctgcctactcttgtctttggctttccctaccccttgcttaaaccaggctgctgtccaagctcccgctggtcgggatcatccagcattccctcctgtctccagggatcacagacaccagcacctttaggtaccatgtggttcaaggagggacaaatatccactccgtcggaaagacgatggcacccgacccccctaccctcgctagggtaaggacaaccgcggggtttgaacggcagagaaggcggtggagccagcgtagcgcccgcagagcaacgcaaagaggaagaacagagaaacggctatgagaaaaagggccgaagagtgagaagcagagggccttacccgagggggcggcaaccgggggccccacggtctccggccgcgcccgcgctggccgctgatagcgggctcacaacgatgacgtagcgaggagcggaaaacgcggtaaccaagg

SEQ ID NO: 35850 - DNA, 2300 bp, Homo sapien
caagccaacaaggtcaaccttgtcatgtccatctctgttccttaggagaaggacatgacttctcctacaccccactcaaaaactaaaactaaccttttggtgcaaagtccatgcctttcttgaaaccaggtggaatagtaagaagatctgtaggatagggacatgaaatcaggtcactgcacactggtgaacaaattgtgtacattatataaacctaaaagataccatttacaggacagatgctgtagatagggatgtttgctatgacactttcccaacagatgacagtaaaggttgttgtagaaatttcccagcagatgacagtaaaggttgttatggacagaatatctttttctaattttctcaaaaacatgggagggctagcagtagcccagtgatagcctgggctcttcctcctcaaggctcagactcagagccccaccttacctttctcaaagtctatctcctcctcagcctcctcccgtgtgttcagatctgttatggtgggttcatccatcccccctgggaagagacaggacagacagggattcatgggatgagggtaatacgagataggtggggaacccttccctggagattaaagacaccctcttctaccatcccatctccacaagagtcacctggccagaagggatactgagttggatttccccataaggactgggaggctggccctggaggccggcgaagagacaaggaggttgtagccgagagatttgtgttctccagcaagacctaaggcaagagatcagagccccaatgaggctgagcttgtctctgaccacctccccttctccccaactgtttctcatgacccctgacctcctacctctttgtaacccagtatctggcctgtggttgggtgtctttgggcctgtaggtcggatgggactggggctcccaggacagccaaaagagaccagggatccgtcttcctctgccattttctggagagaaaaatagtaacttttgggtcttctttcttcctctgtcccagcttccttcaggaacccatcaccctagtctaagcccctccagactcctcaccgggctgagtgctccacaccatgcagaggcagccaggctggggatgacagaaacaactgttctgcttcttgctgcagatctggggcacaaggagggaggccatggggaagctgaaacaagggcaagatgagaggcattaggtaaggaaagaggataaaatgcagacaaaagagatgatgggacttgtgttcagatcagaaatggcagatgtgtcaaacagactaggacaatcaggcttggccaaaaactacctgctactgaattacctggggcagattttggatttcagaaacatggaggctggacctaggaatgtgcatttttaaaaagctccctggctaatcatgaagcacactgaaattggagactcactgattttagaaaaaggggtcccagacctaaggatgaaaggttggaggctcaaagcctatcatctcagtcaccaagtgccctggtgcttggatacagaagggagctccacggagaaatgccacatttgaaagagcagctctcaaagcaaaaatatccccagccctttctgctctgtcctcacatgtactgcaggtacactgggctgtaatctgtccagcaccccttcaggctgggatggacaggagtacaggcacagatgaacaaggttaagctagatcctactgtgaggagggtgaaggaggtttggactcaatgcgggtcaaaggttagggtcaaaagtcactcacgctactctctggagctccaggcaagttcagcagctcccagtgccccgtgcatccgagctccacggcccgaaggggtaggtccaggggatctggagggggtagcactacggggaaaggtcaaaagtcaggggtcaaagttcattccatatcggctactccgttccatttccctcccctccccctcaccaagtcgctctgtctccatcatcctggagccacagcagctgcctggcagcccggaagtgcggcaagtagtcgctgcgaagtaagccccgccccggaacgggcggaagtagaggcaacttccggtacagccccgccgagagcgtgaactatcgctgcggaggggcagacctggaccggtggaaggccgggcggaagtgcgcgcctggggccgccttggttaccgcgttttccgctcctcgctacgtcatcgttgtgagcccgctatcagcggccagcgcgggcgcggccggagaccgtggggcccccggttgccgccccctcgggtaa

SEQ ID NO: 35851 - DNA, 2300 bp, Homo sapien
agttgctggacagggatgactcagctaagaagacagcgagagaacctcttagaaatatgcttttattatctgcacacagagatatgactgcctccctctaaagcattactatttgggagagggagtcttggggggtgatgggaggtcctgagtcatagcttccacataccatatgggcaggaaggcgtaaggtgcatcttggtgtacagacacggtgactgggccgccaggctcccaagagaagagatgaacgagcctggggggcagatggaggcatcagttgagggccagaggctggatcctgggatccagaggggagggacagagctgaatgcctcacctggggtcatcctggacaaccgtgctctgggcaaagctaaggaaggcggcacagaagttcatgcacacagagggattccagccgtcacggtcattctggagcaggcagaggaggaggcagaagatgggcagtgggggtggtgggaggagagaaggcaggctgttgccctggatgctagacctgtggtcttggtgtttggggatacgggtgggagctgcaacatcgttcccttaccctgacatattcaaacatcttcatggtaggaaaggtcttgagggaagagacaaaaccgtctgggttacggaagccagcaacaacattcgggacccctgggaggaatgactgagcccaccatttcaggagcttgtgtctgacaggaaaagcaagggatcagtgggacccctcgtgcaccctccattctgccttcaccctcctccccaagtccctttcccagccttcaagcctaagctctcgccctgcccaccccgatcctgaacctgtagaaactcctccattggccagggctgtgcatctccttggaggtcttgagctccacatagcaggttgggggctgtgtggatggggcttgggggtctgtgcagtctacctcccctgagaagagcagagggtggcttcccaggcggctgcgtagcacagagcagaaggccacgttggtgttaacctccccagaggggtctggggagcttccaggtttgtctgcacaaggagagaagcagcagcaggcgtggggggctctcaacctctgggaaggggaagggggctatgaagcaggggcaactcacctgcacacatgtactgctcaaatttgtatcccatgtacataagctcccggaggagcggtggccgagcaagcctctgggcccgagcgttcggtgtctccacttcactcaggtatagtgttccctggaaccgggaggctgccagctgccagccctcctgccgctcatacggtgtcgtcagcagttttgtcaggtgcccccgccacgtcactatggcctctgccagccagcctggacccctgagaggcaggagttacaggctgaaggtctgacacaagcattagtgagatgctcccctcgaagaatagtcttgtttcttctaaggactgattctcaccccggctttggctctcctaattttagagggtaggtacgggtctccagatatactgcctaccacgctttgctcacccctccaaccggcctcggtgttccaggagccagcacagcaggtggtccagcctttcctggacctcctcgtcccggggctggtatcgatccgggtatccgtctctgaggtcaaagttggggcctggaccgttagtggggggtgggctatagtagcgcagggctcgggcatctccatggtactggcgttgagcatccagggagaagcagcccagttccgaagggcgccggtagaaaggaaagggcccagagtagagggcagggtctgtgggcagagaaggtgctggacgaggtagtttgttccgaggctcagctacctctgtcttctcagctcctctcttggtccccctgggatccatgaggtcctaagacaagcaggggtacagagtttccattctacagaggaggcctggagaaggatgactggtttaggactaagcgagccacctgatcgccaggctctggccttgaaacattcaggcccctcagacgccaccgcggccaagctctcatcctgcctctttccttgcccttcacccaccctccctccaggtcctccaaatgcagtgaggttaggaaggacgtctgcgctcagatcaagaatccagttacctcaaagctccccaacttccacctccgcagagctatgacgtcatggcaggcacgccagaggccgaaggatgcaaaagtggttttctgctttcgatgatgcaatcattcagcgacagtggcgggcaaacccctcccggggc

SEQ ID NO: 35852 - DNA, 2300 bp, Homo sapien
ggtctcactttgttgcccaggctggtctcaaacttttggtttcaagctatactcctgcctcagtctcccaaagtggtgggagtacaggcatgagccaccacactcagcctagatttcagtttatattttactttacctcttccctcttcttagaccactgtcttgaatcacaggttctaatactgccaactacttcactttctcaaaaatctctttactttcacagtaggcctcttcctgggttactttttttttttttttttttgagacaaagtctagctctatcacccagggtggggtgcagcggtgctatctcagctcactgcaacctccgcctccccagctcaagcaatcctcccacctcagcctccccagtagctctataggcgcgtaccaccacgcctggctaatttttgtattttttgtagagatggggttatgtcatgttgcccatgctggtatcaaactcatgagctcaagagatccacccacctcggcctcccaaagtgctgggattacaggtgtgagccaccgcgccggcctctgggttcctcttaactcaggcaagtccctctctgcctctgtcacagattcctcttcttctgctttccctttatgtcagtggatctcaaattttaaggcacacttaaaaagcacttgaggcagttcaaaaatgtagagtcccaaatcccgccccaagagagcgtaattcattaaccttggatgagtcccaggaacctgtattttttttaacaagcagcccacgtaattttgacacaggcataataactcagctcatatattcagtaacactgccttaaatgatggtgtttcccagcattgtggatttgaccctattaacttccactctaaacctggagtccttaaccacggacctcgcaggattagtaaaatatttcccccctaactatacatacaccctatgtatatgtggcaaacgtgcatttttctggagagagatagccatagcttttatcaccttctaaagattacaaaaaggttagaaatcactcctctacccactcttcctactggatctcaccacatcacagaattaaccacttgctattcacacctccatgacttgtaattctattatcactggcccagaattctctccaactctcatatccaactgtctaatacctttgtctttggatgctccacatgcaccatcaactcaacttgtataaaattaaacacattatctgtagtccaacaactaaatgtgctcctaataccaccagccacgcagtcatctggaaagtctgagttgtcctggactcctccctcttcctcactctcctctccctccctactgcactgacctaatttaggccttcaccacttctcagatgcagtatcttcttagctgacctccctgcctcatccactatctccaatacaccattccctctctctatgatattctctaccagcccatcgcctcagtgtaagatggaaacaacactgatgtacaaggcctgtcatgatctgacgtctgactgcactcccagcgctgtatgttcgaaccatgccccatgactcggtttccccaaaagcctcgttcttctacctccatgatttgaaatgccctgtactacctgcgggacttttaacagggtctctgtggcaccccagtgcctggcacagtgccctcgcctgaaaggcctaatgcttgctgaacggctggcggagtgactgagtgacagggaattccaggagttaggaaaggggcttccggcggtcgcaccgacgcccctcaccagctgccggtcggccacggtcctgtcaggcacaaggctgtacacctggctcctcagcacgatgggcggcagcgcgtcctcaaacaggcctcgcgggaacagctgcatgagttctgagacagccgcgcgcgccgaccctgggcagataaatcggctcacggacagggaactggggcggggacgcggttctaacaaaactctcggctaccggaagcgaggccccacccccggggttgccatggttacctggctcaccccgaagaggatccgactccacaggccctcgcttccgccgcctcttaactccaaaggtctccgggatcaggtgatgcctcttccagctcatatcccgggattttatggtaccggggaaggggtaggaatggagggaagagaacctgaaaatagggtcttccggcgcagagcagtgacgtacggtctccccgggcgtccctcctagaccaggtgatgacgaaaggagcgtcaacttgtcgtccctcaggcccgtcagtg

SEQ ID NO: 35853 - DNA, 2300 bp, Homo sapien
aaacaactgggcaggagctaaataaaaatctaattttgagaggctgtatctggctcaggcctcctactttgtaacccatggaatatgtgaaagcatttgaaaaactatagcactgatctcacatgggcagacacactctcagagagatgtggtgggagccatggcgcagtctgcctaggcagtggcaggagcgcagaagactctgattcctctcctcggtcctaagaccgaatgtgtgtcaggacatgtggtcagggaagagaagctatttaactgaaccagtaatagtagcaggaaaagaaaaagtggagggagggcagtccaggtagggggcctggaacaagcaactgcaccaacagaggcagttggtgcgagcacagaaccaccccaggctgggattttgttatccagtctctcttgcatggttgcccgtgtttctggagacttgtgtaaacattaatggatgaggaggagagatggttctcagagcccagccctcatctctgctggcttcccactgccctcaggcatctggtgaatgctggagtcctcaccgtccgagatgctgggagctggtggctagctgtgcctggagctgggagattcatcaagtactttgttaaaggtatcccatctgcagctcaagcctgcagcccctcaccttttggtggctcctcaggcctctaggccttattcacctttcccctttcctgtgccacttctcctctagggcgccaggctgtccttagcatggtccggaaggcaaagtaccgggaactgctcctatcagagctcctgggccggcgggcgcctgtcgtggtgcggcttggcctcacctaccatgtgcacgacctcattggggcccagctagtggactggtgagtctttccctggcctctggcagattatggagcaatgacccaaagtgggatttcctcccagctcatgcttagtttcctagtgaaggccagtggctctcattcttctctggaacccgggagcaccccttcccaagttctaagttctcctcacagcttgagcctaggcgtctggctccagccttgtctttctcctgcacagcatctctaccacttcaggaaccctcctccgcctgccagagacatgaagattctgctcatcattgctcagctcctcagagtgggccgggaggggactagaagagctgcatgatggtggctgagacagggtcaccttgggaaggcttgggagccaggatgagtgtcgggctctcgtgtgtgcaaaaggtcagatgtgactgctgctgtttgcctggtttctgacccagtggtggggtttgagcaatgcttctctgcccttccatggaaagtggaaccagaaatggtgccaaggctgtggctgttccctttcgtgtaaaatggtgctgttattactctgtcttgaaataggaaggtgggatttctggggaggctggtgaaggagggcagggttcttttctctacgtgtcatgttaaaattgccaaataaagtacctctgcctgtgatattttctggatgtcctttatttactgtgacgtgtgtttgggtgccttgtttaggggtagaggtgaagtctgagctttgcctcattcagagaggaaaggggtcaggggttcactctgacgttcaggccattctccctgtggagtggtgagggtgtacctaatctcctaaaccacggaatttctgttagggcctaaaaaagcaaaagcctagtatagttcaatttgtgttggaatgaaagtaagagacaagtgtcttagaagcctgtcattgttttgtgagggcctttaaatatcctgtactcgtgggccatgttgggcccttgtacgcccaggtatacatgagcttgtgtgcacctataccctgatacagatatacctggtagggggaggtgctcaggcactggaatgagaggagttaacggggaaggacagggttatttctgggccaagattcagagtttcccatggacacccaggtgtccggggtgcccccacaactctgggcctgaggccagttgcacttcttggctgtcacgtggtttcccagcttagctgggctgggggaggagcaaggtccagagtcaactctgccccgaggcctagcttggccagaaggtagcagacagacagacggatctaacctctcttggatcctccagccatgaggctgctctgggggctgatctgggcatccagcttcttcaccttatctctgcagaagcccaggtcctggaggcgggatgctgggtgcttggattggggcagggctggcatcgg

SEQ ID NO: 35854 - DNA, 2300 bp, Homo sapien
tgacttcctggctgcgtgacctggagctctgagcttcagttttctcacttgtagagtaacatacacagagttcaccctacagggtcgttagaaggctgaagtgagataattcatgtgctggtataaactttgtggaaatgtgaggtggggagagggggtggggctgttttgaggaaggagataagttattggagccgcaaaaacaggtttgcttgtgcccttctaacatcgccttcccttttctgttgctgaagttttccttgggcagcaagatcaatgtgaaggtgggaggaaacagcaaaggaaccctgaaggtgagggccagggaaggggtggggccaggcactggtggaggagagggtgtggagtgagaggcctgtgggcagaggcacatggtccggggaaggaggcagacacctcagggttggtgtcccgtgcttccgtcctgggtgtttttccccctgcttgctttcgcttgctctccccatctctgggtacctgttgtttcctttacccgcctcagtgctggtggctccgaatcccactcctcagcccaggcctcttccctgaaccatgggccccactcgtcccactcccacagcacctcagacgaggcatgtcccaaagcccttcttcattctgtgtctcttgtctggctggtgggagcccctcccagccaggagcccagccactactctagaggccgtgttagtggcccctctcccaagcctgtccttatgtccctagtgactcctcctctgctcccctgctgcctgtggcccttggtgctgcatcctagattctgtgctgagacggccttctccctacctggaacttctctctacctcctgtctcccctgtctgatccactgtccacacggcagtgacactgaccttccaaaagccccagccagatcagccttggggaaaagtcactccccgctgcccacggctcagatggctgggcctctgcccacccctccggccagacagctctccttgtctacacagatccccttgcctttcctgtccttccctgcttcttggcccacaggacaagctctttcttctccttcaagccttggccagaagcctttcctgagcttttcagtccagcctcttcccagcacagtctggagtgttggcctctgggggcaggcccctgcttctttacctctctgtctcgcctgacgcctgtggcgaatgtggtgccactcgtgtgtgtggactgtgcagtgacggggaggaaaaggggctgaaggcctcaaatcctgtagcccagggagatgcccttaggtatggcaccagagaggtctgtggcctcacatgtcccacgtcctctccctgccccttgctgagccaggtccttcgtacctacaatgtcctggacatgaagaacacgacctgccaggacctacagatagaagtgacagtcaaaggccacgtcgagtacacgagtgagtgtgggggttgggaggccttggggccaggcaggggctggcgcagggagccgggtggccatcccagccctcctcacaatgcttccctgtgcagtggaagcaaacgaggactatgaggactatgagtacgatgagcttccagccaaggatgacccagatgcccctctgcagcccgtgacacccctgcagctgtttgagggtcggaggaaccgccgcaggagggaggcgcccaaggtggtggaggagcaggagtccagggtgcactacaccgtgtgcatctggtgggcgccgggagctgccctgggccaggggagggagggcaggacccaggctggggctgggcttctggagcccgcgcaggcagaacctggacgacagctcacacgtctccacaggcggaacggcaaggtggggctgtctggcatggccatcgcggacgtcaccctcctgagtggattccacgccctgcgtgctgacctggagaaggtgtggtcagccacccagggcaaccccctctgtcccaggtactgagccctgtcatgtgcagggcctgtgaccaactccccttttccacagctgacctccctctctgaccgttacgtgagtcactttgagaccgaggggccccacgtcctgctgtattttgactcggtgagtggggagagatgaggcaggaagggactcgatggcaccgggtttactgagtatgcgttaggaggtttctcaggagacagctgtgtcagcggctggtgctcttgagaacttgtgatgtcatcagagagaaggacaagaatgtgagcccgtgagacacagcagagtaaggggcagacctgcaggcgg

SEQ ID NO: 35855 - DNA, 2300 bp, Homo sapien
ccctgtgcagtggaagcaaacgaggactatgaggactatgagtacgatgagcttccagccaaggatgacccagatgcccctctgcagcccgtgacacccctgcagctgtttgagggtcggaggaaccgccgcaggagggaggcgcccaaggtggtggaggagcaggagtccagggtgcactacaccgtgtgcatctggtgggcgccgggagctgccctgggccaggggagggagggcaggacccaggctggggctgggcttctggagcccgcgcaggcagaacctggacgacagctcacacgtctccacaggcggaacggcaaggtggggctgtctggcatggccatcgcggacgtcaccctcctgagtggattccacgccctgcgtgctgacctggagaaggtgtggtcagccacccagggcaaccccctctgtcccaggtactgagccctgtcatgtgcagggcctgtgaccaactccccttttccacagctgacctccctctctgaccgttacgtgagtcactttgagaccgaggggccccacgtcctgctgtattttgactcggtgagtggggagagatgaggcaggaagggactcgatggcaccgggtttactgagtatgcgttaggaggtttctcaggagacagctgtgtcagcggctggtgctcttgagaacttgtgatgtcatcagagagaaggacaagaatgtgagcccgtgagacacagcagagtaaggggcagacctgcaggcggcagggaccgatgccagtcagcagggaccctcagggtttgagagggagtctttcctaatgctggttttattcagcttgaggggctgcctttgtttttttgttgaacttcctatcttttttttaatattaaagcgtattttcctttacaaagtgatggtggccatagatgatagttgtatttgtcttttcacgaccttatttggctaaaatagttatcaaccctcttacggctctcaaaacatttttatttatttatttagtaaagacagggtctcgctctgttgcccaggctggtcttgaactcccggcctcaagcgatcctctggcctaggcctttcaaagtaccggatttacaggccagagccaccatgcccggccttcaaaaaaagttttggaacatttactgtaacctctgggagaaaatgtgagaaaggtgtggtggctgtcattagccagctgtttgtaggtcagggagacccctacccagtgtgtgcagaggggccagcccccatcagctggggaagcctggctgacacatctgggttgaacacaatagaaaacacagagccaacaagattcccggatagggagctgacggtgcagcagcctagctcaggagggacactggcacggcaccgtgtggactgggcccgcgtgggcacgaggaggggtcaggcctgggacctgagtcggggggtcaggcaggatgacagaacctgcagttaggttgtggcaaataaaggaggacccagttgtatccatgacaaagatgaggccgcgaggagggcgagtgggtttgggggcaggcagagtgccttggagaacttacaggtcctgccacaatcctaatgcaaggatggagctgcaagttcagtttgggaatcatcagcctggattggtttggtggaagccagggagtggttgagacccccacaggggagctctgaggaaggaagttccgaaggagggaacgtaagaaatgaccaggtcagaaccaagggtggtccagaagctaacccttagcttagggacagtttcacagagaacacgtccatgatgcaagactctgctgagggcctggagcagtgaagactggggcaaggtcaccctctgggaagtgaagtcaccagagaccttgcggagcagctttgagagttctctgagtaggaaggtaacagaatgtgaaggacactggagagaaggccaataggaagcaaacaaaaacaggccaaggaaacccagtacagggggctgcagggcccagggagtgggtccctcatctctcctccccacgcttggccaggtccccacctcccgggagtgcgtgggctttgaggctgtgcaggaagtgccggtggggctggtgcagccggccagcgcaaccctgtacgactactacaaccccggtgagcactgcaggacaccctgaaattcaggagaactttggcataggtgccctcctatgggacaatggacaccggggtagtgagggggcagagagccctggggctccctgggactgaggaggcagaatggaggggcctg

SEQ ID NO: 35856 - DNA, 2300 bp, Homo sapien
gtgtagactgttttggggcctcccttgaccccaccctcaggtgccttcccaccgacccacccacagagtggcccttttctggaatgacaccagtctcattggccttgggacgtccgtatttcaaaaaaaattaatcacccatcgagaagcaaggaagggaaatgcaaccctgacctttttcctgcatccagagtcagctttctggttccacatcacccgtgcaggcaagggtgtccgccccgacctgggccctctccctctgccaccccaccgtgggccagtttactggcatgatgtttgtctcagagagaaaatggcagtccctgcctaataggccttcctgaatcgcctgaagaacaaaatgtgatttgtgtgggtttgtttgttagtttaagctacagatagagtaatacagtttaagcctggtttgcctggggcattccagtatatacaggtatcccagtgtgattgttattagtgcctcctttcactcacaaaagtgcccagaagacaaaggaggaagtggtttcccgctgcggagtaatagcatgtaccagacactgctctaagtgctttgtgggcactcactcaactcttcacagccatgctctatatgcaacacgggtattgttcgcatgttgtggagggcaggattccagcctggaaatctagctgtcgaatatgtacctttagccaccaggagcacctttctttggttgaaaggaaaacagcccaccttgagctggtttgagacaaaaagtaaggattggggaatttcacagaactcaggaaaaagaagcagaggaggggaccccactggtcttagaaagccaaggatagggaacagaaaaagccccggagacgggcagtttcctcgctctgttcctctctcctctttcttctctctgcagtcaagtttcttgtgtttccaggcacaggcagaacatgactgccctcaggactacagtccacaggttctactccagccagggaaagtatggattcccagcacaactgggcatgccccccctcaaagtccaaagtccccaggaaggggctggatagccacagctggatcaggatcaagggtccagccctatttggggaactgaagccataaggggtgggggtcccactggactgacactcagagaccacttttgtgagtaaggaggcagtttggggatttgggaagaggccatgccaaagaggagtggccgggttcagtgagaggccagggcctcctggatggtacctgagaggtcagaggcgacccagccccataccttcccccccatttctggctctgtgccagaccctcggaccagtgggggtctctctcccctcagagcttttccagactgtgctactgcagagccagagtcaagaccctggctgtgccacccactacattggcgagttcgctgctgctgaatccatgatcaggactgagagggagaaaacaggattgggatttctggggttgggcaatgacagctactgccttcttcatggttgacctcccagaccgggccaggtcttgctgcaactgaatccctggctccggaaaatgggcttatgccaccaccatgctgagcagctactgggagaaagatctgatgagcaaccatagggccatgtatgcaagagcctcaggaaacctctgccacagtgggaaaggcccaaacttctcaaagttacgtgggataagacagtgctcatcggaaaggagcgcacctggaaggctgacgtgcttactacttgtctcaccatctccatctcttccaccacttccaaatccaaactccgaatgtggtcaattacatgcaatgtccccaaaggtaccctgtcctgcccccggcctctgggcctttgtatattctccttctgccccagatgccctcatctacccctgctcttttcctggctccttctcagtcttcagagccccacttggaggccacctgctccaggaagccttccctgtccctgcctggcaatgcccctgacttggttagatgccccacaggaccacactgctccctgacatcacatctttcacagagggtggggactgcccgtcctcttatctgtctccccagcgatgagccctggagtgagcagctgtatctctggcacctggcacagggcatggcatgaagtgaaagattcccgaatttctgtcgaatgactggatggcaggctgctgaactgtcatgacctctacggaaactgatctcaccaaacttctttggacagacgcggagtcatctctgaagaccccaggtgtgccactaaat

SEQ ID NO: 35857 - DNA, 2300 bp, Homo sapien
ccttccacaccccggtgtcctgccgagcccacctcgagatatcacaggctctggccccacccatgccgggatacattcactgagcttgaggagtgtggtgctcccttctgagagaagctgagggtggaactggctggttgaggtgactggcaaatcccaccagccgtgccgtggtcaggcctgtctgaggtgggcatcagcgagctctggaagaggagcctgtaccacaaatgcagccactgctgttggtttctgtgtccccgctcattttgttttccagtgatgttcctcttaagaaaatgctcctgactcatccacggcagggaggtttgccactatctggacaaggccacccttcggggaggcgacagcagccccagcgagtaatgaggagcagcggcagtgacggggcagagtcggggctgggagattagagagcccctcccagggcctttccctcccgcctggcctggctcctgctctggactccttgatggatgttgaagcccacagggctgcagactcctcctccttcctgggcacaggccaggtcaccccactccggcctgcccactcctgcagtcatctttgtcttcagaccaaatgcacaagtactttgttaaaggtatcccatctgcagctcaagcctgcagcccctcaccttttggtggctcctcaggcctctaggccttattcacctttcccctttcctgtgccacttctcctctagggcgccaggctgtccttggcatggtccggaaggcaaagtaccgggagctgctcctatcagagctcctgggccggcgggtgcctgtcgtggtgcggcttggcctcacctaccatgtgcacgacctcattggggcccagctagtggactggtgagtctttccctggcctctggcagattatggagcaatgacccaaagtgggatttcctcccagctcatgcttagtttcctagtgaaggccagtggctctcattcttctctggaacccgggagcaccccttcccaagttctaagttctcctcacagcttgagcctaggcgtctggctccagccttgtctttctcctgcacagcatctctaccacttcaggaaccctcctccgcctgccagagacatgaagattctgctcatcattgctcagctcctcagagtgggccgggaggggactagaagagctgcatgatggtggctgagacagggtcaccttgggaaggcttgggagccaggatgagtgtcgggctctcgtgtgtgcaaaaggtcagatgtgactgctgctgtttgcctggtttctgacccagtggtggggtttgagcaatgcttctctgcccttccatggaaagtggaaccagaaatggtgccaaggctgtggctgttccctttcgtgtaaaatggtgctgttattactctgtcttgaaataggaaggtgggatttctggggaggctggtgaaggagggcagggttcttttctctacgtgtcatgttaaaattgccaaataaagtacctctgcctgtgatattttctggatgtcctttatttactgtgacgtgtgtttgggtgccttgtttaggggtagaggtgaagtctgagctttgcctcattcagagaggaaaggggtcaggggttcactctgacgttcaggccattctccctgtggagtggtgagggtgtacctaatctcctaaaccacggaatttctgttagggcctaaaaaagcaaaagcctagtatagttcaatttgtgttggaatgaaagtaagagacaagtgtcttagaagcctgtcattgttttgtgagggcctttaaatatcctgtactcgtgggccatgttgggcccttgtacgcccaggtatacatgagcttgtgtgcacctataccctgatacagatatacctggtagggggaggtgctcaggcactggaatgagaggagttaacggggaaggacagggttatttctgggccaagattcagagtttcccatggacacccaggtgtccggggtgcccccacaactctgggcctgaggccagttgcacttcttggctgtcacgtggtttcccagcttagctgggctgggggaggagcaaggtccagagtcaactctgccccgaggcctagcttggccagaaggtagcagacagacagacggatctaacctctcttggatcctccagccatgaggctgctctgggggctgatctgggcatccagcttcttcaccttatctctgcagaagcccaggtcctggaggcgggatgctgggtgcttggattggggcagggctggcatcgg

SEQ ID NO: 35858 - DNA, 2300 bp, Homo sapien
cgtggaaggagaatgccagggtgggaagacaggaggggaggaggccagtgggaagatgatgacacttacaagacagatgggaacagggcaggaggcccccacaagcagcaggagggcatggggtctggttacctggagactgaggagtgcgaagtctctttctgagctaagggtgaagtccacctttggggagcaggggacattattacgagatgggtttctcaggaacactgatcctttcactacctgtcctcggggcacatcctggagctgcacccccaccgatagggggacccccagatgaaccacagaaggagagaacaagagcaacctggggagaacagacaggatcagcagtcagacttcgctctgacacctccacccctgctctccctcactcctgaatcgggtcccgatgccagccctgccccaatccaagcacccagcatcccgcctccaggacctgggcttctgcagagataaggtgaagaagctggatgcccagatcagcccccagagcagcctcatggctggaggatccaagagaggttagatccgtctgtctgtctgctaccttctggccaagctaggcctcggggcagagttgactctggaccttgctcctcccccagcccagctaagctgggaaaccacgtgacagccaagaagtgcaactggcctcaggcccagagttgtgggggcaccccggacacctgggtgtccatgggaaactctgaatcttggcccagaaataaccctgtccttccccgttaactcctctcattccagtgcctgagcacctccccctaccaggtatatctgtatcagggtataggtgcacacaagctcatgtatacctgggcgtacaagggcccaacatggcccacgagtacaggatatttaaaggccctcacaaaacaatgacaggcttctaagacacttgtctcttactttcattccaacacaaattgaactatactaggcttttgcttttttaggccctaacagaaattccgtggtttaggagattaggtacaccctcaccactccacagggagaatggcctgaacgtcagagtgaacccctgacccctttcctctctgaatgaggcaaagctcagacttcacctctacccctaaacaaggcacccaaacacacgtcacagtaaataaaggacatccagaaaatatcacaggcagaggtactttatttggcaattttaacatgacacgtagagaaaagaaccctgccctccttcaccagcctccccagaaatcccaccttcctatttcaagacagagtaataacagcaccattttacacgaaagggaacagccacagccttggcaccatttctggttccactttccatggaagggcagagaagcattgctcaaaccccaccactgggtcagaaaccaggcaaacagcagcagtcacatctgaccttttgcacacacgagagcccgacactcatcctggctcccaagccttcccaaggtgaccctgtctcagccaccatcatgcagctcttctagtcccctcccggcccactctgaggagctgagcaatgatgagcagaatcttcatgtctctggcaggcggaggagggttcctgaagtggtagagatgctgtgcaggagaaagacaaggctggagccagacgcctaggctcaagctgtgaggagaacttagaacttgggaaggggtgctcccgggttccagagaagaatgagagccactggccttcactaggaaactaagcatgagctgggaggaaatcccactttgggtcattgctccataatctgccagaggccagggaaagactcaccagtccactagctgggccccaatgaggtcgtgcacatggtaggtgaggccaagccgcaccacgacaggcacccgccggcccaggagctctgataggagcagctcccggtactttgccttccggaccatgccaaggacagcctggcgccctagaggagaagtggcacaggaaaggggaaaggtgaataaggcctagaggcctgaggagccaccaaaaggtgaggggctgcaggcttgagctgcagatgggatacctttaacaaagtacttgtgcatttggtctgaagacaaagatgactgcaggagtgggcaggccggagtggggtgacctggcctgtgcccaggaaggaggaggagtctgcagccctgtgggcttcaacatccatcaaggagtccagagcaggagccaggccaggcgggagggaaaggccctgggaggggctctctaatctcccagccccgactct

SEQ ID NO: 35859 - DNA, 2300 bp, Homo sapien
tgacttcctggctgtgtgacctggagctctgagcttcagttttctcacttgtagagtaacatacacagagttcaccctacagggtcgttagaaggctgaagtgagataattcatgtgctggtataaactttgtggaaatgtgaggtggggagaggaggtggggctgttttgaggaaggagataagttattggagccgcaaaaacaggtttgcttgtgcccttctaacatcgccttcccttttctgttgctgaagttttccttgggcagcaagatcaatgtgaaggtgggaggaaacagcaaaggaaccctgaaggtgagggccagggaaggggtggggccaggcactggtggaggagagggtgtggagtgagaggcctgtgggcagaggcacatggtccggggaaggaggcagacacctcagggttggtgtcccgtgcttccgtcctgggtgtttttccccctgcttgctttcgcttgctctccccatctctgggtacctgttgtttcctttacccgcctcagtgctggtggctccgaatcccactcctcagcccaggcctcttccctgaaccatgggccccactcgtcccactcccacagcacctcagacgaggcatgtcccaaagcccttcttcattctgtgtctcttgtctggctggtgggagcccctcccagccaggagcccagccactactctagaggccgtgttagtggcccctctcccaagcctgtccttatgtccctagtgactcctcctctgctcccctgctgcctgtggcccttggtgctgcatcctagattctgtgctgagacggccttctccctacctggaacttctctctacctcctgtctcccctgtctgatccactgtccacacggcagtgacactgaccttccaaaagccccagccagatcagccttggggaaaagtcactccccgctgcccacggctcagatggctgggcctctgcccacccctccggccagacagctctccttgtctacacagatccccttgcctttcctgtccttccctgcttcttggcccacaggacaagctctttcttctccttcaagccttggccagaagcctttcctgagcttttcagtccagcctcttcccagcacagtctggagtgttggcctctgggggcaggcccctgcttctttacctctctgtctcgcctgacgcctgtggcgaatgtggtgccactcgtgtgtgtggactgtgcagtgacggggaggaaaaggggctgaaggcctcaaatcctgtagcccagggagatgcccttaggtatggcaccagagaggtctgtggcctcacatgtcccacgtcctctccctgccccttgctgagccaggtccttcgtacctacaatgtcctggacatgaagaacacgacctgccaggacctacagatagaagtgacagtcaaaggccacgtcgagtacacgagtgagtgtgggggttgggaggccttggggccaggcaggggctggcgcagggagccgggtggccatcccagccctcctcacaatgcttccctgtgcagtggaagcaaacgaggactatgaggactatgagtacgatgagcttccagccaaggatgacccagatgcccctctgcagcccgtgacacccctgcagctgtttgagggtcggaggaaccgccgcaggagggaggcgcccaaggtggtggaggagcaggagtccagggtgcactacaccgtgtgcatctggtgggcgccgggagctgccctgggccaggggagggagggcaggacccaggctggggctgggcttctggagcccgcgcaggcagaacctggacgacagctcacacgtctccacaggcggaacggcaaggtggggctgtctggcatggccatcgcggacgtcaccctcctgagtggattccacgccctgcgtgctgacctggagaaggtgtggtcagccacccagggcaaccccctctgtcccaggtactgagccctgtcatgtgcagggcctgtgaccaactccccttttccacagctgacctccctctctgaccgttacgtgagtcactttgagaccgaggggccccacgtcctgctgtattttgactcggtgagtggggagagatgaggcaggaagggactcgatggcaccgggtttactgagtatgcgttaggaggtttctcaggagacagctgtgtcagcggctggtgctcttgagaacttgtgatgtcatcagagagaaggacaagaatgtgagcccgtgagacacagcagagtaaggggcagacctgcaggcgg

SEQ ID NO: 35860 - DNA, 2300 bp, Homo sapien; identical to SEQ ID NO: 35855

SEQ ID NO: 35861 - DNA, 2300 bp, Homo sapien
gctgtgtagactgttttggggcctcccttgaccccaccttcaggtaccctcccaccgacccgcccacagagtggcccttttctggaatgacaccagtctcattggccttgggacgtccgtatttcaaaaaaattgatcacccatcaagaagcaaggaagggaaatgcaaccctgacctttttcctgcatccagagtcagctttctggttccacatcaactgtgcaggcaatagtgtccgcccccacctgggccctctccctctgccaccccaccgtgggccagtttactggcatgatgtttgtctcagagagaaaatggcagtccctgcctaataggccttcctgaatcgcctgaagaacaaaatgtgatttgtgtgggttgtttgttagtttaagctacagatagagtaatacagtttaagcctggtttgcctggggcattccagtatatacaggtatcccagtgtgattgttattagtgcctcctttcactcacaaaagtgcccagaagacaaaggaggaagtggtttcccgctgcggagtaatagcatgtaccagacactgctctaagtgctttgtgggcactcactcaactcttcacagccatgctctatatgcaacacgggtattgttcgcatgttgtggagggcaggattccagcctggaaatctagctgtcgaatatgtacctttagccaccaggagcacctttctttggttgaaaggaaaacagcccaccttgagctggtttgagataaaaaataagaattggggaatttcacagaactcaggaaaaagaagcagaggaggggaccccactggtcttagaaagtcaaggatagggaacagaaaaagccccggagacgggcggtttcctcgctctgttcctctctcctctttcttctctctgcagtcaagtttcttgtgtttccaggcacaggcagaacatgactgccctcaggactacagtccacaggttctactccagccagggaaagtatggattcccagcacaactgggcatgcccccctcaaagtccaaagtccccaggaaggggctggatagccacagctggatcaggatcaagggtccagccctatttggggaactgaagccataaggggtgggggtcccactggactgacactcagagaccacttttgtgggtaaggaggcagtttggggatttgggaagaggccatgccaaagaggagtggccgggttcagtgagaggccagggcctcctggatggtacctgagaggtcagaggcgacccagccccataccttcccccccatttctggctctgtgccagaccctcggaccagtgggggtctctctcccctcagagcttttccagactgtgctactgcagagccagagtcaagaccctggctgtgccacccactacattggcgagttcgctgctgctgaatccatgatcaggactgagagggagaaaacaggattgggatttctggggttgggcaatgacagctactgccttcttcatggttgacctcccagaccgggccatgtcttgctgcaactgaatccctggctccggaaaatgggcttatgccaccaccatgctgagcagctactgggagaaagatctgatgagcaaccatagggccatgtatgcaagagcctcaggaaacctctgccacagtgggaaaggcccaaacttctcaaagttacgtgggataagacagtgctcatcggaaaggagcgcacctggaaggctgacgtgcttactacttgtctcaccatctccatctcttccaccacttccaaatccaaactccgaatgtggtcaattacatgcaatgtccccaaaggtaccctgtcctgcccccggcctctgggcctttgtatattctccttctgccccagatgccctcatctacccctgctcttttcctggctccttctcagtcttcagagccccacttggaggccacctgctccaggaagccttccctgtccctgcctggcaatgcccctgacttggttagatgccccacaggaccacactgctccctgacatcacatctttcacagagggtggggactgcccgtcctcttatctgtctccccagcgatgagccctggagtgagcagctgtatctctggcacctggcacagggcatggcatgaagtgaaagattcccgaatttctgtcgaatgactggatggcaggctgctgaactgtcatgacctctacggaaactgatctcaccaaacttctttggacagacgcggagtcatctctgaagaccccaggtgtgccactaaat

SEQ ID NO: 35862 - DNA, 2300 bp, Homo sapien
catgccctgtgccaggtgccagagatacagctgctcactccagggctcatcgctggggagacagataagaggacgggcagtccccaccctctgtgaaagatgtgatgtcagggagcagtgtggtcctgtggggcatctaaccaagtcaggggcattgccaggcagggacagggaaggcttcctggagcaggtggcctccaagtggggctctgaagactgagaaggagccaggaaaagagcaggggtagatgagggcatctggggcagaaggagaatatacaaaggcccagaggccgggggcaggacagggtacctttggggacattgcatgtaattgaccacattcggagtttggatttggaagtggtggaagagatggagatggtgagacaagtagtaagcacgtcagccttccaggtgcgctcctttccgatgagcactgtcttatcccacgtaactttgagaagtttgggcctttcccactgtggcagaggtttcctgaggctcttgcatacatggccctatggttgctcatcagatctttctcccagtagctgctcagcatggtggtggcataagcccattttccggagccagggattcagttgcagcaagacatggcccggtctgggaggtcaaccatgaagaaggcagtagctgtcattgcccaaccccagaaatcccaatcctgttttctccctctcagtcctgatcatggattcagcagcagcgaactcgccaatgtagtgggtggcacagccagggtcttgactctggctctgcagtagcacagtctggaaaagctctgaggggagagagacccccactggtccgagggtctggcacagagccagaaatgggggggaaggtatggggctgggtcgcctctgacctctcaggtaccatccaggaggccctggcctctcactgaacccggccactcctctttggcatggcctcttcccaaatccccaaactgcctccttacccacaaaagtggtctctgagtgtcagtccagtgggacccccaccccttatggcttcagttccccaaatagggctggacccttgatcctgatccagctgtggctatccagccccttcctggggactttggactttgaggggggcatgcccagttgtgctgggaatccatactttccctggctggagtagaacctgtggactgtagtcctgagggcagtcatgttctgcctgtgcctggaaacacaagaaacttgactgcagagagaagaaagaggagagaggaacagagcgaggaaaccgcccgtctccggggctttttctgttccctatccttgactttctaagaccagtggggtcccctcctctgcttctttttcctgagttctgtgaaattccccaattcttattttttatctcaaaccagctcaaggtgggctgttttcctttcaaccaaagaaaggtgctcctggtggctaaaggtacatattcgacagctagatttccaggctggaatcctgccctccacaacatgcgaacaatacccgtgttgcatatagagcatggctgtgaagagttgagtgagtgcccacaaagcacttagagcagtgtctggtacatgctattactccgcagcgggaaaccacttcctcctttgtcttctgggcacttttgtgagtgaaaggaggcactaataacaatcacactgggatacctgtatatactggaatgccccaggcaaaccaggcttaaactgtattactctatctgtagcttaaactaacaaacaacccacacaaatcacattttgttcttcaggcgattcaggaaggcctattaggcagggactgccattttctctctgagacaaacatcatgccagtaaactggcccacggtggggtggcagagggagagggcccaggtgggggcggacactattgcctgcacagttgatgtggaaccagaaagctgactctggatgcaggaaaaaggtcagggttgcatttcccttccttgcttcttgatgggtgatcaatttttttgaaatacggacgtcccaaggccaatgagactggtgtcattccagaaaagggccactctgtgggcgggtcggtgggagggtacctgaaggtggggtcaagggaggccccaaaacagtctacacagcaggagggatggctggggctcttgagctataagtggcacctcagggccctgacgggcgtctcgccatgctgctcctgggcctgctgctgctgctgcccctgctggctggcgcccgcctgctgtggaactggtggaagctccggagcc

SEQ ID NO: 35863 - DNA, 2300 bp, Homo sapien
gcctcccttgcgcagggtcctgcctcctgacccatgggcctgctctgctcttttcagcgcccctgcccacaccactgccggtggagccccgcctgggggagctggcggtggcggccgtgacctcggactcagtgggcctctcatggacggtggcccagggcccctttgactccttcctggtacagtacagggacgcgcaggggcagccccaggcagtgcctgtgagcggagacctccgagcggtcgccgtctcggggctggacccggcccgcaagtacaagttcctgctctttggactccagaatgggaaacgccacggcccagtccctgtggaggccaggaccggtgagtgagggctggaggcctcccgcggccagagccttcgcccccttgtggcacctgttggaatttcacgttctgtgccccacactccagtcctcagcacccactgatttattgggtccaggaaaacccaggccctgagctctcctctcccactcacactcatccctctccctactttccctgcaccccaggggacacttgctttcttgtctggctcctcttttattcctactcctggcccagtcaccctcccgttcctgggaccggctcacagagccatagcagcccaggaagctccgtggcccctttgcctccatcccactctccatgcacctcactgtcttttccagccccagacaccaaaccgtctccccgcctgggggagctgactgtgacagatgcgacccctgactccgtgggcctctcgtggacggtccctgagggcgaattcgactccttcgtggtccagtacaaggataaggatggtcggctccaggtggtgccggtggcagccaaccagcgggaggtcacagtccagggcctggagcccagtaggaaatacaggttcctgctctatggtctgtcaggcaggaaacgactgggccccatctctgctgacagcaccacaggtgagtcccagtccagcctccaccttttccagagctgcctctcatccgagccctcagagctggccctgcagccttcccgtgagattccctctatcagccctgacacaaccatcttaactccgaaagtgagtccctctgtgtgtcaggcacagttctgaagcatatgcattacttcctttcattcgctgactgctgaggaaataaaagggacacgggctttggggccagcagatctgtgttccagttccagtcctagcctttgccagggtgaccatggacaagccgcttcatccccgggacctcagtgtcctcacctgcataatgctgggaatggcgctggactcagtagtggttcccatcctcctccctcctccctgactcggagccgaggggtggaagaaaagggagggcttggctatggaaagacgatggaaaaacctggtgtcactatgcctatgactcagctccctgaggaaggggtgtggtgggtcaccgaccctcaccccactcccaggaccatgagtcactatgcccagaggaggacagagcagccggccagtctgggcctgggtccctgggactccgtaattctcttcccaaaccctcactgtggggacggggtacagatccccacccatcggccccagccccacccgggcaagcctctgctctgccctctgttctcccagctaatcccctgtcttctccctgccccaccctggctgccccggcccagtggggtcagtgtggggctggggaagcaggaggcacggatgttcaggctgatggccacaaggggacaagggggagatcacagcctggcagtgatgggagccgtgcattggccggctgcccagaccagctctcgatgtttggggtgtctccgtgacaacccagagacctccggggagtctctctcagctctggcctcattcttgctcaggggctgggggtcagggtaaacaaaggccctctctgcacccccagccacccatccctcgggagatgatctgtaatgaatttggcgcatcctcgatcacagcagggaaggggcggggcaggaaggagtttgggcagcagcctccagaggaggagggggctgttctccctcattcctgtggggcatggcgggagcaggcctgtgtgtctcctcaaggagctgtccctggggctacactggagggaccatttcccagaacctcacacctccgggaggctgccagggcttaggcaaaggcagcatgtgactaagagctttccctcctccctctgcacagctcccctggagaaggagctacctccccacctgggggaactgaccgtggc

SEQ ID NO: 35864 - DNA, 2300 bp, Homo sapien
ctggtggggaatgggacaggggtctggtcagcaccacagaactgcttgtggctggggctgggactccccttgggccttcctatgtggttgacccctggctccccctgagcagggaggggccatcaggagttttgctgtgctggtggctgtgccaggtcccccacagctgaccctggaacttgttacgtgtgttagctgtcagctgagcaggaccacccagccccaagaatggacttctctgaaatgacctcaggtcccccagtcatagccttggcttctccctccttttccccaggacccaaggacatccccctcactctctctccctccttctccactgcagaggaagagacccccagccccacagaacccagcactgaggccccggaggcccctgaggagccgctcctgggggagttgacagtgacaggatcctcccctgactcgctgagcctctcctggaccgtcccccagggccgcttcgactccttcaccgtgcagtacaaggacagggacgggcagccccaggtggtgcgtgtcaggggcgaggagagcgaggtcaccgtggggggcctggagcccgggcgcaaatacaagatgcatctgtacggcctccacgaggggcagcgcgtgggcccagtgtccaccgtgggcatcacgggtgagtggggggacaggccctcgtccccaggtttacctctgcagcccccttgtgtttctcctttggatcttggcacctcttttgactgggcctctaggtttctgtcttttctcccatgttgctaatgatcctgcctcatccttggattcatggagactgtgtggagtcagatgggcaggtagtccatgccctgtttgttgtagcttccttctcccattgtgatctggaacctccatgttgctcgtgtgctcatttgttagtcttcaggctcccttaaggagtattttagtggctcagaaagtgcttcagatccagctgcccagatctgcatgtgccttcgaatgtagtgattgtgcgactttgcaggcgtttcctaaccttgtgcttcagattcctgcaaagttggggtgatgataataatggcacccacttcatatgttgtgcgagggttaaatgcaccactgtttgtgagctgcttacagcaatgcagggcacagattctaaaacaagcgttttagaggaggccgctaagaaatgctcactccagtcctgggagagcactgcctcccttgcgcagggtcctgcctcctgacccatgggcctgctctgctcttttcagcgcccctgcccacaccactgccggtggagccccgcctgggggagctggcggtggcggccgtgacctcggactcagtgggcctctcatggacggtggcccagggcccctttgactccttcctggtacagtacagggacgcgcaggggcagccccaggcagtgcctgtgagcggagacctccgagcggtcgccgtctcggggctggacccggcccgcaagtacaagttcctgctctttggactccagaatgggaaacgccacggcccagtccctgtggaggccaggaccggtgagtgagggctggaggcctcccgcggccagagccttcgcccccttgtggcacctgttggaatttcacgttctgtgccccacactccagtcctcagcacccactgatttattgggtccaggaaaacccaggccctgagctctcctctcccactcacactcatccctctccctactttccctgcaccccaggggacacttgctttcttgtctggctcctcttttattcctactcctggcccagtcaccctcccgttcctgggaccggctcacagagccatagcagcccaggaagctccgtggcccctttgcctccatcccactctccatgcacctcactgtcttttccagccccagacaccaaaccgtctccccgcctgggggagctgactgtgacagatgcgacccctgactccgtgggcctctcgtggacggtccctgagggcgaattcgactccttcgtggtccagtacaaggataaggatggtcggctccaggtggtgccggtggcagccaaccagcgggaggtcacagtccagggcctggagcccagtaggaaatacaggttcctgctctatggtctgtcaggcaggaaacgactgggccccatctctgctgacagcaccacaggtgagtcccagtccagcctccaccttttccagagctgcctctcatccgagccctcagagctggccctgcagccttcccgtgagattccctctatcagccctga

SEQ ID NO: 35865 - DNA, 2300 bp, Homo sapien
cttttcttacaagatgtgaacatacaagacatgagcttctccatgagcctggaaaccaaagggtgaatcaaatggtaaacaaagataatttcagaacctgaaactatatctgctaagcttccagtggcttccccaaatgccttataagcttgtgtacatctggaatcccacatttctctctgagaccccaacagtgggcttccagaacatcccaggaccatccttcttgctgtcttctctgaggtccctggccactctctgtgccaaatgtacttatgttgaccattcttcctaaataataaagccaggacatagggcataggcacacgcgcgtgcacacacacactaaaggatatgaccatggaacagaaatctgaaggtgtcagaggaaattcataccctgtgttctgccctctgtgtgatactgtctccagaccctccctcttcctatcactgcagggctccccacctcctgccaggagatccttgggaagctgctacctactgctggctctgggggcttcaggccaaggcagaggaaggaagctgagcctggctctgtccaagatgctgacttcatcctccccatcaaagccaggaaaaaaacagccacacacacccagacacacggacacacacggggacacccacgcaaaagcccatgtgtgcctttgccctcggccacatggagcttactgggcatctggccacagccacatgcagtgcaggcacgccctgacccaggaacaccacacacctgccaccatggggatctgacctggtgtgcagacacctgggccgtcacccatgtggcagaatcaagcacatatgggctccctcacgtacctttcacccgtgacttggccaagttacacctcagtggtgaggtctgtagcaggatagagagacccagtcctcactgtgaagctgggggtagtgggttcccactcagctgggatatttctcctctgtagcaaagtctctttttcagctccttgtcagggcagcacatggggagatgaagctagggaaacacccaacagacttatgtggggtgtgtctgtctccctgtcccccctgtcctctggctgtcagtcttctgcctgggaccagagacagcgtgtccgtttcctccagcccctacctctccccgcctctgttcctgctcccccgcagcacccaggcaccagccccccaccctgctttccaccacttcaccctctattcaggtgacccacccttatatttgcctcctgtctctagccctttcttcaaccctaaaccttcctcctaaccttcaggctttccttccttgtccgccccaaccccagcttcctccccaaggcttgtatgtcccagtgttcacccaagcccttgccctgccagtgcccaagcctcacctgctctttctctagggacttgctgaggtaggagaatgcaaagggggcagtgacaggagagggactgaacagaacagacagcaggagtggctcggggacgggataagccgagaagatagaaatggtgggactggagcagggtggggacttggggtcccagagacggtcccagttggagaaagaggttgcctcttgcctcctgccctctgcccctgctccctgccccagactgccaggggagaactggtgagaggatgagggagccagcactgggtgatagacatggggtgcgatccagagatccaagctagagcagtggctgggaagagatgggagaggagcatgggggagggaggggaagggggctggccatgaggaaggatataggctgagaggaaaccactggggtcagagaggaggggcagcaggtggagaaatggtggggaaaaaagaaatggcaggaagggtggggggtgtcaagttgggcaaaaattagggtgagctaaaaatggcatagggaaaggacgtgggaggtaagaccggggctgggggttgagatgagggtatggtgagacagtgatgctagacagggagtgggggctggggtgggggcaggagaagaggaggggtggcatgtgggagggcctgggaggggtgggaggacctgccctatctccgctcccctccctgacctcatcctggtcctccccttctcctcccctgctcgctgcagactccctcctcactgtcgctgccgagatccacagtcggttgtggctcagcccctgttgcaggggacaagtgagggagacttccctgtcctgccctgagacgccgccctcccggggttggggacagagcaggtgcagaggcactgcagctgctcggttgcccaggtaa

SEQ ID NO: 35866 - DNA, 2300 bp, Homo sapien
atcatgactgtattatctattcaaaaatataaattgaagttttaaaaagcaatcttagtgatcatataattaagtaccaaagtgaacggtatggaccagaggtagtggtggactgttgacctgtgggctgaatctggccctcagaagggttttatttcaccgacatggggcctagcattttctttcatggagtgatcaacaagtcataaaggcagatttattggaggccatggaggctcagaggtgactgaggctttgctgtttggtgcctgggaggaaaacttgtgtgacggggcaatcaggaagcctcatttatggccagttagatttgggtgactggtgaggcatgagaatggaagggaccagcaggcagcttggaagtcagaatctggtgcaggtgagcagccagggggagatgcacacttggcggttgtcagcatggagatgcattgggcagggataaggtggaaatccagcaagataggaatttgggccatgtgaatgctggagacccccctgccacttcccctgctcaggcctattctatgtgaatagacaagttctgtgaacaagaaagagggaaacgcagaagggcaaagacagctttgaggaacatggagcagggatgagaaaaatcagaggagccactaaaggagaaagggaagcactaggcgaaaagcggggcggagagccagcaggtgagcagctctgtgactgcccctcctggatggcctgtaatctagggccagaagagttttattttcaggttcaaagagaaaggacccatttccccatcttaaccctcttttttatttttttgagatggagttttgctcttcttgcccaggctggagtgcaatggcgcgatcttggctcactgcaacctttgcctcccaggttcaagcgattctcctgcctcagcctcctgagtatctgggacacagggatgcgccaccatgcccgactaattttgtatttttagtagagacggggtttctccatgttggtcaggctggtcttgaactcctgacctcaggtgatctgcccgccttggcctcccaaagtgctgagattacaggcgtgagccaccatgcccagcctcccatcttaaccctcttaacccttcagtgtttacatgatatccagcttttgcctcatcctgcctcccacagatgtccagaccaagatagaacctgtctctccatgttcttccgtcaactctgaggcctccctgctctcagccgactcctccagccaggtgagcaccaccttccttccttcctccaggttttccagtgagttcctcctgacctagaggtatgagagctttcccttcttcagctccttctcctcgacactcttcctgactaatgtatctctggaatgccccacataggcttttataggagaggaggtcctggaagtgaagacagagtccctgtccccttcaggatgcctcctgtgggatgtcccagccccctcacttggagctgtccagatcagcatgggcccatcccttgatggctcctcaggtaatggagtctcctgacacttggaatccctagtgagaggcctttggtcctgacatttcttgttcttttctctcaccttccttcaggcaaagccctgcccacccggaagccgccactgcagcccaaacctgtagtgctaaccactgtcccaatgccatccagagctgtgcctcccagcaccacagtccttctgcagtccctcgtccagccacccccaggtactgaagaaggagaaaagggccgggcatggtggctcacgccggtaatcccagcactttgggaggctgaggcgggcgaatcacctgaggtcagaagtttaagaccagcctggccaacgtggtgaaaccttgtctctactaaaaatacaaaaattagcgtggagtggtggcaggcgcctgtaatcccagctcctcgggaggctgaggcaggagaatcacttgaacccaggaggcggaggttgcagtgagccgagatcatgccactgcactccagcctgggcgacaaagcgagactttgtctcaaaaaaaaaaaaaagaaaaaagaaaaaccaaaaaataaaaataaaaattaattaattaattaaaaaaaaaaggccaggcacagtggctcacgcctgtaatcccagcactttggcaggccaaggcaggcggatcacaaggtcaggagatcgagaccatcctgactaacacagtgaaaccccgtctctactaaaaatacaaaaaaattagccaggcgtggtggcgtgcgtctgtagttccagctgctggg

SEQ ID NO: 35867 - DNA, 2300 bp, Homo sapien
attcctcccttctcccgattggctgccaggaatttgactagattcggagtctcgcgggctccagggttagttgtcagtatctttcccagttgttccgccccctacccccgcctcccgcaccgcgcccctctccggctgccctctccgcgtggggcaaggctccgagggcagcattcagtagccatttagctttggaaggagaggtgattcgaatggcccggctcctcctgtcaccatgctaggcactttggccgcgcaggtacttattgacccgaccgggtgtccgtagttggcgcggctaccttaaccgcagggaattgtggaatttatagttctaaattatatgtgggtggaacggggaagctggagcagatttttggaggaaagcaaaactggggactttcaggactaggggcctgggtctcagaagaatgggaaaggacgagaaaggagtctaaataagaaccctgctattagcattgtttggttttcttttcaggtgctgacctgaacctggttcatccctttctgaccaaaactgttcactcaccgtggaagggactaagcatccatatggagacgccaccagtcaatacaattggagaaaaggacacctctcagccgcaacaagagtgggaaaagaaccttcgggagaaccttgattcagttattcagattaggcagcagccccgagaccctcctaccgaaacgcttgagctggaagtaagcccagatccagccagccaaattctagagcatactcaaggagctgaaaaactggttgctgaacttgaaggagactctcataagtctcatggatcaaccagtcagatgccagaggcccttcaagcttctgatctctggtactgccccgatgggagctttgtcaagaagatcgtaatccgtggccatggcttggacaaacccaaactaggctcctgctgccgggtactggctttggggtttcctttcggatcagggccgccagagggctggacagagctaactatgggcgtagggccatggagggaggaaacttggggggagctcatagagaaatgcttggagtccatgtgtcaaggtgaggaagcagagcttcagctgcctgggcactctggacctcctgtcaggctcacactggcatccttcactcaaggccgagactcctgggagctggagactagcgagaaggaagccctggccagggaagaacgtgcaaggggcacagaactatttcgagctgggaaccctgaaggagctgcccgatgctatggacgggctcttcggctgctcctgactttacccccacctggccctccagaacgaactgtccttcatgccaatctggctgcctgtcagttgttgctagggcagcctcagttggcagcccagagctgtgaccgggtgttggagcgggagcctggccatttaaaggccttataccgaaggggggttgcccaggctgcccttgggaacctggaaaaagcaactgctgacctcaagaaggtgctggcgatagatcccaaaaaccgggcagcccaggaggaactggggaaggtggtcattcaggggaagaaccaggatgcagggctggctcagggtctgcgcaagatgtttggctgattaaaagttaaaccttaaaagagacaggaacttgtgaattgtggtctgtgctgtgagatttgggggtggggggccagagggaaggtttcagcccatatcccattctcagcttttggcttcctaggggaggtagcagtggtcacagtgcgccccttttgaggggcttatctatctccgaggacacatagaagctgtctaaactaaacttagtagtggctgggggagatggtggaccttaatactgggtactacatctcccaggcgctttatcactggagcctgtttggcgcatgcgcttggcggtatggcactgtctggaagttacttcctgctgctgtgctcccattgggcccgcctacacagtcatccgcatctgttgattcacgtgctcagcacccaggtctcttactggtcggtagagcttccgggacgcccccttttttgaaagagtcaactgattagttggtgatggggagaggcgggccttgggaaccgtctcctggttggggggtgggggggaaagatggcggagctgatgctgctcagcgagattgctgacccgacgcgtttcttcaccgacaacctgcttagcccggaggactggggtctgcagagtgaggcaccggggaggggagagggctgtggcaaactgtccctgaggcacgcgggaaagaagc

SEQ ID NO: 35868 - DNA, 2300 bp, Homo sapien
aggctgtgtaggtagctggacaagcaagactgaatcacaataggtctctacatcttctattaggaggagaacctgcaacatccagtggagcaggtcacaccagttatacatgtaaaatgtaggataaactaaaggggcacagagccaggggagaagacaatgggatgagactgttctagaatctcatcccattggttcattgctgggtgtggtggctcacacctataatcccagcactttgggaggctgagatgggatgatggcttgaggccaggagtttgagaccagcctggtaaacacagcagaccccatctctctaaaaaaaaaaaaaaaaaaagaaaaacatacggtttatgaaccagcagcatctgcattaaccagcttattgaaatgcagaatcacaggccccacaacagacttcctaaatcataatctgcaacttaacaagttccctaggtgatatgtatgcacacttatgtttgaaaagcactaagatttcttgatgaaggaggacttgaaaggcaatgatggatgtgaaaggaaaggtaaagagaagcctcaggtagtcacccaagggacagggccggttggagagagagtcccgaggttttatcctggagaacaccctgtactgaatgagctctgaacataaagatagttagcataggagggcctgaagtctccagataaaaggctgctgccactatcatttaccacgacctctgccattctccactctattgtcatccgcccccagtctccattccaggacttctctacactttgactttttgtttgtttgtttgtttgtttgagacggagtcttgcgctgtcgcccaggctggagcgcagtggcacgatcttggctcaccgcaagctccgccttccgggttcatgccattctcctgcctcagcctcccgggtagctgggactataggtgcccgccaccacgcccagctaattttttgtatttttagtagagacggggtttcaccatgttgtccaggctggtctcgaacccctgacctcaagtgatccccccgccgccccgccccctccccccgccccgcccccccccgccgcctcggcctcccaaattgctgggattacaggcgtgcgcgatgcccggctttttatttatttatttatttatttttgaggcgggaatcttgctctgtcgccaggctggattgcagtggcaccatctcggctcactgcaacctccgactccctggttcaagcgattctcccacctcagcctcccaagtagctgggattacaggcacacgccaccatgcccagctaactttttgtatttttagtagagacgagatttcaccatgttgccaggatggtctcgatcacctgacctcgtgatccgcccacctcagcctcccagagtctcagttgccaaagctggagtgcaatggcgcgatctcggctcactgcaacctccgcttcccaggtaagccattctcctgcctcagcctcctgggtagctgggatataggcgcccgccatcacgccgagctatttttgcatttttagtagagacggggtttcaccatgttggccaggctggtcttgaactcctgacctcaacctcccaaagtgctgggattacaggcgtgagccaccgcgcccggcccaccttttttttttttttttttttttttttttgtttgagacggagtctctagtctcgctctgtcgcccaggctggagtgcaatggtgtgatctcggctcactgcaacgtctgtctcccgggttcaagcgattctcctgtttcagccttccgagtagttgggattacaggcgcgcgccaccatgacctactaatttttgtatttttagtagagacagggtctcaccatgttggcccactttgactcttgagcagcctggccagcccgaccgcgccaaattctgttcgattctgcctagttcggttgctctggcctagttcagttgctaaggcctggagcttcatggttgcggaggaaatgatgtcacgttcaataggcgggctaaccagattcctcccttctcccgattggctgccaggaatttgactagattcggagtctcgcgggctccagggttagttgtcagtatctttcccagttgttccgccccctacccccgcctcccgcaccgcgcccctctccggctgccctctccgcgtggggcaaggctccgagggcagcattcagtagccatttagctttggaaggagaggtgattcgaatggcccggctcctcctgtcaccatgctaggcactttggccgcgcaggtac

SEQ ID NO: 35869 - DNA, 2300 bp, Homo sapien
ccctctggattttgctcccttgacaacccccatctggtcatgtctccatatttcctcacaggatgtctccatgccagccagtgattgtccatctgtcactcccaatgatgccatccctgcaaaacctggctgtacctccttcaccctctcaacctacccccctgaccatgttgttggcaaggggcagaggctgccactggaaagaggaaaggaagagaaagggggagacagaaagaggagggggactgggggagtgttgagagctggagagaaggggaatgaaatagaaccacagctgaggaggggtaagggagggggttggggcaagggggacggagagtctggagacagtggagggggtgggaggttttgttattgtttttacctgacttttcggatgacatgcctgcggtctcgctgggacagggtccctgcagccggagtgggggtcctcggccggtgctggagtctgggtgctggatggcgcagccggcagcagcgcagagatggagagatgaaggcagcggcggggggggggggcggggggggcgggcggagggagagcggggagggggggagcttaaagggaccgaggcgagggagggggagcgcttcagatgtttcccactcggtctctctctgctctcggaccacctctctcctcctcttaccccggcattcaagcccccagtttgggttcctttggagttgtcatggaaacacggaggctagaccaggcgaggcgggtgggactaaggaaaggaaggaaggagaactctctggagtctcccccaccaagactcagtgattgtattgtgggaggaagtgaacaggttctcagtggagttaataacccaggtgcctccagaggcaggtcgtctccccctcttagctccctgcaaggtgccagggtcttctcccaaatccttggccccagtttcctcctctttagaagagataaatacttgtgtgtgagagagaattgtgcagagttcagaactgcgatggtctgaaaagttcccagggtttggtgaacctaccaacctagcagtaaagagggaggcccaggtctgtaaatcagggggagctgggccttggagggaaaagggagagagagtttgggcggtgtgcatacataccttcttcgtccaggactaaggagctgaagctcttttggagggggtagggggtatgacttaactgctcatttctggcagctctgttggtaatgtgtgcttgttcccccactttccctttgcttttgaggctgcttagagtctctgggctggtcaatgttcagatccattccctaaacccccctactcccacccaccacctcccaccaagacgcatctccagctcctgagtcgacctgcagtacagcgttattagtctttttatttgcttattgcatcttgggagcgcgtgggtgggtgaagggagcgaggataggaagtctatggagatttacaccagtttttttttttttttaaacaaaaacacagccagataattattattcttcccttacgtccccccagcccccacctggggcagtcgctctcccggctgcgtcccttttcgtccatgtcctagcagagactacagagcagtacagaggctctcgctgaaaccagtcccaggctccacagagtcagatcacggcttcacaccagtcgttctggtcacttaggcgttcgcgtgagcgctcaaccccttaccgccacctcatcgtcactctacaccattctgagcgcaaaaatgttttgattgagacaaatttagaccaagcaatgaccttgtaaacagagagaggggctcagacatgctgagaaatccttatctctagagaaacgtctttaaatgctaagtaaaagccctagcaagtaaaagccctgaggcactagggtgtcggttaggggtcacaggcggagaggtggggcgcctgggggtttcggtagggagccacccacagataactcagacagccagattctgggggtcgttcaggttgaaagactggtcgaaattacgcgggcatgagtcagcgcatccctacgcgccctccgccccttgagggtgggtcgcttatagggaggggagtagagtagggcaggagaaactgggccaggctgcacttagctcaaggggcctcgaggactctctgcgtctctggagacaagggcactacacgcacttcagaatgaagagttgtaagtcgctgacctggggcggactggagggtggggtggggtgggtgttgaggggcacgcccgggctggcatcagccctccaggcca

SEQ ID NO: 35870 - DNA, 2300 bp, Homo sapien
cccaggacaggaggggcaatggaatattccattgcgccctaggtgctggggaggaaacaggcggagcgatccatttaggccagtggggagaggaaaaagcagcaaacatattctgggaatggaaagaaggcctctccaggcttcgttgcccccagcgacccaaaagtccgatttccccgccttgattctccccacttcccaatacaggcgtctggctccgcagcagaacacgaagtttgcattccccaaggggcggccagggggcggaccagggaaaggtagtcctctgcattttgccgtgtgctgggtgagtggcagggtggcctggagggctgatgccagcccgggcgtgcccctcaacacccaccccaccccaccctccagtccgccccaggtcagcgacttacaactcttcattctgaagtgcgtgtagtgcccttgtctccagagacgcagagagtcctcgaggccccttgagctaagtgcagcctggcccagtttctcctgccctactctactcccctccctataagcgacccaccctcaaggggcggagggcgcgtagggatgcgctgactcatgcccgcgtaatttcgaccagtctttcaacctgaacgacccccagaatctggctgtctgagttatctgtgggtggctccctaccgaaacccccaggcgccccacctctccgcctgtgacccctaaccgacaccctagtgcctcagggcttttacttgctagggcttttacttagcatttaaagacgtttctctagagataaggatttctcagcatgtctgagcccctctctctgtttacaaggtcattgcttggtctaaatttgtctcaatcaaaacatttttgcgctcagaatggtgtagagtgacgatgaggtggcggtaaggggttgagcgctcacgcgaacgcctaagtgaccagaacgactggtgtgaagccgtgatctgactctgtggagcctgggactggtttcagcgagagcctctgtactgctctgtagtctctgctaggacatggacgaaaagggacgcagccgggagagcgactgccccaggtgggggctggggggacgtaagggaagaataataattatctggctgtgtttttgtttaaaaaaaaaaaaaaactggtgtaaatctccatagacttcctatcctcgctcccttcacccacccacgcgctcccaagatgcaataagcaaataaaaagactaataacgctgtactgcaggtcgactcaggagctggagatgcgtcttggtgggaggtggtgggtgggagtaggggggtttagggaatggatctgaacattgaccagcccagagactctaagcagcctcaaaagcaaagggaaagtgggggaacaagcacacattaccaacagagctgccagaaatgagcagttaagtcataccccctaccccctccaaaagagcttcagctccttagtcctggacgaagaaggtatgtatgcacaccgcccaaactctctctcccttttccctccaaggcccagctccccctgatttacagacctgggcctccctctttactgctaggttggtaggttcaccaaaccctgggaacttttcagaccatcgcagttctgaactctgcacaattctctctcacacacaagtatttatctcttctaaagaggaggaaactggggccaaggatttgggagaagaccctggcaccttgcagggagctaagagggggagacgacctgcctctggaggcacctgggttattaactccactgagaacctgttcacttcctcccacaatacaatcactgagtcttggtgggggagactccagagagttctccttccttcctttccttagtcccacccgcctcgcctggtctagcctccgtgtttccatgacaactccaaaggaacccaaactgggggcttgaatgccggggtaagaggaggagagaggtggtccgagagcagagagagaccgagtgggaaacatctgaagcgctccccctccctcgcctcggtccctttaagctccccccctccccgctctccctccgcccgccccccccgccccccccccccgccgctgccttcatctctccatctctgcgctgctgccggctgcgccatccagcacccagactccagcaccggccgaggacccccactccggctgcagggaccctgtcccagcgagaccgcaggcatgtcatccgaaaagtcaggtaaaaacaataacaaaacctcccaccccctccactgtctccagactctccgtcccccttgcccc

SEQ ID NO: 35871 - DNA, 2300 bp, Homo sapien
gggcaagggggacggagagtctggagacagtggagggggtgggaggttttgttattgtttttacctgacttttcggatgacatgcctgcggtctcgctgggacagggtccctgcagccggagtgggggtcctcggccggtgctggagtctgggtgctggatggcgcagccggcagcagcgcagagatggagagatgaaggcagcggcggggggggggggcggggggggcgggcggagggagagcggggagggggggagcttaaagggaccgaggcgagggagggggagcgcttcagatgtttcccactcggtctctctctgctctcggaccacctctctcctcctcttaccccggcattcaagcccccagtttgggttcctttggagttgtcatggaaacacggaggctagaccaggcgaggcgggtgggactaaggaaaggaaggaaggagaactctctggagtctcccccaccaagactcagtgattgtattgtgggaggaagtgaacaggttctcagtggagttaataacccaggtgcctccagaggcaggtcgtctccccctcttagctccctgcaaggtgccagggtcttctcccaaatccttggccccagtttcctcctctttagaagagataaatacttgtgtgtgagagagaattgtgcagagttcagaactgcgatggtctgaaaagttcccagggtttggtgaacctaccaacctagcagtaaagagggaggcccaggtctgtaaatcagggggagctgggccttggagggaaaagggagagagagtttgggcggtgtgcatacataccttcttcgtccaggactaaggagctgaagctcttttggagggggtagggggtatgacttaactgctcatttctggcagctctgttggtaatgtgtgcttgttcccccactttccctttgcttttgaggctgcttagagtctctgggctggtcaatgttcagatccattccctaaacccccctactcccacccaccacctcccaccaagacgcatctccagctcctgagtcgacctgcagtacagcgttattagtctttttatttgcttattgcatcttgggagcgcgtgggtgggtgaagggagcgaggataggaagtctatggagatttacaccagtttttttttttttttaaacaaaaacacagccagataattattattcttcccttacgtccccccagcccccacctggggcagtcgctctcccggctgcgtcccttttcgtccatgtcctagcagagactacagagcagtacagaggctctcgctgaaaccagtcccaggctccacagagtcagatcacggcttcacaccagtcgttctggtcacttaggcgttcgcgtgagcgctcaaccccttaccgccacctcatcgtcactctacaccattctgagcgcaaaaatgttttgattgagacaaatttagaccaagcaatgaccttgtaaacagagagaggggctcagacatgctgagaaatccttatctctagagaaacgtctttaaatgctaagtaaaagccctagcaagtaaaagccctgaggcactagggtgtcggttaggggtcacaggcggagaggtggggcgcctgggggtttcggtagggagccacccacagataactcagacagccagattctgggggtcgttcaggttgaaagactggtcgaaattacgcgggcatgagtcagcgcatccctacgcgccctccgccccttgagggtgggtcgcttatagggaggggagtagagtagggcaggagaaactgggccaggctgcacttagctcaaggggcctcgaggactctctgcgtctctggagacaagggcactacacgcacttcagaatgaagagttgtaagtcgctgacctggggcggactggagggtggggtggggtgggtgttgaggggcacgcccgggctggcatcagccctccaggccaccctgccactcacccagcacacggcaaaatgcagaggactacctttccctggtccgccccctggccgccccttggggaatgcaaacttcgtgttctgctgcggagccagacgcctgtattgggaagtggggagaatcaaggcggggaaatcggacttttgggtcgctgggggcaacgaagcctggagaggccttctttccattcccagaatatgtttgctgctttttcctctccccactggcctaaatggatcgctccgcctgtttcctccccagcacctagggcgcaatggaatattccattgcccctcctgtcctgggt

SEQ ID NO: 35872 - DNA, 2300 bp, Homo sapien
cctgcgagtagcagatgagatgcaccccttgaggggcctttgccatgatggggaccacagcctctcggaacccttgcacctgttcccacaggggtcgcaagctctctctcccatcgaagagatcgagcactgtcaccacagtcccggggtgtgtctgtgggaagggggcaatgcagccaccggggataggctaagaagctcccacacgccaccccctggcccgcgtccacaggtctattgtaccctgctagaaccagggatcccgtcccccaactctcccccacgccagcaccagctccctgaggaactgggcaggcccagaggggtggctttcagttccccgctctccctcccctgccacagtagacgcctctaacgccctgcacccaggtgtcccctgccagacctcattgatgtattccagcaggtggcggaagctgtacgagctgtcgaagagcccatgcaccacgatgaccggcttgtaggacgcgcggtggggcgcgggggctgcaagcagcagcagcggcaggaaaggcaacagaagcaggacccacgccgcggggagccgctgcccgcagagccccagcatgctcccgcctgagaaaggggtgataagggcatgtgagggagatggcaacaccctcctccctcggaacagacgcccggcaatcaagccacctcctctcgctcccacaccaggtccgtgtcacaaaatagcctacttttaacttactccagccctctccctacaaacacacccccccaccacgttgacgcaccaacgcgcacccgaagtcccgcctccaactcagcgttcgggggacttgttctctaggtccaggatcttcctaatgcatcgcctcagccatgaacaacgcggagttctttaatacccgtgagcagcagcccaggccccttgaagagtgcagactcccacctggcctgggtccgtaggcctcgctccacccgctgtttacttatcccaagtctggaacccacggtggcggggggaagggtgaggaaagagagcgcaggggaatgacggatgggagggggaagggcgggctgcttggggtcgcgcaaatccgtcacgtccggggctttctctggcaaccgcgcgagcgttccccgcaacacagacccaggacaggaggggcaatggaatattccattgcgccctaggtgctggggaggaaacaggcggagcgatccatttaggccagtggggagaggaaaaagcagcaaacatattctgggaatggaaagaaggcctctccaggcttcgttgcccccagcgacccaaaagtccgatttccccgccttgattctccccacttcccaatacaggcgtctggctccgcagcagaacacgaagtttgcattccccaaggggcggccagggggcggaccagggaaaggtagtcctctgcattttgccgtgtgctgggtgagtggcagggtggcctggagggctgatgccagcccgggcgtgcccctcaacacccaccccaccccaccctccagtccgccccaggtcagcgacttacaactcttcattctgaagtgcgtgtagtgcccttgtctccagagacgcagagagtcctcgaggccccttgagctaagtgcagcctggcccagtttctcctgccctactctactcccctccctataagcgacccaccctcaaggggcggagggcgcgtagggatgcgctgactcatgcccgcgtaatttcgaccagtctttcaacctgaacgacccccagaatctggctgtctgagttatctgtgggtggctccctaccgaaacccccaggcgccccacctctccgcctgtgacccctaaccgacaccctagtgcctcagggcttttacttgctagggcttttacttagcatttaaagacgtttctctagagataaggatttctcagcatgtctgagcccctctctctgtttacaaggtcattgcttggtctaaatttgtctcaatcaaaacatttttgcgctcagaatggtgtagagtgacgatgaggtggcggtaaggggttgagcgctcacgcgaacgcctaagtgaccagaacgactggtgtgaagccgtgatctgactctgtggagcctgggactggtttcagcgagagcctctgtactgctctgtagtctctgctaggacatggacgaaaagggacgcagccgggagagcgactgccccaggtgggggctggggggacgtaagggaagaataataattatctggctgtgtttttgtttaaaaaaaaaaaaaaactggtgtaaatctcca

SEQ ID NO: 35873 - DNA, 2300 bp, Homo sapien
ccactgcgcccggccagattttctccagctcttctgataacctccccccaaatctctttgtagcttctttggtttctatgatgcaaatgagaccgtcctggagatggaggagcaactggtgagccccctgggattacttccccttctagccgctgtcccaccttattccagagccctctctgtgactcctgagctgaagggttcaccctgtggggaggaggtccaggatcccagcagtaactcactttgtctctccttgtgtctctcttccatgcttccacgccccttcgaccaccttgaaggtttatctgcgggattcttttgggttgaagactctattggcccggggggccatagtgaggtgtccaatggccggtatctcccacacagcctggcactccaaccgtaccctttatgagacctgcattgaaccttggctctcctgaggatatattcaggggtccccaggaactcctcggtccagagaccaagtggtggccttggaaagcagatgtcaggctttggtgtgcctgtgaccacctcattgctcccatattatcccccatttttagtagagacggggttttagtagagacttggcctcccagaacccccttcctctgctcctccatgaatgacaattccaggcctcccctacctcatgtcctctcatttgggggattgctccgtgctgtccctttctctcaaggccgaagttgggaagtgagaaaccatgtttttaacttgtggctgcttttgctgctgctgctcctccgtatctggctgtatgggtggagaacccaccccctgcccaccacaggggtctccttccaggccactcaggacatttttagcttctctcctccccatgttcccttttttctctaaagtcccctgacatcagccctcccaactcctaagagggactacccatgagagtggggttctgaggctcccctatggggacagttccgttcttgaagtgtcagtgttggggaatatctgtggcctatgaggcccatctcaggtttggggatcccccagtccctatgatcagtgttggagtacccccctgggagagcctagtttctttgaggccccaggccctcttttaactacctttgaataggtgttatccctgtatttatggaaataaagttccatttcctcagtgtgacttggctcatttccaggtggaggggacctggctccccaaggagggtgggggtggagcctgaggcctgggtgcccagatgcctggtctagggtggggacccccttggtgtttccgctctctctcaatgcccattctttgtgggttcctggttctctgcgggttctttcctgctgaagacaattctcttcctctcccagtccccaagactggggggttaagctcagggctccagtggtttgggcctcagcctcatgggtggaatgcgcctgccacccccaggctagacgagggggcagagggtcagggtgggcattcgttgtgccgcttttgagctttgtgggccagagctgggtgtagggctggacaatgagcctcctcttccttgaaagaaggaattttggctgagacaatagggccctgtctgttctggcatggggggtggtggctgactcaattctgttccccctaagccctaacaaatgtcatgaagagaggggggcagttttccccttggtgccctgggctgcccccctgcccctttgtgacgacttgcccttctagctttcctcagctgatcttgctttttctcccataacctgaactgctttgttccctgcagctggttctctccctgccccctaactctcccctagtctgttttgggttcaagggggtactggtggtgttacagagctcatagcttctgatctggggagtccagaaataggggcctcagagggttggaaagatacttctagggagccctttgctggggtggggatgagggtagtgggacttgaccctactgagctgaccctgctggagctaaggaggaggcttgtgggagggggcaggaatgggaggactctctggcccagcccctcctctccttcttagcctgccaggcccacccaccagtctgagctgcttctgctgaggctggtctgcttgaagcctcccaggagaaagaagccaggtgggaatggagagagagaggaaggcaagtggggagagaatttcaaatggggaaagagtggggtttactcagagccttagggtgggcatgagttgcggggtgttttgttggagcaagggatgtgcatttagggcgttatgtgacggt

SEQ ID NO: 35874 - DNA, 2300 bp, Homo sapien
tgaatgacaattccaggcctcccctacctcatgtcctctcatttgggggattgctccgtgctgtccctttctctcaaggccgaagttgggaagtgagaaaccatgtttttaacttgtggctgcttttgctgctgctgctcctccgtatctggctgtatgggtggagaacccaccccctgcccaccacaggggtctccttccaggccactcaggacatttttagcttctctcctccccatgttcccttttttctctaaagtcccctgacatcagccctcccaactcctaagagggactacccatgagagtggggttctgaggctcccctatggggacagttccgttcttgaagtgtcagtgttggggaatatctgtggcctatgaggcccatctcaggtttggggatcccccagtccctatgatcagtgttggagtacccccctgggagagcctagtttctttgaggccccaggccctcttttaactacctttgaataggtgttatccctgtatttatggaaataaagttccatttcctcagtgtgacttggctcatttccaggtggaggggacctggctccccaaggagggtgggggtggagcctgaggcctgggtgcccagatgcctggtctagggtggggacccccttggtgtttccgctctctctcaatgcccattctttgtgggttcctggttctctgcgggttctttcctgctgaagacaattctcttcctctcccagtccccaagactggggggttaagctcagggctccagtggtttgggcctcagcctcatgggtggaatgcgcctgccacccccaggctagacgagggggcagagggtcagggtgggcattcgttgtgccgcttttgagctttgtgggccagagctgggtgtagggctggacaatgagcctcctcttccttgaaagaaggaattttggctgagacaatagggccctgtctgttctggcatggggggtggtggctgactcaattctgttccccctaagccctaacaaatgtcatgaagagaggggggcagttttccccttggtgccctgggctgcccccctgcccctttgtgacgacttgcccttctagctttcctcagctgatcttgctttttctcccataacctgaactgctttgttccctgcagctggttctctccctgccccctaactctcccctagtctgttttgggttcaagggggtactggtggtgttacagagctcatagcttctgatctggggagtccagaaataggggcctcagagggttggaaagatacttctagggagccctttgctggggtggggatgagggtagtgggacttgaccctactgagctgaccctgctggagctaaggaggaggcttgtgggagggggcaggaatgggaggactctctggcccagcccctcctctccttcttagcctgccaggcccacccaccagtctgagctgcttctgctgaggctggtctgcttgaagcctcccaggagaaagaagccaggtgggaatggagagagagaggaaggcaagtggggagagaatttcaaatggggaaagagtggggtttactcagagccttagggtgggcatgagttgcggggtgttttgttggagcaagggatgtgcatttagggcgttatgtgacggtgtgggtatatgaggggagtagcagtgtgtgaaaggtgtggagtttccaggtgcttggtttgtgtgtacggtgtgaaggtatatagctaggggttttttttgtttgtttgttttgtttgtttttttgagacggagtcttgctctgtcgcccaggctagagtgcagtggcatgatcttggttcactgcaacctctgcctccagggttcaagggattctcctgcctcagcttcccgagtagctgggattacaggcgtccaccactgcgcctggctaattttttgtattttttagtagagatggggtttcaccatcttggccaggctggtctcgaactcctgacctcatgatccacccacctcagcctcccaaagtgctgggattacaggtgtgagccaccgcgcccaaccagctagggttttgaaggtatgaagttataagagggcatgttaaagacaggagggttggccaggcatggtggctcacacctgtaatcccagcactttgggaggccaaggcaggcggatcacctgaagtcgggagttcgagaccagcctgaccaacatggagaaaccccgtctctactaaaaatacaaaacaaaattagccgggcgtggtggcaggcgcctgtagt

SEQ ID NO: 35875 - DNA, 2300 bp, Homo sapien
gaaagaaggaattttggctgagacaatagggccctgtctgttctggcatggggggtggtggctgactcaattctgttccccctaagccctaacaaatgtcatgaagagaggggggcagttttccccttggtgccctgggctgcccccctgcccctttgtgacgacttgcccttctagctttcctcagctgatcttgctttttctcccataacctgaactgctttgttccctgcagctggttctctccctgccccctaactctcccctagtctgttttgggttcaagggggtactggtggtgttacagagctcatagcttctgatctggggagtccagaaataggggcctcagagggttggaaagatacttctagggagccctttgctggggtggggatgagggtagtgggacttgaccctactgagctgaccctgctggagctaaggaggaggcttgtgggagggggcaggaatgggaggactctctggcccagcccctcctctccttcttagcctgccaggcccacccaccagtctgagctgcttctgctgaggctggtctgcttgaagcctcccaggagaaagaagccaggtgggaatggagagagagaggaaggcaagtggggagagaatttcaaatggggaaagagtggggtttactcagagccttagggtgggcatgagttgcggggtgttttgttggagcaagggatgtgcatttagggcgttatgtgacggtgtgggtatatgaggggagtagcagtgtgtgaaaggtgtggagtttccaggtgcttggtttgtgtgtacggtgtgaaggtatatagctaggggttttttttgtttgtttgttttgtttgtttttttgagacggagtcttgctctgtcgcccaggctagagtgcagtggcatgatcttggttcactgcaacctctgcctccagggttcaagggattctcctgcctcagcttcccgagtagctgggattacaggcgtccaccactgcgcctggctaattttttgtattttttagtagagatggggtttcaccatcttggccaggctggtctcgaactcctgacctcatgatccacccacctcagcctcccaaagtgctgggattacaggtgtgagccaccgcgcccaaccagctagggttttgaaggtatgaagttataagagggcatgttaaagacaggagggttggccaggcatggtggctcacacctgtaatcccagcactttgggaggccaaggcaggcggatcacctgaagtcgggagttcgagaccagcctgaccaacatggagaaaccccgtctctactaaaaatacaaaacaaaattagccgggcgtggtggcaggcgcctgtagtcccagctactcgggaggctgaggcaggagaatggcatgaacccgggaggcggagcttgcagcaagccgagatcgcaccactgcactccagccagggtgacagcgagactccgtctcaaaaaacaacaacaaaaaaaaaaccaaaaaaaaaaaaccctagctatataccctcacaccctacaaaacaaaacaaaacaaaattagccaggcgtggtggcgcatgcctgtaatcccagctatttgggaggctgaggcaggagaatcacttgaacctggggggcggaggtcgtgcggtgaggcaagaacatgccattgcattccagcctgggtagtaagagcgaaactccttctcaaaaacaaaaacaaaaaaaaacccaaaaaaagacaggagggtcataaggggagggttgactgtgtgtccctccaggttgtgcagaggggattagaagtaagtaggttagaggggaggtggagggagtgtgctggggtgtgagcttttatgatgctgaaaggatcatgatatgctaaggacaggatagtgttgggttgtacacacaggtgtaggcaatcctggtggctagtatgtaaaagtgaatgtcctgactcccttagagggtacctgcagagtgcccttggagggactagtgctggagaaattaataggagaggggacgggcatccattaaccttttcttgcctgcagcctgtagggtccagcgtcaaagcgaatcatggggtccagggctgagctgtgcactctcttaggcggattctccttcctcctgctactgataccaggcgagggggccaagggtggatccctcagagagaggtgacaacagagggggtagggcccggggtgagctcttctcaggagccttctgctgggggtggggcttcacaggaggcaaaacataactgtaagtttaga

SEQ ID NO: 35876 - DNA, 2300 bp, Homo sapien
gatcagtggttcttaaattcaggcgcacatcagactcaccagagggcttgttgaaatacagattgctagccagccacgatggctcacacctgtaatcccaacagtttggaaggctgaggcaggaggatcgcgtgagtccaggagttcaaaaccagcctgagtgacagagtgagaaaaagaaaaacagattgctggacctaatgcccagaatttctgattcagtagatctggggtgaagtctaataatttgcatttctatacttcgagacccgctgatcaagataaaagtgtaaggaaagcacaggcctggaggggttcaggcagccctccaaaaggtgacactgagctgtgtgaggcaggagaagagacaggcattccagccaaagggaacagcatgttcaaggtggggaagcatgaaagatcatggtgtctgaggaactgaagtgaatcagtttgactggaacaaagagttttgtgaggatgtggtcgaagatgtaagcagaagtcaacttatcaagaagagcctttaggcaagacagggaaatgctctgtgtttcagaaaaatctgtgctaacagaaaaatctctgtggttgctacgtggaagatggattggagggagttgggagcctactccacatagttcaggggagaaatgatgctgttctgaacttgtaggggcagtgggatggagcagctcagaaagcctacggtattccaactggcagggtctcctgtttcctctattgcctgttaccttctcgcttggcaataggcttacctttgagcatagcccttcccatcatgggaagacagtgcctgtggcctcagtaggaatgacaggtatttgcctgaacaccctttttgtgaattgttaccctgcccccaacactggggcagagtggaggaaggaggaagaacctagaacacaggttctgtgttcctgcctctcttcctcttgagccctttcctctcccagggcaagtgctgttaggtcacctttactccattccctccttttttcacttggtgaggcctcacacactgtacctgcccacgcaaagtgtcactagaaggaagggaaagggtagtaggattcgtttgcctgtctggaggtaggattggtctttgtagctattccaggtatgtccataagtttacctaggaataggggagctgcctgggtggagagggatttttctagttatgcatttacattcttttatctgtcactgggtgtaattataaatttgtgtctatgtgtgaacatgttagtctttgtatgactgtgtgtctgttggcattagtgacacgaacttttaatcttgccatttggcccttgggtatatggctgtgagtgttctgtcacaatcaccatatatgctgtgtgctgtgttcgtatatatatatgcaatacataccagtgtcagcgtaatggagtggttaggaacacaggcggcttagatttaacctagaaactgctgtttaggagctgtatgacctcaggtaagttatttagcctccctgggcctatttcctataaaatgtaaatagtaatagtactttctagactatcatatgcatcattttaagagtttaacttaatgtatagaccagtactgttctacagaaatataatgcaagccacaatgtaatttttttatggtagccacatttttacaaggcaaaaagagtgaaattaattttagtaatatattttcttgaatctgataacatccaaaagattataatttctttttttttttttggaaatggagtctcactccattgcccaggctagagtgcagtggcgtgatcttggctcactgcaacctccgcctcccggattcaagcgattctcctgcctcagcctcccgagtagctgggattaaaggcatgcgccaacaggcccggctaatttttgtatttttagtagagacggggtttcaccatgttggtcaggctggtcctgaactcctgacctcgtgatctgcccacctcggcttcccaaagtgctgggattacaggcgtgagccactgcgcccggcccaagattataatttcaaaatgtagtcagcataaaagattagtaatggatatctcacattttgttttttattcagtctttgaaatctgatgtgtattttacatttccagcacatctcagttcagactagctgcatttcaagtagccacatgtaggtggtggctactttctcggacagcacaagtatagaccattataagacccttaccagctacaagtgttagctattattcttgttgtcatttattatcaggt

SEQ ID NO: 35877 - DNA, 2300 bp, Homo sapien
taatatcaagtgttaagagaagaaggtaactgggtctccaggtctgcaaagaaccatccctgcatgccttaccttggtgacctccctggcccatacctctctacacaaacattatctttccagtggctgtgtacagtctgtgtccatgagctcaatgcatgtcacagggtcaatcctgctgtgaaccccattgttggtatttatttatggacattatcctccattctttgcactgttggcacacatttgatgagagcagcatctttccctgtggcatcttgatcccattcggtacatttctcttgtgagatgacctcttcctgattattgttactctgccttcattatggctatgtattgcatgtatctattcagagtcggttaccattaggcttggtgtgttcgttactttctcagtgacttcttttagtagtcacttctactcaagaggataactatctaatttgtgatcagaaccgccatctctgtcattaactgtggctctatgggtgggtatacagccttagaatctgttcagcaagtgtttattgagcacctactccatctcctattgtcctggcactggagataagacagagtccctgtccttaagctgcttacagcctaaggagggaaacaaaaacgccagtcaacacatagtgtgttgtcaagatcagtggttcttaaattcaggcgcacatcagactcaccagagggcttgttgaaatacagattgctagccagccacgatggctcacacctgtaatcccaacagtttggaaggctgaggcaggaggatcgcgtgagtccaggagttcaaaaccagcctgagtgacagagtgagaaaaagaaaaacagattgctggacctaatgcccagaatttctgattcagtagatctggggtgaagtctaataatttgcatttctatacttcgagacccgctgatcaagataaaagtgtaaggaaagcacaggcctggaggggttcaggcagccctccaaaaggtgacactgagctgtgtgaggcaggagaagagacaggcattccagccaaagggaacagcatgttcaaggtggggaagcatgaaagatcatggtgtctgaggaactgaagtgaatcagtttgactggaacaaagagttttgtgaggatgtggtcgaagatgtaagcagaagtcaacttatcaagaagagcctttaggcaagacagggaaatgctctgtgtttcagaaaaatctgtgctaacagaaaaatctctgtggttgctacgtggaagatggattggagggagttgggagcctactccacatagttcaggggagaaatgatgctgttctgaacttgtaggggcagtgggatggagcagctcagaaagcctacggtattccaactggcagggtctcctgtttcctctattgcctgttaccttctcgcttggcaataggcttacctttgagcatagcccttcccatcatgggaagacagtgcctgtggcctcagtaggaatgacaggtatttgcctgaacaccctttttgtgaattgttaccctgcccccaacactggggcagagtggaggaaggaggaagaacctagaacacaggttctgtgttcctgcctctcttcctcttgagccctttcctctcccagggcaagtgctgttaggtcacctttactccattccctccttttttcacttggtgaggcctcacacactgtacctgcccacgcaaagtgtcactagaaggaagggaaagggtagtaggattcgtttgcctgtctggaggtaggattggtctttgtagctattccaggtatgtccataagtttacctaggaataggggagctgcctgggtggagagggatttttctagttatgcatttacattcttttatctgtcactgggtgtaattataaatttgtgtctatgtgtgaacatgttagtctttgtatgactgtgtgtctgttggcattagtgacacgaacttttaatcttgccatttggcccttgggtatatggctgtgagtgttctgtcacaatcaccatatatgctgtgtgctgtgttcgtatatatatatgcaatacataccagtgtcagcgtaatggagtggttaggaacacaggcggcttagatttaacctagaaactgctgtttaggagctgtatgacctcaggtaagttatttagcctccctgggcctatttcctataaaatgtaaatagtaatagtactttctagactatcatatgcatcattttaagagtttaacttaatgtatagaccagtactgttctacaga

SEQ ID NO: 35878 - DNA, 2300 bp, Homo sapien
gctgtcgcctggccaaggagggctttattcgtctgagtagttgtcagtcataaccaaagccataagcaatttgctcgggactacctatagacctcgcccactataagcccctttctttccttcgcttcctcttttagagaatgtccggattgctattggactttggagcgtatggctccaaatcaactcattggctaaaacttgacggaaaatggtggttaggtaaaacgcgcctgcgcagcacgcggcgggacgggggtgggccaatcctgtgagggtttaaccttctctttttccacctcttcacccctatcttgtcgccatggtgactgctctacaattggcgaggcttgcacttcaaagtcctaggctcgcttcatccgggtccttcagctgtggactttctgctgattgggccttttccttttcccctgattggccgacatcgggaaagacggcgaagagctaggaaaagagggaaaacactagggtcgcagggttcaaaatggctccaacctcctttggtgacgtagagagcagaacttgggtctgcccctcccttttagttaagggagcagaactgggattagcccgacgtttggatagtgggaacatcgatctgcggcgctggtgttaacccaactcattcggctggacgactcagccctccccatattaggtgatttacagagcaaaactgaactaaaggcccacccctttcttaatgttgtacacagagtagaacaggattgacttcaactccgttttaaaccttcagagcaggaaagctctgggctcaacccctttgtgagtggtgcaaaagggacaaagcccgccccttttaaggagacccgcggaggctagacccgccctttcctctttataatttgcccatcagaaatagggtcttcttcccaggttggaccccggggagtttgggcttttcctacaatcactgaccctcactgtgactaaaggagcagaattaggtaacagtcctcccactaccaatcctcttcccgagggcatgtaaactaatgcagggtaaaggtgtggctagaggggggaccttgataaaagatcccatgtgactcaagagtaaggaaagatgagaagttagcagttgcgtaaagaaggactggggcagatgaggattcaggaagcttgaggtttaggaaggaagatattgagagggaaaggtggaaatgaaggagagtgaagtgatggaatgatcctagtaaagggataatgggagtggaggaagagaagagggggtggaaaactagatacatggctaccaaattaaggaggcacgcgcattccagaggaatcggcattcttcctcactttttatttttctagaaagcacccctgaagccaaatttccattggaagaaaagatgtacccatattgtatgttgtgagaaggggttgtctcagcttgggcaagtaaggagactgatacgaaggaagtaggaaagaaaaggtacagaggtaaaagagcatggaaaaggaaagggtcagggataaggccaaagagatctcttctctttaaaggccagagaaggcaggtggaggggggagctggactgctgggagatagtgagggacaaagggcaaaggaaaccagaccagaggactggagagtgagatggagtgagatggagtcctggagagaaaaagaagagaggtgaacttaatgcttgtcatatggtaggtagatgcttgataaatgtttagaattgaatgggtacgggaaaaggggtccttaagaatagttggggggaataagcagcagataaccggagttgagaaaaaaagagaccaagtaaaagtggcagttaaaagagagctgatggagaataaaggaaggaatgtgcggaaggaggaatacagcaccaggggatccagagctgaaagggagttagagaaaaaaaagatgcagctggagccagagatgggggcaaagaccgagggagagccctggggcggggctcgcaagaggacactggtagatgtggggaggagatgccagagtttctgggagacgattggcaaaacaggctgcccatcaccgccctccacttcctggccggccccggaaaccagcaggcgttggggaggggtggcgggggaatagcggcggcagcagccccagccctcagagagacagcagaaagggagggagggagggtgctggggggacagccccccaccattcctaccgctatgggcccaacctcccactcccacctcccctccatcggccggggctaggacacccccaaatcccgtcgccc

SEQ ID NO: 35879 - DNA, 2300 bp, Homo sapien
ctttgcccccatctctggctccagctgcatcttttttttctctaactccctttcagctctggatcccctggtgctgtattcctccttccgcacattccttcctttattctccatcagctctcttttaactgccacttttacttggtctctttttttctcaactccggttatctgctgcttattccccccaactattcttaaggaccccttttcccgtacccattcaattctaaacatttatcaagcatctacctaccatatgacaagcattaagttcacctctcttctttttctctccaggactccatctcactccatctcactctccagtcctctggtctggtttcctttgccctttgtccctcactatctcccagcagtccagctcccccctccacctgccttctctggcctttaaagagaagagatctctttggccttatccctgaccctttccttttccatgctcttttacctctgtaccttttctttcctacttccttcgtatcagtctccttacttgcccaagctgagacaaccccttctcacaacatacaatatgggtacatcttttcttccaatggaaatttggcttcaggggtgctttctagaaaaataaaaagtgaggaagaatgccgattcctctggaatgcgcgtgcctccttaatttggtagccatgtatctagttttccaccccctcttctcttcctccactcccattatccctttactaggatcattccatcacttcactctccttcatttccacctttccctctcaatatcttccttcctaaacctcaagcttcctgaatcctcatctgccccagtccttctttacgcaactgctaacttctcatctttccttactcttgagtcacatgggatcttttatcaaggtcccccctctagccacacctttaccctgcattagtttacatgccctcgggaagaggattggtagtgggaggactgttacctaattctgctcctttagtcacagtgagggtcagtgattgtaggaaaagcccaaactccccggggtccaacctgggaagaagaccctatttctgatgggcaaattataaagaggaaagggcgggtctagcctccgcgggtctccttaaaaggggcgggctttgtcccttttgcaccactcacaaaggggttgagcccagagctttcctgctctgaaggtttaaaacggagttgaagtcaatcctgttctactctgtgtacaacattaagaaaggggtgggcctttagttcagttttgctctgtaaatcacctaatatggggagggctgagtcgtccagccgaatgagttgggttaacaccagcgccgcagatcgatgttcccactatccaaacgtcgggctaatcccagttctgctcccttaactaaaagggaggggcagacccaagttctgctctctacgtcaccaaaggaggttggagccattttgaaccctgcgaccctagtgttttccctcttttcctagctcttcgccgtctttcccgatgtcggccaatcaggggaaaaggaaaaggcccaatcagcagaaagtccacagctgaaggacccggatgaagcgagcctaggactttgaagtgcaagcctcgccaattgtagagcagtcaccatggcgacaagataggggtgaagaggtggaaaaagagaaggttaaaccctcacaggattggcccacccccgtcccgccgcgtgctgcgcaggcgcgttttacctaaccaccattttccgtcaagttttagccaatgagttgatttggagccatacgctccaaagtccaatagcaatccggacattctctaaaagaggaagcgaaggaaagaaaggggcttatagtgggcgaggtctataggtagtcccgagcaaattgcttatggctttggttatgactgacaactactcagacgaataaagccctccttggccaggcgacagcgtgtagcgagttattaccaatcccttggcattgcacattgacttagaccgtatcagccaatagccattgtgcgaaggcaggactgcactaaccttttcccgcccctaccctttgggccaatcctttcttttgaattctttgtgactggcaggcattcagaccaatagtgattaggaaaccttgaagcctgcccaacgatcgtgggcaggaggtggtttctggtttgttggggcgtgtgtatgtgtatttggggggactgaagggtacgtggggcgaaacaaaaccggccatggcagcagcggaggaggaggacgggggccccgaagggcca

SEQ ID NO: 35880 - DNA, 2300 bp, Homo sapien
agcaacctgctgttgcttttcagattttctgcaacctctaccatgccagccaacttagttagccttcctgcttgtctgatcttccaacacctaaagctctgtccatcctcaacacactcaaccctctcctttctcctctccccaacaaacacatacaaattttcgtgccctctcttttctgcctttcaagttaatttctaatttccttcagccacctctttctgggtctcctcttttcaaccccaaccccatcactccaaaccaaacccctttactagcacattcccccattactcactttcaagctcaataatgtccctatctttatgaccctttaacctttcaagtctgcctctccacagtgcccttataccagccccctcccagatctcatctgaatgtgatccatatttcctggttctccccgactcaactgatgcgtgcctcccttaacctttgtgtctcacttgtttccacctgcacagctaagacccctcacttctctggggtaaggtggctcgggtctcacattgtcctgccactccccgccccaccttctcttctcagcacatcacgtgcctcagctcctggttcctaagacctttctttccacagatctcgaccgttatactcccacccacacataccagcaaagtcttatgtctcctgtcgggcttcacctatgggaacgtgccctccgattatctgtatgactgtatgattattcgctcctagcctctccagtatataagcgagacccaccacctcccgcccccctcctcgattctcaccagtacaggtggccacacacactgaccacagcttcccgagcagtctccaaacatatattacattcgaaggtcgcgcccgccccgccccgctcgcgatttggcccttcggggcccccgtcctcctcctccgctgctgccatggccggttttgtttcgccccacgtacccttcagtccccccaaatacacatacacacgccccaacaaaccagaaaccacctcctgcccacgatcgttgggcaggcttcaaggtttcctaatcactattggtctgaatgcctgccagtcacaaagaattcaaaagaaaggattggcccaaagggtaggggcgggaaaaggttagtgcagtcctgccttcgcacaatggctattggctgatacggtctaagtcaatgtgcaatgccaagggattggtaataactcgctacacgctgtcgcctggccaaggagggctttattcgtctgagtagttgtcagtcataaccaaagccataagcaatttgctcgggactacctatagacctcgcccactataagcccctttctttccttcgcttcctcttttagagaatgtccggattgctattggactttggagcgtatggctccaaatcaactcattggctaaaacttgacggaaaatggtggttaggtaaaacgcgcctgcgcagcacgcggcgggacgggggtgggccaatcctgtgagggtttaaccttctctttttccacctcttcacccctatcttgtcgccatggtgactgctctacaattggcgaggcttgcacttcaaagtcctaggctcgcttcatccgggtccttcagctgtggactttctgctgattgggccttttccttttcccctgattggccgacatcgggaaagacggcgaagagctaggaaaagagggaaaacactagggtcgcagggttcaaaatggctccaacctcctttggtgacgtagagagcagaacttgggtctgcccctcccttttagttaagggagcagaactgggattagcccgacgtttggatagtgggaacatcgatctgcggcgctggtgttaacccaactcattcggctggacgactcagccctccccatattaggtgatttacagagcaaaactgaactaaaggcccacccctttcttaatgttgtacacagagtagaacaggattgacttcaactccgttttaaaccttcagagcaggaaagctctgggctcaacccctttgtgagtggtgcaaaagggacaaagcccgccccttttaaggagacccgcggaggctagacccgccctttcctctttataatttgcccatcagaaatagggtcttcttcccaggttggaccccggggagtttgggcttttcctacaatcactgaccctcactgtgactaaaggagcagaattaggtaacagtcctcccactaccaatcctcttcccgagggcatgtaaactaatgcagggtaaaggtgtggctagaggggggaccttgataaaag

SEQ ID NO: 35881 - DNA, 2300 bp, Homo sapien
ctgctctgaaggtttaaaacggagttgaagtcaatcctgttctactctgtgtacaacattaagaaaggggtgggcctttagttcagttttgctctgtaaatcacctaatatggggagggctgagtcgtccagccgaatgagttgggttaacaccagcgccgcagatcgatgttcccactatccaaacgtcgggctaatcccagttctgctcccttaactaaaagggaggggcagacccaagttctgctctctacgtcaccaaaggaggttggagccattttgaaccctgcgaccctagtgttttccctcttttcctagctcttcgccgtctttcccgatgtcggccaatcaggggaaaaggaaaaggcccaatcagcagaaagtccacagctgaaggacccggatgaagcgagcctaggactttgaagtgcaagcctcgccaattgtagagcagtcaccatggcgacaagataggggtgaagaggtggaaaaagagaaggttaaaccctcacaggattggcccacccccgtcccgccgcgtgctgcgcaggcgcgttttacctaaccaccattttccgtcaagttttagccaatgagttgatttggagccatacgctccaaagtccaatagcaatccggacattctctaaaagaggaagcgaaggaaagaaaggggcttatagtgggcgaggtctataggtagtcccgagcaaattgcttatggctttggttatgactgacaactactcagacgaataaagccctccttggccaggcgacagcgtgtagcgagttattaccaatcccttggcattgcacattgacttagaccgtatcagccaatagccattgtgcgaaggcaggactgcactaaccttttcccgcccctaccctttgggccaatcctttcttttgaattctttgtgactggcaggcattcagaccaatagtgattaggaaaccttgaagcctgcccaacgatcgtgggcaggaggtggtttctggtttgttggggcgtgtgtatgtgtatttggggggactgaagggtacgtggggcgaaacaaaaccggccatggcagcagcggaggaggaggacgggggccccgaagggccaaatcgcgagcggggcggggcgggcgcgaccttcgaatgtaatatatgtttggagactgctcgggaagctgtggtcagtgtgtgtggccacctgtactggtgagaatcgaggaggggggcgggaggtggtgggtctcgcttatatactggagaggctaggagcgaataatcatacagtcatacagataatcggagggcacgttcccataggtgaagcccgacaggagacataagactttgctggtatgtgtgggtgggagtataacggtcgagatctgtggaaagaaaggtcttaggaaccaggagctgaggcacgtgatgtgctgagaagagaaggtggggcggggagtggcaggacaatgtgagacccgagccaccttaccccagagaagtgaggggtcttagctgtgcaggtggaaacaagtgagacacaaaggttaagggaggcacgcatcagttgagtcggggagaaccaggaaatatggatcacattcagatgagatctgggagggggctggtataagggcactgtggagaggcagacttgaaaggttaaagggtcataaagatagggacattattgagcttgaaagtgagtaatgggggaatgtgctagtaaaggggtttggtttggagtgatggggttggggttgaaaagaggagacccagaaagaggtggctgaaggaaattagaaattaacttgaaaggcagaaaagagagggcacgaaaatttgtatgtgtttgttggggagaggagaaaggagagggttgagtgtgttgaggatggacagagctttaggtgttggaagatcagacaagcaggaaggctaactaagttggctggcatggtagaggttgcagaaaatctgaaaagcaacagcaggttgcttgggaagaggggttagatgggattctgcgaagtctagggtctgtgtctctcttttctgtagctagtttgacctttttttttttttctcccccatccagttggccatgtcttcatcaggtgcgtactcaggagatgaagagggaaatggggaggtctgaggagctgtaagaccctcttgtatactggaaaccaccttttttctccccagtggctggagacacggccagaacggcaagagtgtccagtatgtaaagctgggatcagcagagagaaggttgtcccgctttatgggcgagg

SEQ ID NO: 35882 - DNA, 2300 bp, Homo sapien
gctcctaggctgggagggggcctgaggggattcacagggctccctgatgggagctgagtgtgactcttacctgtaccccggcggaaaggctcatgggcattgaagacggtggtgaaaaagccaaagggaaaagcaccaacaccaaatgagaagtggaagcccccggtatcaccaaatggctggaatccctagggaggcagaaaaagtcagacaggaagccggcaaatctgtcaaggaagggacacaactggacaagaagactcacccctctgctctccggagctggtctctggccctgggggcggggtggagtttttaatctgaggaagtggagagagaaagttaacagggatttttctcctcccatcttccacaccgttttccaagggcagaagccttcaatcttccctaagcaacacctccagtctctcacctgggatcctggggcttctggctccctcgcccataaagcgggacaaccttctctctgctgatcccagctttacatactggacactcttgccgttctggccgtgtctccagccactggggagaaaaaaggtggtttccagtatacaagagggtcttacagctcctcagacctccccatttccctcttcatctcctgagtacgcacctgatgaagacatggccaactggatgggggagaaaaaaaaaaaaaggtcaaactagctacagaaaagagagacacagaccctagacttcgcagaatcccatctaacccctcttcccaagcaacctgctgttgcttttcagattttctgcaacctctaccatgccagccaacttagttagccttcctgcttgtctgatcttccaacacctaaagctctgtccatcctcaacacactcaaccctctcctttctcctctccccaacaaacacatacaaattttcgtgccctctcttttctgcctttcaagttaatttctaatttccttcagccacctctttctgggtctcctcttttcaaccccaaccccatcactccaaaccaaacccctttactagcacattcccccattactcactttcaagctcaataatgtccctatctttatgaccctttaacctttcaagtctgcctctccacagtgcccttataccagccccctcccagatctcatctgaatgtgatccatatttcctggttctccccgactcaactgatgcgtgcctcccttaacctttgtgtctcacttgtttccacctgcacagctaagacccctcacttctctggggtaaggtggctcgggtctcacattgtcctgccactccccgccccaccttctcttctcagcacatcacgtgcctcagctcctggttcctaagacctttctttccacagatctcgaccgttatactcccacccacacataccagcaaagtcttatgtctcctgtcgggcttcacctatgggaacgtgccctccgattatctgtatgactgtatgattattcgctcctagcctctccagtatataagcgagacccaccacctcccgcccccctcctcgattctcaccagtacaggtggccacacacactgaccacagcttcccgagcagtctccaaacatatattacattcgaaggtcgcgcccgccccgccccgctcgcgatttggcccttcggggcccccgtcctcctcctccgctgctgccatggccggttttgtttcgccccacgtacccttcagtccccccaaatacacatacacacgccccaacaaaccagaaaccacctcctgcccacgatcgttgggcaggcttcaaggtttcctaatcactattggtctgaatgcctgccagtcacaaagaattcaaaagaaaggattggcccaaagggtaggggcgggaaaaggttagtgcagtcctgccttcgcacaatggctattggctgatacggtctaagtcaatgtgcaatgccaagggattggtaataactcgctacacgctgtcgcctggccaaggagggctttattcgtctgagtagttgtcagtcataaccaaagccataagcaatttgctcgggactacctatagacctcgcccactataagcccctttctttccttcgcttcctcttttagagaatgtccggattgctattggactttggagcgtatggctccaaatcaactcattggctaaaacttgacggaaaatggtggttaggtaaaacgcgcctgcgcagcacgcggcgggacgggggtgggccaatcctgtgagggtttaaccttctctttttccacctcttcacccctatcttgtcgccatgg

SEQ ID NO: 35883 - DNA, 2300 bp, Homo sapien
acaaggcgacttgaagaggacgcaggcttccagaggacaaaccccaatacaggagaagcacaagacagagaagggccaatggggtcatcccctccctaacgagactctctgtgctgggggtgctaattacatggcaggaagaatggggcctctaaggggagtgtggggtctgtctctcccttttttccatctttttcctctctcgctttctttcttacacagaaacatacacataccgagaaacctatttctcagacccctttttctcctctgtctttctctctccctctcccacacctcacacacacatactcccacttgcaactattctgtttctctcctgggctcccccactttcccttccccaccccacttgtatgctctggaatctgtggagacgccagccctgcccaatcagagatgccaaaaatggggacatgacttctggacagaggacatgggccacgcccccatgcatccccacccccgcccctccggacggcttacttacctcatacgcagctcatcttaaaccaatagaatcgctcggtggacgagagtgtctgactcagatatctacctcggagggagtttctgctactttagggaattattgactgggctttggggttgaacttttttttttttaaagaaagaaaaagaaaccctgggatccatctgttttttttgttgttgttgttgtttttgttgttgttggtggtggtggtggtggtggttcttaatttttaatttagtttggggaagtagcttgtttttttttttataaatatgttgatttcttgtctttttttttttttatttcttactttcccatattaggggtgatagccaaaggggttctggtaagagaaagggggacaaacagaactggtaaagaggcccccctggctccaggcctgtccatcaggaagtaaattttacagggcaccaagctttgccccctaaaatcccttaggtgttctttgttcatgcaggcaggtttctgccgcatttgatgtggaggcagtgaagggcttgccctgctggcctctcatcccccttcttcccacaacccttgggcagggctggactcagtaattttgaggaaattgaagatgccatcttcccctgtgagtgacatgtctttaattttttaaaaaactactatttgaaaattggagggggaagaatgggaagggagttattgccaaatatgttaaatatgggttggggtgcttgtatatgtatcttcctcaatttccccataaatgaggtatctttttgtcacaccaaaatcaaggggtagggagagggaggaggttgcaaaaagccagatgtgggggaaaagtaacatcaacactgtcccatcctcagccctgaactagctaccatctgatcccctcagacattctcaggattttacaagactgtcagagtggggaacccctcccattaaagatccgggcaggactggggacaggttggaagtgtgatgggtgggggggtgggaggcatgggccgggggcagttctctcctcacttgtaaacttgtgtagtttcacagaaaaaaaacaaaatgcagttttaaataaagaaatttcttttttccctgggtttagttgagaatttttttcaaaaaacatgagaaaccccagaaaaaaaatgattttctttcacgaagttccaaacaggtttctctcctgttccccagccttgccttcatgatgcaggcccaattgcacccttgcagacaacagtctggcctgaaccctattgatgcaactttgcgcaatcaagatggggctccagtgggtcaccaggcagccctgatggactgatggaataaataggatcgggggctctgagggaatgagaccctagagggtacactccccatcccccagggaagtgactgtacccagaggctggtagtacccaggggtggggtgataattatttctctagtacctgaaggactcttgtcccaaaggcatgaattcctagcattccctgtgacaagacgactgaaagatgggggctggagagagggtgcaggccccacctagggcggaggccacagcagggagaggggcagacagagccaggaccctggaaggaagcaggatggctgccggaacagcagttggagcctgggtgctggtcctcagtctgtggggtgagccactccctcaaccccactgaccctccctgcagaaagcactttaaccccacaccccagtcgtcctagaacttttcccagaacccgaggaagtgcctttcaaggtccctcacccaccctg

SEQ ID NO: 35884 - DNA, 2300 bp, Homo sapien
cactgcttgactagaatggacatattttggcatcagggcccccctcaggatgaggaaggctggccccctccaaactccaccactcggccttggcgatctgctcctccatcccctcctcctccagggacccgccacacaggtacccctacccacccagggagagccccgaccctagtgcccacatcctgaccccattaccaaggcccactccattgtgggccctctccccacctcctccagactccccttgggattccccattgcaccccctctcctctgatccaaagtccctaatcacgtcaccctgtccacactcccccacggctcctgtctgccaacctctctgggtctctgagccctccacacccctctccccagccctgggaccccgctcggcctccctgctctccctgcagactgaactccttctggacctggtggctgaagcccagtcccgccgcctggaggagcagagggccaccttctacaccccccaaaacccctcaagcctagcccctgccccactccgtcctctcgaggacagagaacagctttacagcactatcctcagtcaccaggtaagacatccccccaggaggcaaacccaggcctcctggtctcttggcccctgttctctttggggctctactcctgtttctccctaggcaccccatcgccttcacaggtttcctatatgcctccccataccaacccttgatcctctcaagaacctcctcctctcagaccctcaccaaagctctccctctccctccactcctccagtgccagcggatggaagcccagcggtcagagcctcccctccctccaggggggcaagagctcctggagttgctgctgagagttcagggtgggggtcgaatggaggagcaaaggtcccggccccccacacacacctgctgagacttgagccccaaccagcccttccttgccactggtctcaaagctgggcagcccattgcatgccctcaactcttgcttggcaggggtaccagagactgaaagacacggcacaaatctcaatattcatctcccacatcaccttccctgggaactggacagggtgaaagtcctcaaactctgggaacaggcgagatggaacagggatttaactccccgcccacaggtccatgggagcttgaggcagtaagggggatcccaggcacccatctcaaggagtggctgggagtcttttccctaacttgtggggacaccaccagttgtcaagctactaggcagtagggtctgagggctcaggcctccacctgagaggttataacctgagagacagctctacccttcctcccagtaagaagggaaggtgggtgggcacctgagagattaagactattctcccagtcccactaccagcacccccgatccctgagactgaggggtttacgggctgtgaatggaccttcagccctgcccaccctccctccccactgctgctgagtctgtctgatgttttggttgtgtgaataaatataattcccctctggactgcagactggtatctggggggcccaggcggggtgaaaggtaggaaggtgaggccagaggccttttctctccccagtctggccagaggccagctcccctccccggctggttaattactggctcattaagcagcggctggagacctccctaattatctcccccagcccccctcttcggttttaattaagtagaacagggaggggagtcattagaacaagaaatatgaactgagctgccggtgaacccaggcattccagcggcctgagtccacatcgcttagatccctgattcaggacccaggtgacagacgcccccagccgccaacacagccccactcctaggccgcggaagtccagccagggggctttcccatatctttcagatggcccgtctcctcccctcatcccctcttccctctcccctcctccactaggtctcagttcctctgtttctgtgtctctctctccgcccccagctcctccctgttcctcctctcttctcccctcctcttcctctccggctcccctcccccagcctccctccctcgctccccccccttctccctcctccctcctccctctctctcacacacacccccgcttgggcctcctctctctctccggctccattttctccgccgccgggggccggggtctcctgtggggggcccagccggtatcccaggtctcccttcagtgccggggtgaacccccgggggagccgggagccgggggcagacgggcgggggttggggcggagggagcagcggccccagcgag

SEQ ID NO: 35885 - DNA, 2300 bp, Homo sapien
tattatctgaaagcaagaatctagtagccaagggagaaaccgcacacactaggtcaggggtccccaacccttgggccacagactggtactggtccatggcctcttaggaactgggccacacagcaggaggtgagcaagcattactgcccaagctccacctcctgtcagatcagcataagcattaaattctcataggaactcgaaccctattgtgaactgtgcatgcaagggatctaagtttctcgcttcttacgggaatctaatgcctaatgatctggggtggaacagtttcatcctgaaaccagccctccgtcgccaccgaccatggaataattgtcttccacgaaactcttccctggtgccaaaaaggtaggagaccactgcactagatgatgcacacactttgtccctcatcctagggcttttacttatggccacttaggagattcctaaggccacaagtcaagtagatggagagagtatcttgaaactttgtccaccttgcagcaatatgttgctaggtttgaaacatggagtcatgaggcattttgaaagccaataatatctacagtttattaagtattcactatgcatcaagtgcttcattacattattaatacatcaaccctatgaagtaggtgctattaaaaccctatttcactcagaaattgaggcacagagatctgcccaagattgcaaggaataagcggcaggaccagatctcttcatcacatttcacattccaaatcactcagctataaactccctaacatgacaggttgccatttagaggtaccaaatggttgtctgccctgctccttccttgatgccaaccagcctgattagcattgatcaaagaccaagccagagaggtagtcctctcccttttcaatttcatttcatttctttctttttctgaaacagggtattgctctgttgcccagcctggagtgcagtggcacaaatggctcactgcagccacaacctcctgggctcaagcaatcttcctacctcagcctctcattgttccatatctatatctcttatgcccaaaataaaatttcccctgccccttgtctgcactaaactataagtttccaaaatgaacccttcccgtactctatttggtacacatcttgtctcctgaatagagtgtattttttattttattttattttggagacggagtctcgctctgtcacctaggctggagcgcagtggcacaatctcagttcaccgcaacctccgcctcccgggttcaagcaattctcctgcctcaacctcctgagtagctgggattacaggcgcatgtggccacgcccagctaattttttgtattttagtaaagatggggtttcaccatgttccccaggctggtctccaactcctgagctcaggcaatccacccgcctcagcctcccgaagtgctaggattacaggtgtgagccaccgcagccggccatctcctgaatagattttaaatacctagaggtcagggatgattattcaatacatatatattgaatacttactatgtgttggacccggtgctagggttttatgtatatatttgagagctccacatccctggatctgaatcctccacttcccactggaaccatgcccctcccagtcccggtaagtaagagggaagatcgggagggccaaatcctacaccagggtctatcttagggagggaagggacctggctggggggagggggattctgaggagtgaaaccacttcctgtgtagctagttcctgtgttgacagaaagagcagaagaggaggtggggtggagggagcagagccagggattaggggactactgaggctctggagatgagaccgccaggagtccttccccaccatgagccccctccactcctgcagctggaggagtttttcccagtctcagtgctgccctggggcgagagagactgaacaagctgtttgggtgggaagagaatggaggaagttgacagggatgggcggggcccgtgggggggctgaccaggaacccagcttcctgctcagtacccaggcatccagcccccagctcacccccaccccttccagcccccactcccctcaggaacccaaggttccagccctcctcccaaatcccagccacccctcccccaccagtttctcccctctaggggatggaggctgagagaccccaggaagaagaggatggtgagcaggtgagctgggcacggggttggggaggctgacactgggaaagaagggaggtgagaggacctggggcagaaatgtagggacacaggggccttgaa

SEQ ID NO: 35886 - DNA, 2300 bp, Homo sapien
attgacccattactctgtcttaccaacagatggggtgacacccctgatgtcagcagtttgctgtggggaagtacagtccgggaccttccaaggggcatggttgggatgtcctgagccctgggaacctctgctggatggaggggcctgtccccaggctcacaccgtgggcactggggagacccccctgcacctggctgcccgattctcccggccaaccgctgcccgccgcctccttgaggctggagccaaccccaaccagccagaccgggcagggcgcacaccccttcatgctgctgtggctgctgatgctcgggaggtctgccaggttagcacacactgaggtccctacagggaatggggcgagcttacaagtaaagctggacagaagcatcccctagagtttgacaaggaggaaattggtgtgattgggaacctgacagggaaactgcggaggatggctgaatatggattgcgagtggggttaatagtgtaaggaactcgagttggcagtccaaggtaccccaggggtcactggccctctgtctccccagcttctgctccgtagcagacaaactgcagtggacgctcgcacagaggacgggaccacacccttgatgctggctgccaggctggcggtggaagacctggttgaagaactgattgcagcccaagcagacgtgggggccagagataaatggggtatgtagaggaaggggtgatgtatgctatagagaagttgagcagatggggtgggagatagcgtgcaaaatataggtgcagcagaggggcattccctctcatcctgctgttacggcggtcaatctgagatgcggtggaagtacgggccgcgtgagtttccccccccaactcccaccctcaacaccacactggccctccgctccagcttactggggaactggcatggaacacagtgtctgtggaaaggggggggaatctcgtggggggagactgtctcccggtctcaccgaccccagaacaatgccccattgtccctcccgcgcactggtgacgtcaccagggcaacacttcctgcaggccggtggtctcctgggcaacgcttcccgcctttgagggaccagccggcccgaatagcccttcccccaaggccagaacccgtgggaaaccggaacccaggcgtctggcccccaactggggtaacaacctcccacgtcgtcccctagggaaaactgcgctgcactgggctgctgccgtgaacaacgcccgagccgcccgctcgcttctccaggccggagccgataaagatgcccaggacaacagggttagatgggacagagggcttcccacaaaacagtcaggcgcacgagagatggaaagtgcggtaacccgcaaagcctgaagggataggggccagtggtcgcgcaagtgaaggcagaaaggcccagtcctgtgggcgtggccttccctgatatcggccctggctcttctgtacaggagcagacgccgctattcctggcggcgcgggaaggagcggtggaagtagcccagctactgctggggctgggggcagcccgagagctgcgggaccaggctgggctagcgccggcggacgtcgctcaccaacgtaaccactgggatctgctgacgctgctggaaggggctgggccaccagaggcccgtcacaaagccacgccgggccgcgaggctgggcccttcccgcgcgcacggacggtgtcagtaagcgtgcccccgcatgggggcggggctctgccgcgctgccggacgctgtcagccggagcaggccctcgtgggggcggagcttgtctgcaggctcggacttggtccgtagacttggctgcgcgggggggcggggcctattctcattgccggagcctctcgggagtaggagcaggaggaggcccgacccctcgcggccgtaggttttctgcaggcatgcgcgggcctcggcccaaccctgcgataatgcgaggaagatacggagtggctgccgggcgcggaggcagggtctcaacggatgactggccctgtgattgggtggccctgggagcttgcggttctgcctccaacattccgatcccgcctccttgccttactccgtccccggagcggggatcacctcaacttgactgtggtcccccagccctccaagaaatgcccataaaccaaggaggagagggtaaaaaatagaagaatacatggtagggaggaattccaaaaatgattacccattaaaaggcaggctggaaggccttcctggttttaagatggatcccccaaaatgaagggttgtgagtttagtt

SEQ ID NO: 35887 - DNA, 2300 bp, Homo sapien
ctggtctcaaaatcctgacctcaagtgatccacccgccttgacctcccaaactgctgggattacaggcgtgagccaccgtgcccggccagaaccacaacttttgatagaaggctcaagacagataccctaacctaccctcttttttcacttttttattttattttttaaccttttattatgaacattttcaaacataaacaaaagcagtatactgatcagtagtaaacctctgggcacccattactcagctttacttattctttttttttttttttttttttttttgagacagcatctcactctgttgccccggctagagtacagtggcgcgatctcggttcactgcaacctccgcctcccgggttcaagcgattctcctgcctcagcctcctgagtagctgggactacagggacatgccaccatgcccggctaatttttgtatttatagtagagatggagtttcaccatattggccaggctggtctcgaactcctgacctcgtgatctgcccacctcagcctaccaaagtgctgggattacaggcgtgagccaccgcacccggctatttacttcttcttttatgaagctccctcctccaaaacacccccatcacctgttccttccagctctctgaccactccttggattctctgtgaattcccttttctctctttgaagcctgccttcctggtactgtactcttgcacactctctttcctcttgcaagaagccagcacgtggtacagatcttgccaatgacccttctctcactagctgagtggcatgaagaagcagaaaatggttaagagcattggtttggagtcacagaccttcattgattcccagctctgccacctatagctatttgacttgcacaagtcactaacctttcagagactcagcttccttacgtgcaaagtaaaaatcgaatgagataacccaaataaaatgtcattagggggatttttaggttatgtatataaatcatgcaataaatgctagtcatttctttcctctggttgactgagagcttccaggaaataggaatgggttctaactttctttgtattcctagtgcctaaaacggtgcctgacacaaagtaggcactcaatagatgcttatgaattaataaagtatgagagagcctggtaggtatttagcaggggaggaaggttttaccaaaaatggtgctgtgtttggtggcagtgtgtcatagagattgtttgggactggggaagtttgagttgtgtgtcgccaacaattgtgtctcatggggagttgagatagaaggattgtgacacatggccatgatggatggtgagttgagtgatgctgttgagctggaaggtgggggactggacagactatcttgagctgggtcccttgtagtgctgggttgggctcatccactggttccctgtctaatcctctttgtctgcagtgtgccccaggctacgatggacagaactgctcaaaggaactcgatgcttgtcagtcccaaccctgtcacaaccatggaacctgtactcccaaacctggaggattccactgtgcctgccctccaggctttgtggggctacgctgtgagggagacgtggacgagtgtctggaccagccctgccaccccacaggcactgcagcctgccactctctggccaatgccttctactgccagtgtctgcctggacacacaggtgaggccccaagacaaggggcacaagtgtgtctggagcacagccaagcagaccatggagagccagatagtctccacccatgcggcagccgtcacctggtccatcccctgcctccacgcccacccccgcccagaaaagatgccccaggatcccttcacctgcacatctagcactgggccaacatccaggaatgagctaggatggaggcagtgactgatgcagtgtgtgacatctaatctcccccataattacaggccagtggtgtgaggtggagatagacccctgccacagccaaccctgctttcatggagggacctgtgaggccacagcaggatcacccctgggtttcatctgccactgccccaaggcaagtgaccacaaatctgccttctctgttgccccctatgctgacaaggcaagaatacctcagttggaatcccagaagggactgtgggtgagcactgatgtggaaattattggaaaaagccatgccaagctcacagtgggaagtgtctctcagaagcagtcaaaggcaaggcaggatcagttgatagcatgaatggaattttcaaaaatcacaggcgttgcctaagggaaggtcag

SEQ ID NO: 35888 - DNA, 2300 bp, Homo sapien
acacctgtaatcccagagctttgggaggccgaggaaggaggttgccgtgagcccaggaattcaaggttatagtgagctatgtgcgtgccactgcactccagcctgagtgacagagcaagaccctgtctctaaaaaaacagaaagcaaattgagacccacctaaacatgctataataggaaattggtttaaatgaactagtagaatactgggtgaccattataaatgatgctggctcacgggcttcctaatgtgatacactggtactcgtgcccaaaaatgcataaacaccagacatactcaaatttaggaacagtctacaaaacaactgtcctgtatgcttaaaaatgccagtatcggccaggtgcggtggctcacgcctgtaatcccagcactttgggaggccaagatgggtggattgcctaagctcaggagtttgagaccagcctgggcaccatggtgaaaccctgtctctactaaaatacaaaaagtcagccaggcgtggtggtgggcgcctgtaatcccagctactcaggaggctgaggcacgagaattgcttgaacccaggcggtggaggttgcagtgagccaaggtcgtgccactgcaatccagcctggactgtctcaaaaaaaaaaaaaaaaaagtcaatataatgaaaggcaaagtacatttaaggtactgtactcatattaaaggaaactaaaaagactcgacagctaaatgcaatgcaggatgccaaatgagatcctagaccaaaggaaaaaattgtcatgaaggacattatggggcaattggcaggacctgaatttggactgtcaattagatcatagtattacatcggtctaagtttcctgatttggataattgtactatattatgtaaaagaatgttttgttcttagaaaatttgcactgatggatttaagggtaaagggtatcttgtatgcaacttactctcaaatggttcagaaaaaaatacaaatgtgtatttatagagaaataatgataaagtaaatgtggtcaaatgatattagtggatgaatctgagtgaagggtatcctggaattctttttagtatttttgcccctttcccatgagattaaaagtattttaaaataaaaagctaaaaaaaggaagaaagtggtgctggtgaagtatattccccggtaggggaaggctctcaggtgcaccagcagcagccatgagtgcctcaacaccagggagagcacagctgccactgacaccttctgccaccctggactctcagttccctgtgctactaaaggaactcagtgtgtggttgaccccaaagttgtcctgggttgactcaagaaggtaggatgagcattctgaggcaaagaattctcttttgtgattttattgactccaattttgcattctgactggcattccctgcatcccaaggaccttgacagcggagggaggcagagatggaggaagtgaaaactacccaaattcagtgtttgttacagacaattcagactgcaaaatttagggtagactatgttcatttatcactgataatgacagtcttaacattcccctacaacaggaagaccaagatttccccaaaaccggccagcatcttgcccatttgccagaaggagaaaaataagtcctggcaagagccaagataaggcccagaagcccctgggttcctttagccaaggtgagtggtttcaaattatgacaagttgcaggttctctgagaagcatctgtaataacctggcaaattaagcatcctctcctgggaggaggaatacagaactctgtaaccacccaatacctgtttccaggtcctgcccctcctggggcacagggcagccaccttgcaattctcatccctagaaaggagagaccagatcaacaaacagcagggctgggactgcccagggggttccgagattccttctcccctcctatcacctgccctccaggcacaccgtcctacttccccctacttccccaggggttgtcagggacagaaggcccctccttcatcccccctagtgttcctccactcttcctccgccccccattactagggtgtccaggacattgtgtgactcaggaaacagctcagacgtgaggcttgcagcaggccgaggaggaagaagaggggcagtgggagcagaggaggtggctcctgccccagtgagagctctgagggtccctgcctgaagagggacagggaccggggcttggagaaggggctgtggaatgcagcccccttcactgctgctgctgctgctgctgctgctgctgctatgtgtctcagtgg

SEQ ID NO: 35889 - DNA, 2300 bp, Homo sapien
attcctggtttgtttatttatttattttatttatttatttgagatggagttttgctcttgttgcctaggctggagtgcaatggcatgatctcggctcactgcaacgtctgcctgctgggttcaagagattctcctgcctcagcctcccaagtagctgggattacgggcaggcatcaccatacccagctaattttgtatttttagtagagatgggggtttcaccatgttggccaggctgatcttgaactcctgacctccggtgatcagcccacctcagcctcccaaagtgctgggattgcaggtgtgagccactgcacctggccttattcctggtttattaattgtttttttctttaagccagggatgagcaaactaccacccaatgggccaaatacagtctgcaacttgttttttttttttgtatagcccatgagctaagaatgatttttacatttcatgtaaaatgtcacataatattttgtgacatgtgaaaattatatgaaattcaaatttaagtctccataagtaaagctttattggaacatagccatgttcttcattcatttatgtattgtctatgactgcttttgtgctataaaggcagaggtgagtagttgtgatggagcccatagggacctacaaagccaaagtaaacatttggccctttatagaaaaagtttactgattcttgttttaagtcaaaaatggtattgggggaaagttaggttcatggatgtgcagaccaagaataagggaaagatctcagccctaactccttcttatacagattttcaataggtccatctttttcaggtttaccctcttaccctagactttcttagtttttagctttccatttctagagatttagggctctgtctaaacagtggttttccttctgtgtagcatttctttggatgcacaataggttccactttcatcagctccgcttttcaccagttttccagaaaagcattacagtctgttgctgttccctgttccccttgtctgcctgattatttattttcagagtcattttagcagtgtttggggagggagttataccttttattcctcaggtatcaccactcttctcttcctaccgcgaaacagcacagtgaaagggaggagatggagtgaagagaccgagggcagggagagggaggggggtgtgacggggtggggaagtgaggaggaagagggggaagagctactggggaggaggaagatgggggaggaagaggatgatggggtggggtggttcagggagtgaataggccgggttgggtgagatgaggctgggtgtatgtgcttgagaagtccgggagtgcggaggggcagaaaggtagacagtgcgtgcgggaagaggggatgggggtggggaggcgagggcggtcagtgggttgagaggagtggggagaagatttagggcgagagaggtgccatcgtgctggggaaggcgggactaggagaggtaaaagaatggggagagaaatgggagggagagaaggaagctgagggagatttgaggagagaaggcgcttgagggggaaccaggaggggagaaggcttgtgagggggaaatgtgagaggagaaggggcgcgagggggaacagcgaggggagaaggggtcccgcctcctggccgcgccgccctaggtgtcgccgcctggcggttacgaggaggccgcctcctgcttgccggcctggcggtcctactcaacaccgcaagatttcaaaagggaaattcctccagggctgagtcacagggaagaaagcgatttcctccgcctcttccaaagcggtaggtttccttcctccgcctgcctcttaaataacgtggtatctcgcagtttggctgaaacctgaattaaatgcaatgcttttttgacttttactttctcccagaacaacagttgtgatatgatctgttttggggcccttcctgcgctccgccctgggccagagtatgtaaagctcgtgggtctctgtgtgtgtctgagcagctgctctgccaagactccacacagctgtgtgtgtgtcggacccaaggccttggtggcatgggctcatgagggaatctcctgatccaccagtcgcaaagatccatgggagaagcatggtttcctgaggtcgcaccatcactcacttcttcccttggctgggagtgggggttcctttggctctgtgtcgctcccaggggggctgtcgccccatccagcttttctttgttctctgtgggtcgagttgttttcctgatgagtcccaatgcaagtacctggatatttcagttgaagatg

SEQ ID NO: 35890 - DNA, 2300 bp, Homo sapien
tctagatttcagcaaaaaataatgaagcatgtaaagagaaaagaaatcatgacccatgcacagaaaataataaaaagaaactgtttctgaagaagcccagacattgtaattagcagaataagacatgtctaaaaaataaagtataagaatgatgtctcagcaatttgagaatatcagaaggagaaattatagaaataaatagcaattctgcaggttaaaaatactgacttgcaaggtttccgttgagaagtctggtaatggacttatgggagatctcttacacatgatgtttctttcagaattctctctttgtgtttgacctttgacaatttgattataatatatcttggagtatgtcttttttgaattgaacttgcttgggatgctttgatcgtcttcaatccggatgttcatatccctctcaagatttggaaaattttcagataatattccattgattaagcttactgccccttcctctttttcttcttttggtacttccataattcatatatttgtatgtttgatggtgttccataagtatgcataaaacacttatggaaaaataatctcaacaattttgagattatttttggcaggtggagcatcctaaaactagaagtcatcaccttcctcttcaagtgactgacttcttaacttagaaatcaccaccacaggatgcatagaagactgaaacaaaatgtggctttgtgaatacagtgtgggctttggagtcagaaactctgccatttgttggctgggtaacttctagtgtctctctccatctcaaagaatttcatcgtacagtttattagggattaaacaagtttgtgcttataaggtacccactatagaactttgtagtcaatagacactcaataaaaggtgttattactcttccttgttctccacagtggcttatgagatcccatttactggctcactcttcctagcaccatagacctctggactggatttcttcttgctatctaactccaacaacttgacttcctttgttcaccttcatttgtttcaaggctcttctttttttaacttttagttttaagggtacatgtatgtaattgtttgttatatgggtaaactgtgtgttgtgggggtttggtgtacagattctttagtcacctgggtaataagcataaaacccaagagatatgctgtctccctcctcctagcctccacccttaagtaggccccagtgtctgttgttcccctcttagtgtccatgtgttcttgttgtttagctcccacttataagtgagaacatatggtatttggttttctgttcctgctttagtttgcttagaatagtggtctccacctccatccatgttgctgcaaaggacatcatctcattattttttatggttgtgtagtattccacggtgtatatttaccacattttctttatccagtctgcctctttttaaatatagtcatttttctcatttttaattatcaaacatttataaaatgcttattctgtggaaggttctctgcctcaagagttacaaacattaggctgggcacggtggctcacgcctgtaatcccagcactctgggaggccaaggcgggtggatcacctgaggtagggagtttgacaccagcctgaccgacatggagaaaccccatctctactaaaaatacaaaattagctgggtgtggtggcgcatgcctgtaatcccagctacttgggaggctgaggcaggagaattgcttaaacccaggaagtggaggttgcagtgagccgaaatggtgccactgctctccagcctgggcaacaagagtgaaactctatcttcaaaaaaaattaaaaaaaagagttacaaagattaatgatgtacaatctctggccttaaaaatctctgaaaaactagaaataattctaaagcccagaaagagtgagttcccttccagtatcctatacaagttcaaggtcctccaaagcattattaaatcttcctagccttttgatcctctgccttttctcctgcctcactaatgttctaagtctctgttatgacacagattctagaaccttcacaggccacactcccatcatttgcttaggtctgatcaatctgctccacacaatttctcagtgatcctctgcatctctgcctacaagggcctccctgacacccaagttcatattgctcagaaacagtgaacttgagtttttcgttttaccttgatctctctctgacaaagaaatccagatgatgcgagacctgatgaagacaatacatggaaaatgacagtcttgggtatggactaactc

SEQ ID NO: 35891 - DNA, 2300 bp, Homo sapien
tgtccatcagggtctgattcaaaagtagcataacatctctccaggagagtttaaatatatgggtgaaagtctggaaaacctctatatatctataagggtcatctgaaagcttgccaagatcccccttggtttgctttaaatcctgtaggaagaaggtgacctggaccttactgggcgcaaattcactgggcatttgttggaggggcaaaagtgagactggttgaatgttgaaggtgtacctcaacacacacacacacacacacacacacacacacacacacacacacagagttccttggcacagactagcatagtgtttgctttggttctaggcattgtctctgttcaatcattagctaatgactaagctaaccgggcagaaacatcaaacgttacattcaggaaagaatggagactttataaaattagatcagaaaaatctttaaacaaacaaacaaacaagtagtaatacaacaaatgcaacaacagcaaactctgtagagggaggaaatctggtttctaaattgcaacattataatattcaaaatgtctagatttcagcaaaaaataatgaagcatgtaaagagaaaagaaatcatgacccatgcacagaaaataataaaaagaaactgtttctgaagaagcccagacattgtaattagcagaataagacatgtctaaaaaataaagtataagaatgatgtctcagcaatttgagaatatcagaaggagaaattatagaaataaatagcaattctgcaggttaaaaatactgacttgcaaggtttccgttgagaagtctggtaatggacttatgggagatctcttacacatgatgtttctttcagaattctctctttgtgtttgacctttgacaatttgattataatatatcttggagtatgtcttttttgaattgaacttgcttgggatgctttgatcgtcttcaatccggatgttcatatccctctcaagatttggaaaattttcagataatattccattgattaagcttactgccccttcctctttttcttcttttggtacttccataattcatatatttgtatgtttgatggtgttccataagtatgcataaaacacttatggaaaaataatctcaacaattttgagattatttttggcaggtggagcatcctaaaactagaagtcatcaccttcctcttcaagtgactgacttcttaacttagaaatcaccaccacaggatgcatagaagactgaaacaaaatgtggctttgtgaatacagtgtgggctttggagtcagaaactctgccatttgttggctgggtaacttctagtgtctctctccatctcaaagaatttcatcgtacagtttattagggattaaacaagtttgtgcttataaggtacccactatagaactttgtagtcaatagacactcaataaaaggtgttattactcttccttgttctccacagtggcttatgagatcccatttactggctcactcttcctagcaccatagacctctggactggatttcttcttgctatctaactccaacaacttgacttcctttgttcaccttcatttgtttcaaggctcttctttttttaacttttagttttaagggtacatgtatgtaattgtttgttatatgggtaaactgtgtgttgtgggggtttggtgtacagattctttagtcacctgggtaataagcataaaacccaagagatatgctgtctccctcctcctagcctccacccttaagtaggccccagtgtctgttgttcccctcttagtgtccatgtgttcttgttgtttagctcccacttataagtgagaacatatggtatttggttttctgttcctgctttagtttgcttagaatagtggtctccacctccatccatgttgctgcaaaggacatcatctcattattttttatggttgtgtagtattccacggtgtatatttaccacattttctttatccagtctgcctctttttaaatatagtcatttttctcatttttaattatcaaacatttataaaatgcttattctgtggaaggttctctgcctcaagagttacaaacattaggctgggcacggtggctcacgcctgtaatcccagcactctgggaggccaaggcgggtggatcacctgaggtagggagtttgacaccagcctgaccgacatggagaaaccccatctctactaaaaatacaaaattagctgggtgtggtggcgcatgcctgtaatcccagctacttgggaggctgaggcaggagaattgcttaaacccaggaagt

SEQ ID NO: 35892 - DNA, 2300 bp, Homo sapien
atttgagcaatttttttgagagttcacttgtagattttccctcccaccgctttgacatgaaagacctacaggaacgcaagcctctgaagtggtctgtagcaagtgtgagttcattttagttcacaaggctgagaaatcatgcttggtatggatgttgtggggctttctttactcttacttggtggaaaaaaatgttcctgcttttcacaaaaggagtcagggaggcatcagcaacacccttcagtctaaggggaggtgactggtaagtttcaggtggcaaggtgctcatggtctgcactgtcttctaacacccaaccccattttcacataaatatcatactgcccttttcgatctaggtattgtgaatgggctcatataagtttccttagagatatcttatatgaaagtacatattttttataaagcaaatgggcaatatttgtgtaacaacaatctcctgactcatttgattgttaaatctccatttcagaatgttgatttttacccctgtcccataaaatcttactagcagtagtttcttggaaagggggaaactgtaattgacttgacattgctcctgagctggtttctctactttgtgtgaagcaagttttctttcaataaaatacttgacacatcacatataataagtcttagacttctttcactctgaagtttgtatttttcaatggtaaaactagccttctatccttgtcctggtaagttttaaagtttttagctgtgtgaagtatttttgttcagctgggacagtggggttgctgggtttgccagtttctgccagttgggctttttgtttttttaattcattcgtgtttttaagtctattctaaaaggccacttacagatattttcccgactatctttctactactctttctttcactttccacggcatctctgtgtcccgggttctctgagcgctagcactgaatgttggctttctggctgcagtgtggagacgcagagccttcctgccctttcctccatgtgtagaaaacagtggtaaagaaaggctttgcaggaggagttgggaggaggacaggaaaaaatatttgaatcttgctctataagttttgcaagctcacaacagatgaacctaaggagttttgtttgctttggtttggtttggggtttttttaatattattgttcctttacctcaagtgttttttcatttcagtcacaagacttccttacacctaaaaaattgcttaaaatattgtctcatgaaattagggttgctgaggcaggaataatttcataaagttctattggaaggcaaatgtcaggactgatgtaggaagacacaccaacgaagttgagggtggtccaaagtctgttacaagttggaaggcttttgtaaggaagttcaggcagaaagaaaggggctcttcatattggagttgtcttttttcactggagggtacaatacagaggttacaatcattggacacagatgacaatatatagactaaaatatttcatgcacaaaacaatcagtaaaactttatgattcagaaacaaatccatatccttttcgatgtcaggaggttacatattaaccactacatcaaattagctcagaagctacattgaagccgaactacatcaacgtttgggtgtatgagcagatctggttataggttacagaggtatccttcaatcagacgttatcttatgtgtaggaaaaggcaaggactattattgcttatcttttaaggagtagagtgactcaggcaagagagatgggaggccgtgtgctcaatcttgttttgtctttgaagcatctttctggagaactgcaggtcatcacagcaggggctttgtgaaagtatgctagcaagccgaaatgagcaagcaaggcttcttacatttgctacattgtctcacaatataacacgttaggtaaagggttggatgtgatcagtaattgcagagaaatggagccaagcccatttcactgactgtgcaggggttgatgtggattctctgctaagactgcataaccaatggaagccatggagtgtgccgggtgtgtcacagcctcacttaggcacagcgtttccttgtctttgttccagggaggatggtggattttccaggctacaatctgtctggtgcagtcgcctccttcctattcatcctgctgacaatgaagcagtcaggtaggattcccttctccctttactgtatagtctaatgtcccagtgagctagtctgggtccaaaggtcgagaacaacatctaagagtgtaagtctggggccaagccacctgtatc

SEQ ID NO: 35893 - DNA, 2300 bp, Homo sapien
acatagaaaattatacatggttttgcctctaaaagaggagatgacaagcttaaatcataggatcagactcttagcacagactgataccataggctctcatctggcccattctcctgactctttaactttcaggaaaggtattcctgaaaaattgcaggagagaccatgctgtaggtctctttctagcgatctaggagttaatgccacagtgtgttcaaagccctttgatgcgatcagataatcagtaatgtatggaatatttgtgttcataacttgtgagaacggctgcatggcaggacaagaccccagcacaacagtatggaaaatccaccctaagcagacatgtcatgactgatgttgaacaatggactcaccagccaggcacggtggctcatgcctgtaatcccagcactttgggaggcagaagcaggcagatcacgaggtcaggagatcaaaaccatcctggttaacatggtgcaaccccgtctctactgaaaatacaaaaaaaaaaaaaaaaaaaaaaaaaaaaaaattggccgggcatggtggcgggcgcctgtagtcctagctactcgggaggctgaggcaggagaatggcgtgaacccaggaggcagagctttcagtgagccgagatcgtgccactgcactccagcctgggcgacagagcaagacttccgtctcgaaaacaaaacaacaacaaaaaaaaacaatggattcaccatccgatgggctccctcactgccaggtcactcttcatggaagtatttgtattccagtcctttctgtggaaagaaattaacattctccttttcataacactgtatcttcagaaacaagagagtcgaagtctcctaattttcaggactgtctatgttgaacatcaaaatatattctttagagcagatctttaataatcatatgacaaaagaaaaactttcataatcttatgacatgagggaaggaatattaaagccgttctgtgggttattatctctaacgttcccaatagaataggctttgccagctgggtgtggtggctcatgcctgtaatcccagcactttgcgaggccaaggcgggcaaatcacgaggtcaggagtctgagaccagcctgaccaacatggtgaaaccccgtctctactaaaaatacaaaaattatccgggcatggtggtgggcgcctgtaatcccagctactcaggaggctgaggcaggagaatcgcttgaacccgggaggcggagattacaatgagctgagatcacgccaccaactccagcttgggcgacagagcaagactccgtctaaaaaaaaaaaaaaaaaaaaaaagaataggctttgcccactatactctctcatattcattgacctgaatcctcaaatgaggtgtgtccattagtcaactccaatctcttgtcatatataagatggtagagatgagaagaaggtagctcctttacagcccactatttccactaactactacctgtgtttcaagatacagcctttcatccttctccagtgttgagagtgttgaacctcagagtttctcctctcattttctctaaatgagatacaatgccagccatcccaagctcttggcctgagttgatcatcttgaagtctaggactccaagaagcatgaaagagcttctttagtgaagctatgtcctcagtactgccaaaattcagacaatctccatggcctgacaatttaccttctatttgggtaatttattgtcccttacgcaaactctccaactgtcattgcacagacatatgatctgtatttagctctcactttaggtgtttccattgattctattctcactaatgtgcttcaggtatatccctgtctagaagtcagattggggttaaagagtctgtccgtgattgactaacagtcttaaatacttgatttgttgttgttgttgtcctgtttgtttaagaactttacttctttatccaatgaacggagtatcttgtgtcctggaccctttgcaagaacccttcccctagcaacagatgcgtcatctcaaaatatttttctgattggccaaagagtaattgatttgcattttaatggtcagactctattacaccccacattctcttttcttttattcttgtctgttctgcctcactcccgagctctactgactcccaacagagcgcccaagaagaaaatggccataagtggagtccctgtgctaggatttttcatcatagctgtgctgatgagcgctcaggaatcatgggctatcaaaggtaggtgctgagggaatgaaatctgggacgatagact

SEQ ID NO: 35894 - DNA, 2300 bp, Homo sapien
ccgggcggagacgctcctcacttcccagacggggcggctgcagggcggaggggctcctcacttcccaaatggggtggctgctgggcggaggggttcctcacttctcagactgggcggccggggcagaggggctcctcacatcccagacggggtggcagcggggcagagacactcctcagttcccagacggggtcacggccgggcagaggcgctcttcacatctcagacggggcggcggggcagaggtgctccccacatctcagacgatgggcagcagggcagagacgctcctcacttcttagacgggatgacggccgggaagaggctctcctcacttcccagactgggcggccgggcagaggggctcctcacatcccagacgatgggtggccaggcagagatgctcctcacttcctagatggggtggcggccgggcagaggctgcaatctcggcactttgggaggccaaggcaggcggctgggaggtggaggttgtagcgagctgagatcacaccactgcactccagcctgggcaacattgagcactgagtgagcgagactccgtctgcaatcccggcacctcgggaggccgaggctggcagatcactggcggtcaggagctggagtccagcccggccaacacggcaaaaccccgtctccaccaaaaaatgcgaaaaccagtcaggtgtggcggtgcgcgcctgcaatcccaggcactcggcaggctgaggcaggagaatcaggcagggaggttgcagtgagccgagatggctgcagtacagtccagccttggctcggcatcagagggagaccgtgcaaagagggagagggagagggggagggggagggggagggtattaattattttaaaacagaattgtggccaggcacgatggctcatgcctgtagccccagcagttggggaggccaaggcaggcagaacacgaggttaggagatcgagaccatcctggctaacacggtgaaaccccatctccactaaaaatacaaagaattagccgagcgtggtggcacatgtctgtcgtcagagttactcaggaggctgaggcaggagaatcatttgaactgaggaggcggaggttgcagtgagccaagatcgcaccactgcactctagcctgggtaacagagcaagactccgcctcaaaaaaaaagaaaagatagttgctctgtgaacagctgactttcacagtcttcgatcgatctctcagacccacgaatacttggactgcacagttgaccttatcacattgttagggtaaatgccatacaaaggcaccttcagaccctccattgcacataggtggcccctgcaagccccttgcctgtgtgtgttctggaggtgccactgaacttggggacagcatcaggagacacacttgaaaaagatatttttactcagattaaattattaacaaactttcaatttcctttaacttattaaagacatccctacctgtaaataggtacggattaagctctctagtcaatagctgtcattctgtcatattatcagatacccggggctgctgctccttcaggcgtccacagaatcacagcattgtccagtattgaaagacctgaaagattgcagtgccttcatttcaactgtgagacatgaaataattttcccaaatctacaacattaagatacggtgcaataaggaccagattaaaggtctccaatttacaaccatgttccctccatctcctttactcctaaacacactcacacactcacttctgcaaacaattgtcttgtcaagtgggaaatgaatgctcttacaaggctcaaacttgtgaacacatcactgaccagcacagagctggctcacgatagggacccagttaaagtgttttacgtgcaactggatcaaatctttcaagtactaatttaaaacaatcctttaaataaggaaattctgtttcagaagaggaccttcatacagcatctctgaccagcaactgatgatactattgaactcagatgctgattggttctccaacacgagagtacccaaaccaggaggaaggaaatcagtaacttcctccccataatttggaatgtgggtggagggggatcatagttctccctgagtgagacttgcctgctcctctggcccctggtcctgtcctgttctccagcatggtgtgtctgaagctccctggaggttcctacatggcaaagctgacagtgacactgatggtgctgagctccccactggctttggctggggacacccgacgtaagtgcacattgtgggtgctgagctactatggggt

SEQ ID NO: 35895 - DNA, 2300 bp, Homo sapien
atttactgatgtggggatgagggtatgcttgtgttttcacaggagatggacaaaccatgtgggtgccctcaaggtgcgtgcaaccatggaacaggagactggaggaacccagggtggccaaccatgggcccggtccctccagtacgggccatgagccagctgagcctgagtgaaaagatggagagaaggacaatcagagtcatggcaatatcaaacctcataaactgcggacaactcaggaaaaccatgcaggaagctgagaaactactggagcatcagggacaggcaaaaacccctgattccatgttcttggctaagatacccataatgtcttgtgcggtatgttttccctgtgcagaggcaaaaatatattgggcatatattcccaatccccccagcagtatggcctatactctggagtgacactcctcctgagattgatcataatcagggagcgtgggctccaggacccctaactcccggtgacatagaacagttagactctcagaacaatgtcatcaattataccgctccgctggaaggactccctttgtgtatcacctcaaagacgtcactcagccatagctgtcttacaattcaagctcaaacatggttgagtcactacagaaaactcatgtacttcttaagtcttagttctattaatgtaactggtgtgctaaccgaccattcccaggccaattgccctaatcgtgctgactatacggaatgaattcccttcaatagttcctatccccctctgtggaccccgtgtcttggctcactggctaaaaaataatcaatattaactggagatattgtggattggagacctaaagatcaactagatggaaaagataataatcagaaatcatggcacaaatttcactggcattggtggcaagcttataatgcttcttctttataccacaccgggatccaatcctattctgctgcccagattgcttggcatggagcaggctttagcctgcctcttcctcagtggtattatctagggaggaaaggaccaatccaagagatgttatggaaggcagcactcccatttatgaatggcagcatctgggttgggatatcatccaataatagcaatagtaagtgacacagttttaatgttacatttgtaaggaatatcaccactcaatttacagcttgtgtttttgcctgtaaatcttgccagttatatcactgcattaatcatagcacattgcaaacacataatatctctactttgataattttgggttgcatccctggactatggattcctgttaatctttccaagccttgggctgccacacctgctttgcattatgtgaaactttttctaactcagcttactcatcatggccatagagccttacgcatgataatttttgctatagtttccttggtcacactaataacttctgttgtgatgtcctctgcagcttttcatagttctattcaaacagctcattacatggagaactggatgcctatggctgaccaagcgtggctacttcagaataaaattaacactgagttacaaactgaagtagcaatgttgaaatccactgttgtatggttagaggaacaagtacaaagtttacagttgcagcagcaattgctttgtcatcttaatcaccctcatatttgtgtaaccaaatggttagaatataaccaaagtgagtatccatgggaccttgtgaaagtccatttgcagggagctttcacatccaacatcacctttgatattggtgaattacaaaacaaaatttttgacttaaataagcaaactcaagaatttcagccttctttagaagactggactgaattccagcaaggcctggagagcctcaatccttggacctatctaaaacactacgttaacatctcatttgtagttctggaaatgatgttgttttgtctctgtcttctgttcatagtctgtaaaactggatggaccgccaatgggaaaatgagagctgcccaacctggccttacattctttcaattaatacataaacagaaagagggaaatatagagagccagaggctggagaattgtcaccaattcagcattccacagaggctatatgatcaaacagcgaactgtttatcatgaatacagaatgtgggcaaactcgcttctgtgccggccgccagaaggtttgctgagggcaatcactccctggtgccgggctccttgaggttatgcactgggacatctagagcctattgtttgaggaatgcagtcttgcaagcctgctctggatcaagccacagactgaaacacccccgaa

SEQ ID NO: 35896 - DNA, 2300 bp, Homo sapien
atataataacttggttcaatagagttgacagaacaactctgctttaaaataattaatattttatgtgaagagtgttcaatccctcattcctggctccaattatgatttcctcatttgtttgaggctatggccctttactaatccacttctcttgttttatcgtaagggaagatataagaagattttgctggccagacgtggtggctcacacctataatcccagcactttgggaggccgagttactgtttactagccttgcatccttgcaaaagttgtttaaactccatcattttattctctccacttgtaaggatgaaaagggtatttccctcactcagctaatgtgagaattgaataaaaatatgatgtatggaaagctcttcatacaattctgagtacaaagcaaaatgctcaaaaattgctcaagaaattttagtcatttttattgcagcatggtgagtatctcattcctagaaacactaaggcacataaggaaggagtgcctgtcagaactgtggtagggtgtgaattaatgcagaactttatttgcatagttatactttgaagtccattctgaatcttagatgctacatttatataaatgtaaagcataataattatctaaatgtagaattatatgtttaaaattagatgattacatcaactgatgtaattcatagattttccctagggttctgtttcctgaacattctgtaacgtactagttagcaaagcctttttgtttgtttttgaaactgagtctcactctgtcgactagactggagtgcagtggtgtgctcctgactcactgcaacctccacctcccaggttcaagcaattctcatgcctcagcctcacgagtagctgggattacaggcatgcaccaccaagcccagctgatttttgtatttttttagtagagatgggatttcaccgtgtcggccaggctggtctggtactcctgacctcaagtgatccgcccaccttggcctcctaaagtgctgagattacaggcgggagccaccgcgcccggccagcaaagtcttctaatatcttcccttacgataaaacaagagaagtggaatactaaagggccatagccttaaacaaaggaggaaatcataatgggagccaagaatgagggattgaacactcgacataaaatattaattatggtaaaacagagttgttctgtcaacagctgactttgagtccttgatcgatcatctcagccccctgcatactttgattacacagttgaccttaacacattgatagggtaagtgctatacaaaagcaacttcggactctccattgcacataggtggcccctgcaagccccttgcctgtgtgtgttctggagatgacactaaacttgggggcagcatcaggagacacacttgaaaaaactctttttactcagattaaattattaactaactttcaatttcctttaacttattacagacatctctacctgtaaataggtacagattaagctctccggtcaacagctgtcattctgtcatatcatcagatacccggagctgctgctccttgaggcatccacagaatcacattttctagtgttgaaagacctgaaagatcatggtgccttcatttcaactgtgagacatgacgtaattttcccaaatctacaacattaagatatggtgcaataaggaccagattaaaggtctcctgatttgcggccatgttccctccatctcctttactcctaaacacactcacactcactcctgcaaatagttgtcttgtcaagtgggaaatgaatgctcttacaaggctcaaacttgtgaacacatcactgaccagcacagagctggctacaatagctccccaattaaggtgttttacatgcaactggttcaaaccttccaagtgctaaattaaaacaatcctttaaagaaggaaattctgtttcagaagaggaccttcatacagcatctctgaccagcaactgatgatgctattgaactcagatgctgattggttctccaacacgagattacccaacccaggagcaaggaaatcagtaacttcctccctataacttggaatgtgggtggaggggttcatagttctccctgagtgagacttgcctgcttctctggcccctggtcctgtcctgttctccagcatggtgtgtctgaagctccctggaggctcctgcatgacagcgctgacagtgacactgatggtgctgagctccccactggctttgtctggggacacccgacgtaagtgcacattgcgggtgctgagctactatggggtg

SEQ ID NO: 35897 - DNA, 2300 bp, Homo sapien
agctcacccagttttcctaggataaattcttaaagtcaactgattatgaacttcaatgacatctacaaaatatcttcacagcaacatctagattattagtgtttgactgaataactggggatcacagtctagctgacacataaaattgaccattaatcagttgtaaggtttgtgcttgttttaggtgattttggggaggatttaagaaagagggattttgcttttaattggattctgacagaaagtggagggttggggtggcaatgttatgattgggtagcttcataaatcctacctagagggacagaagactatcctgaggctacagacgtggttggtaaagaagcagtaatcactcccaagagagagatgtgcctggtcatttttgtggtttggacaatatttatgttttgtctgggttcagacatgatgactgagcattcaggtgttctgtctcaatccactgtgctcacagagtacctgtctgattctgatgttctatgaaatcctttatctccaacaggagaaccaaaaccacctgggagtgccaggctagctgctagcaaccccaagcctttgttaattacatccagacagctctcaggtgtcaggacatttttttttttgttttactttttttttttacagtctctgccagtaggaggtaaaacatagtgctgagaatctcagaaggccatttatcaaggacagagtgattctaaatagaagctccattaacttacggtttctatcacatacagaaaatagatgcatctgaaaaaacataataagtttccctctaaggactaactttagctcaatctctagtcccttgcaaatatttggaattttaatggggtaggataacaagttttaaaagatctgatagtttaagaaaagaaaaccatttttctaaggcagtgcaattcttattctaccctcaacttttgacttcatattcttaattaaaaaaaaaattcttagagtaattgagccagccaaattttaaatgtaatcaatgtccctaaatttcctttaaacgtactcaagaagcaccaaaacacagaacataaggattactcaatgcaaagaaaaactgtataaagtctcatatagttactatagacagccccatctgacattataacccctttttattgccctggccaaaaccacctggagcttttgagcacttgagaagaacttacccagctggatttatacaagtagaaaaggcaaaggtattgcttgggctaccaccagcagagatccctaggtaggtggggtcagcttaacatttggagaattccatacgcactgtggaagctaaaagaaaaacagctaacccacatacagaagccagagaaagggcaggggatggggactgccagggagggaaatcaactcagggaaaaattcctggaggttgtaagccagaacatcctgaaggatgccgtataactgatgacctcatctatccacgaggctgctcagaaatgcccacccctggccaggcgcggtggctcatgcctgtaatctgagtactttgggaggctgagacgggcagatcatgaggtcaggagttcaagaccagcgtggccaacatagtgaaaccccgtctctactaaaaatacaaaaattagctgggcgtggtggcaggtgcctgcagtcccagctacttgggagggtgagggaggagaatcgcttgaatccgggaggcaaaggttgcagtgagccgagaccttgccattgtacctcagcctgggtgacagagtgagactacgtctcaaaaaaaaagaaaaagaaaagaaaaaggaaaaaaaagaaaaacacccatccctcttgcgactggcagacatgcacacaccagagaagattccaatttaatgtcctccctttattcatagaacaattcctcaagtccactctgagtagaggctgcatcacaaggggattgccccgtctccttccagggctcttaatacaaactcttcaactagtaactgagatgtcaccataggggatttttctaattggccaaaacctgacttggcagggtttggtttgggtgtcttcagatttccttgtcttgaggtcctcacaattactctacagctcagaacaccaactgctgaggctgccttgggaagaggatgatcctaaacaaagctctgctgctgggggccctcgctctgaccaccgtgatgagcccctgtggaggtgaagacattgtgggtgagtgcatgagtgagggatgttctctggagctgaaaaacagtaaattgaaggaaaagagataa

SEQ ID NO: 35898 - DNA, 2300 bp, Homo sapien
gagaagatgatttctcccttgattttcacaaaggagtccacaactttttcttccaacctgaaggaagagaggatgtcccctaaagacagtctccctaatgtaatcctgaccctccctactaatggcagtgactttttagcccatttacccatatggagtaaatgctttaattgctctgcctccacagaggctgggcaggcaattcaggtgagacactcggaataaggatgcttgacctagtttctttcttctctggcctttttctgcctgaatgccctgaataatgcagcagggatagggccagggtagtcaactgtagagaaggctgggccaggcagacacaactggcagaagcccaaagcaaaacctttccagtgaggttttagccaatcagaaaaaggctctaaagtgacacttgttgctagctgaaaagtctgtgcaaagaggcctgtgagactggggaatccccaggtatgacgcagcctttgcctcagaataaacctgcgggaagtttttcccttagacaggaaggagaggatggattagagacctctattttgaggcgcactgatgtaggggctgaggaaggacattgagggcaccttcaggtctctctgcctattcttccttgccccaactccattccaggtgtgcatttggttcctcctttatgcgtccatcacagcagtggagaccctccttagactgggtttaccctgatcctgagtacaccactgctgctggacgcccagtggcaactttcccagtctcaggtgctctagaattatgcactgaataatacagaatattggagtggctcaacgctttcatgtgccactattgcaaacgtcttgctgttgcctcttccctgcttctttttatctgataaacttatattctgattttagattgtattctctactttaaaagcagaacctaacattttgggaaaagaaagagagaaagggagagaagaagagaagtggagatatttattgtcttggttgaggtcagaagtaatgtttgccaggcgttgttctaattgctttataaccattagtattgcccctagtcactgtcaagaggagcctgataagttatgtttatttataaaaacacattgatgtagatatgtccatgaggaactgttaaaaaaatagaattgaaaaaaaaacacattgatacctctgccatttgggatttaatgtttagggctggcacagtacactctgtgactctaaacactttctccatcattagtactattcaggacccaggaaatgcttctccacaggttttgtgctctctcttcaaaacgaaacatgactgcatccgaatactgtaaaattctgtgtattgtgcctttgctgatatcagatgcatcatttcatggttcagggaggatttaaacagctgaagaacttaaaaaagaaatgtcaacttaattaacttttcaaatactttcactagaagagcataaatacaatatgttcttgcataatgaagaatcatttaccagcaggggtgggtatcaattttttttttttggcttgttttcttgttccacatattaacctgatagttacacataacagttgaggagacttttgtaatattaaacaagacaaattaatcttaaatttgtacatgtgaagatctagatgtaaaatgcatgaaacatgacccacattttataaagagaagcctggggcaaaaataaattcagtaatttgttgactcttctaaagcacattagtggtggaactgcaacttaccattatttccttctaagaactttgctcttctccccaggacttaaggctcttcagcgtgtctaagacaacagcagtaaaaatttctgtgacagcaattttctctcccctgaaatatgatccccacctaatttgctttattaaaaatcccaagtataataacaactggtttttaacaatattacagagatgtttactgttgaatcgcatttttttcttttgcctctcaaaatccccgaggcattcgttcttcagctcttctataatcgagaggaaattttcacctcagatgttcatccagtacaatttgaagacgtcacagtgccaggcactggattgagaaccttcacaaaaaaaatgtctgcccagagacagatgaggtccttcagctccagtgctgattggttcttttccgagggaccatccaatcctgccactcacggaaacatccacaggtttttattctttctgccaggtacatcagatccatcaggtccgagctgtgttgactaccactgcttttccctt

SEQ ID NO: 35899 - DNA, 2300 bp, Homo sapien
tggaggtagtctgtggggttatagaaagacatactcctgaggagttgccgcccctttttctcctcctcctcatccaaaaattaactcaagatggattaaagacttacacataaaacctaaaaccataaaaaccctagaagaaaacctaggcaataccagtcaggatataggcatgggcaaagacttcatgattacaacatcaaaaacaatggcaacagaagccaaaattgacaaatgggatctaattagactaaagatcttctgcacagcaaaagaaactatcatcagagtgaataggcaacctacagaatgggagaaaaattttgcaatctatccatttgacaaagggttaatatccagaatctacaaggaatttaaacaaatttacaagaaaaaaaacaaccccatcaaaaagtggtgaaaatatatgaacagacacttctcaaaaggaagacatttatgtggctaacaaacatatgaaaaaaagctcatcatcactggtcattagagaaatgcaaatcaaaaccacaatgagataattatgtcatctagacaaagtagatgtcagaacaaggaatattaccagggataaagagggatattatttaatgataaggggttatttctccaaagacacaaaacaatcttaagtgtgtatgcacctaaaaacagagcttcgaaatacatgagacaaaagccgatagaaatgaaaggagaaatagaaaagtcaaaaattttttgtataaggtgtaaggaaggggtccagtttcagttttctgcatatggctagccagttttccctacaacctgtgaataatggagctaaagatttatttaaacatgaagatctttgttttataaaaaatcacacatagttacacattgtcagaccttttttaattattatttttaccagacataagaaggcaagtacatatacctacacatatatgtatttacgcatatttgaaatattatcagtctatgttacgaagagctttcacatgaatgatctggtttaataaacaagtgaccactgaataaaaatatttcttttctaaagagtaggctaacaagttagctaattaaaacctagatctgggattggagtagaagactaattaatatctgctatcttctccactttagtatcaaaggaaggatgtaagcccatgatgaggatttctttgctgccttaccctctaagtttcttttcctgttgtcattcctcctagtggagcctgcagtgaccatctccccagctaagacagaggtcagccatcacaatttgctggtctgtttggtgacaaatttctttccttgccaagtgaaactcagatggttccagaaaaaacaggagcagactgctggagttgtatccatacctattcagaatagggattagacctaccagattcttgtaatgctagaaataatacccgagcatggagatgtctacacctaccatctggagcaccccagcctccagagccccatcacggtagaatgacgtaaggagcactttatttatatcatagattcaatggaaaaaaggaagggtggcggggggtctgggtcttgtcggggtgagatcactactaacctctgcttgttatacattttcatatcttctctcctacacaacagtatccccatataatttctggactagtagtcatggaagactgagatcccattgtctcaagtcaaaatgcacttgctgagaactgaactccttttctcccaggttattatggtggcccctttgcatcacctgactcccagactataggtcagccttgtcggtgcgccttctgaggtgttatagttctaggttttgaccttagggctgatgtcttggagatggtctgtggggttatagaaggacatatccttgaggagttgtcgtctcctttttcccctcctcctcatccatccatgctgccccttggggtctttgcctgcctgtcatctcctttgcttggtgacagactacctctgtctcttacatcctggataggtctccaggcttccagatgaggacactgtggggtgtggggacaggctctgacacacaggctttcacttcccagggacactgtctgaatctgcccagaggaagatgctgagtggccttcggggtcttgtgctggggctgatctctcttggtttgggccttgtggcccagccatttttggaataagaaaggtaaggcacctttgaagaagatggagagactggtgctgcgaccgaggctttttgttgtaactcgtcctgtctgactctataacggaaaggca

SEQ ID NO: 35900 - DNA, 2300 bp, Homo sapien
ctgctcttaagacttttcaactgcttagactaagctcacccaatttatctcagataaattcttacttaaagttaactgattatgaactttaatgacatctacaaaatatcttcacagcaacacctagattattagtgtgtgaataactggggaccacagtccagtcaacacataaaattgaccattaatcaattgtaagatttgtgcttgtgttaggtaattttgaggaggagttaagaaagagggacttcatttttaactggattctgacagaaagcagggagtggggatggcaatgctatgattgggtagcttcataaatactacctagagggacggaagactatcctgaggctacggctgtgattggtaaagaagcagcaatcactctttcgagagatgtgcctggttatttttgtagtttggacaatattcatgttttgtctgggtgcagacgtgatgactgagtggccttattttctgtctcaatccatcgcactcacagagtacctgtctgattctgatgttctatgaaattgattatcttcaacaggagaatcaaaaccagctgtgcacaccaggctagctcctagcaaccccaaggccttgttaattgcatccaggcagcccccaggtatcaggacactttttattttacctttttttagtctctgccattgggaggcaagacaacatgctgagaatctcagaaggccattcaacaaggacagagtgattctaaatgaaacctccattactaacttgttgtttctataacatacagaaaatagattcatctgaaaaaaggtaagtttccctgtgattactacattttagctcattccctagtcccttgcaatatctgaaatcttaatgtggttggataacaaatatgaaaagatccagtagtttaagaaaagtaaacctattttctaagttaaagcaattctccttattctactctcaatatttgacttgacattcttaaattaaaaaaaaaaaattactggccgggcgcggtggctcacatctgtaatctcaggactttgggaggctgaggcaggcagatcacgaggtcaggagatcgagaccatcctggctcacacggtgaaaccccatctctactaaaaatacaaaaaattagctgggcgcggtggcgggcgcctgtagtcccagctactcgggaggctggggcaggagaatggcgtgaacccaggaggcagagcttgcagtgagccgagatagcaccactgcagtccggcctgggccaaagagtgagactccgtcttaaaataaataaataaataaaataaaataaaataaattattagagtaattgagccagccaaagcttttttaatgtaatcaatgtccctaaatttcctttaaatatattcaagcagctccgaaacacagagcataaagattactagaagcaaaacaaaaaactgtgtaaaagatcggttactgtaggcagcaccgcatgacagtctaacccctttaattgccctggtcaaaaacacctggagcttttgagaacttacccaactggatttatacaagtagaaaaggcaaaggtattgcttggctaccaccagcagagatccctaggaaggtggggtcaagtcaaaatttggggaataccatatacactatggaagcaaaaagaaaaatagctaacccacatacagaagccagagaaaggggagggaatggggactgccagggaggaaaatcacttcagggaagaattcctggagaatgtaacccagaaaaccctgaaggatgccatattattgatgaccttacctatccaagcggctgctcagaaattcccgcccctcttgacactagcagacatgcacacatgacagaagattcagatttagtatcttccctttatttatagaaaatttcctcaagaccatgctgtgtggaggatgtgtcagaaccagaggatgtccctgtcttcttccagggctcttaatataaactctgcaactggcaaacaatatgtcaccataggggatttttctgattggccaaaacctgacctggcagggtttggtttgggtgtcttcagatttgcttgtctcgaggtcctcacaattgctctacagctcagagcagcaactgctgaggctgccttgggaagaagatgatcctaaacaaagctctgctgctgggggccctcgccctgactgccgtgatgagcccctgtggaggtgaagacattgtgggtgagtacatgagtgaggaatgttctctggagctgaaaaacagtaaattaaaggaaaaga

SEQ ID NO: 35901 - DNA, 2300 bp, Homo sapien
ggctctaagctgacactttcgttgctagttgaaaagtctgtgtggccaggtgtggtggctcacacctataatcccagtgctttgggaggccgaggtgggaggattgcttgaggccaggacattgaaaccaacctgggcaacatagcaaaatcctatttctataaaaaatttttaaaaaattagacagaatggcggtgtgtgcctgtactcccagctacttgggaggctcagacaggaggatcacttgagcctaagaggttgaggctgcagtgtgccatgatcatgccagtgtactccagcctaggtgatagagccagaccctgtccctaaaaaagaaaagaaaagaaaaaaggaaaataaaaaaaaaggaaaagaaaagaaaaaagtctgtttgaagaggcccatgagactggggagtccctaggtttgacgtagactttgcctcacagccccagaataaacctgagggaagcttctccctttgaacaggaagaaggggtgggccagaggcctctattctgagggacgctgaggtggggactgagaggacattgagggcatcttcaggtccctctctgcctattctttcttgcccccagttccgttctaggtctgagtttgatgttcctcctttatgcttccatcgcaccagtggagaccctccttagactgggggttaccctgatcctgagtacaccactgctgctagaagcccagtaacaacgttcccagtctcaggtgatctaaatctatgcacagaataatacagaatattagagtggctcaatgctttcatgtgccactattgcaaacctcttgctaccgtctcttccctgtttctttttacctggtaaacatattctgcttttagatgctctctatcttctactttactaatatacagggaagagtgggaggaagggagacaagaagagaggtggagatatttattgtcttggttaggattaccagtaatgtttgtcaggcattgttttaattgctttataaccattagtactatccctagccatgggcaacgtaagcctgataagtaagaaatttatttataaaaacacattggtacctctgccattttggatttgatgtttagggctggcccaatatgacctgtaactctaaacatttgctccatcattaatacgattcagcccccaggaaattcttcttcacagcttttgctctctatcttcaaaactaaatgtgactgtgtctgaatactgtaaaatttgtgtattgtgcctttgctcatatcagatgcacctgtttcatggttcagggaggatttaagcagctgaagaacttacaagagaaaagtcaacaaatactttcactcgaagagcatgaatgcaataccttcttgcataataaagaatcacttgccagtagggctgggtgtcaacttttttttttcttgttcctcctattagcctgatagttacacataacagtggaggaggcttttgtaatattaaactagtcatattaatgttaaatttttatatgtgaagatctagatgtaaaatgcataaaacatgatccacattttgcaaagagaagcctgggggtgaaaaggagttcagtaatttgttgactctcataaagcacattagtggtagaactgcaactcaccatcatttccttctaagaactttgctcttctcaccaaaacttaaggctcttcagagtgtctaatagaagtgaacatttctgtgacaattttctgttccctgaaatatgatcctcacttaatttgccctactaaaaatcccaagtgtaagaacaataggttgtaagatgtctactcttgaatcacatttgtcttttgcttcttaaaacccctaagccattcaatcttcagctattcagaaatcttcacctcaaatgttcatctagtgcaatttgaagaagaaacagtgccaggcattggagtgagaatcttcacagaaaaacgtctgcccagaggcagatgaggtccttcagctccagtgctgattggttcctttcctagggactccccaatcctaccacacatggaaacatccagaggtttttattctttccggcaggtacataagatccattaggtttgagctgtgttgactaccactgctttttccttggtctcacttacgtcttggaagatggctctgcagatccctggaggcttttgggcagcagctgtgaccgtgatgctggtgatgctgagcaccccagtggctgaggccagagactttcccagtaagtgcagggcagctgctctcgagagccaccactgtggg

SEQ ID NO: 35902 - DNA, 2300 bp, Homo sapien
taccatgataccctgggttcattcttaacatgcacagtataggcaaatcaggggcacatttcatgctgaaagatgatgtgaaatgatgagtaaacattgccctttaaataataataacatagatggtgaattacaatttgcacttttggttttatttgcttaaagatagtgttttactgtctaggttttactgaaagaatacttaactaaacacttgagtcaaatcattccagtgtaacagtcctcacaaggaggaaggcagaagggcaaaagtgccaagctattgcctccagcccttctatttttattgattgactgattgattgattgagacagggcctcgttctgttacccatgctggagtacagtggtgcattcatggttcactgcaactttgaacttctgggctcaagtagtcttcccacctcagcctccaaagtaactaagaccacaggtgcatgccaccatgtttatttctttaattttttaaattttatttggacatgggggtctcactatgttttccaggcaggtctctaactcctagcctcaagcaatcttcctcctcagcctcccaaagtgctgggattacaggcatgagccatcatccctgctctctctagccctttttaaagtctctaatcccattcaggaggcctctgcattcatgacttaatcacctcctaaagggcccaccttttgatactatcacattggtgattaaattgcaacacttgaattttgagtgacattcagaccacagcattttggagaaaatgtcccctttcttctcttttttctcttcagtttctcctttctacagataccttgcacttcacttgcaaccttgttgaagtctctcctgtcttaaaagtttcttttcccaaaacaccagaactcattccttctgtctaactgtaactttgtacttgttaccaacctctacccatttctacccctgactccccagcctctggtaactcctaacgtactctttacttcgatgaggtcaacttttttagattccacatatgagtgaaatcacgtaatatagtccttctgttcttggcttatttcacttaacatagagccctccaggttcacccatgttgttgaaaatgacaggatttcatgcttttttatggcggaatagtattccatcatgtatatatatcacatactaattaccctgatttgatcaatacacaatgtataggtgtgttggaacatcatgctgtaccccataaatatgtacaattattacgtgtcaatttaaaaaacccaagaaaagtattttttcttagtgttgtttttttctaaagtgtatcccattttttcctttgttttcactttcaaaattcttgaaagactgttttaatctgcggcctttgttttcttgtttccaattcattcttttgaaatatggcttctacctttaacactctgctgtcctcttgaaggttattggtgccctactaaccataaaacacaataatgctctcttagattgtatcctggtgagcctttttgcaaaattttattctttgagaattctctttccatgttttcttttcttttctttttttgtggtcattttggcttataggaaatcgtactctccaaatgttctctatgtcttctatttcttctctgataatccctttactaaatcttcttgaggcatatgcttcagaatgcttaatttacatactcttaattccttcttaatttacacactgcctgtcggcaatgtcaacacccaataagaagggagacctattggtcagaacaggccagggaatagaagaatacataataaacagtctgcctagttcttctagggccccataatatgtcaaacatatatttttacttcttctcccagcccatttttagtatacctaaattactgtcagtgattctgcaggcaaacaatggttgagttgtatgacacaactttgtgaaagtatcctacccagtacctgatgatgcaaaactcttctatcttgattggttgtcaatctgaggagtttccaatcctggggaagccagaaaaacagcgatttatactcttaatgggtactttctgactgaattttatgagctcattctgaagaggctgacgattttactatctcatttttttcctttctccagaatgggttctgggtgggtcccctgggtggtggctctgctagtgaatctgacccgactggattcctccatgactcaaggcacagactctccaggtaagaacagagcaattgtttttttccagtgtgtatgcaagaattggcatg

SEQ ID NO: 35903 - DNA, 2300 bp, Homo sapien
accataccatttatcccaaataacactttggagatattggatattgaatataaagacagacattaagggtctaatttcatgatgtgtcatgctgaattgcaagatggcaggactataattttagaggaagaagagatcaggaggactcccctaagtgaggagtgtggggaaaatgtaaaagatccaggttagaagaaagagacacacatcatgagattttcggaatcatgctggaactatggaccatgtcactttccagaaaataaaggaaacaaatgcttgaaagtaggagcatgagcttgagcatggagcttttttcattagagagagattcttaaaatgccagaatgaatagagttgtaaaactttagcgagcccctacttaaaatccctcctccccaccaccactattttaaactttaagtgactccttggtagtcacacaggtaacatttcaaaatggtgatctggaatccaagcgacccttcctttggggaatttgtttgtttgtttgtttttagtttgggaggtggtttcaatctgaagagtcctttctggaataaacgaatctttctgttgcataggaaggctctgggtcaggaaggatatttaaaaacctaattactgttctaaacagtgttaaaatagaacaagaaccaaagctcagtacggggcatttccctcataggctgaaggtgcgcccaacataatttggagtacagactcagaggcacctgaacacgcgccagctcaaggtgctccggctgagaaggacggatgaagatgaacgctcagggcctactaaattcaaagtctgtacgtgaaaatcccctttggcctggtgagattggttggaaccttctatttaggagagcccggctcgctcgcctaaaactggagcttgcatggaagagggcactttttttttttttagacgaagtctcactcttgtcgcccaggctggagtgcaatgacccgatctcggctcactgaaacctctgcctcctgagttcaagcgattcccctgcctcagcctcccgagtagctgggattacaggcgtccgccaccacgccctggctaatttttgtatttttagtagagacagggtttcaccatgttggccaggctggtctcgaacccctgacctcaggcgatccgcccgcctcggcctcccaaagtgctgtgattacaggcgtgagccaccgcgccggaccagaaagaaggcacttcttaatagtaggctcagagcttgaagtagtaactttgagaaaattcagtgattctccaattacaaagcattctccaattacaaagcaaggacaacagataaagttgcccttgagacaactgtattttacttaatgataaagaaacatttttgcagttttatatcccagagtaaccgccactaaaggcgagtgagactcattgcaggcctgtacagtgcgaaccagagttcgggctccagttccgctgtctgcgggtctcgcgcgccccctcccggcggcccagcccagaatgaaggccttggctggggaagcgaaagcgaaagctgcccgagccctgacgcccgccctggccgagcgtagctggcggaccagagccggtagcgaggttgggagagacggagcggacctcagcgctgaagcagaagtccccggagctgcggtctccccgccgcggctggtgagttggtgcggaggggaacctggagcgccaacagggacgcagcccaagtgactacccactccacgctcctgcttcccagtccctctgcacccggcgataggagggagcggagcccggaccacttagctcgccgcggcaggcgggggtgggggtgggggtccggggattttttttttttttttttaagcacgaggctcctgatggtcatgcttccagctccccagaaggccgaaagctgtctgtcgtaggaggggtgtacggatgagcaccggttactcaggagagctctcagggttgaataggataaaatgagaagccgatggacgggttaggcggagccgggcgggtaggagggcagggacaaggattgggactccacccccatgatttctcatctcgtatccgttgacagagccatgcggctccctgacctgagaccctggacctccctgctgctggtggacgcggctttactgtggctgcttcagggccctctggggactttgcttcctcaagggctgccaggactatggctggaggggaccctgcggctgggagggctgtgggggctgctaaagctaagagggctgctgggatttgtggggacact

SEQ ID NO: 35904 - DNA, 2300 bp, Homo sapien
acgggctcagcagccagaggaggccggtgaagtgcatcttctgcgtgttctctatttgaacaagcatttcccccagggaagtttctgggtgccccactaagtagaataaagaaaaacggttataaatacctctgtcttgtggctgaatggggttgggcctgtggttgttgggtggggcagaaagtaaagagacgctttttctggagaaggggctcagacccctatctaagaaatgtggcctcaccacatagttcttcctggggtttccttccacactcatctctccaagacctcaggaaggctgctcattgctgtccatggacacttgtttgcaatttcacataggttagggtcctttccatagagaggcacctggggactcctgtgtgttccattgttaatggtttgaggaacagggagtagggcacctaggataactgtttttgactttatagagtaggatgaaaaagcttccacttcactttaatatggtaatcatataaacaccataccatttatcccaaataacactttggagatattggatattgaatataaagacagacattaagggtctaatttcatgatgtgtcatgctgaattgcaagatggcaggactataattttagaggaagaagagatcaggaggactcccctaagtgaggagtgtggggaaaatgtaaaagatccaggttagaagaaagagacacacatcatgagattttcggaatcatgctggaactatggaccatgtcactttccagaaaataaaggaaacaaatgcttgaaagtaggagcatgagcttgagcatggagcttttttcattagagagagattcttaaaatgccagaatgaatagagttgtaaaactttagcgagcccctacttaaaatccctcctccccaccaccactattttaaactttaagtgactccttggtagtcacacaggtaacatttcaaaatggtgatctggaatccaagcgacccttcctttggggaatttgtttgtttgtttgtttttagtttgggaggtggtttcaatctgaagagtcctttctggaataaacgaatctttctgttgcataggaaggctctgggtcaggaaggatatttaaaaacctaattactgttctaaacagtgttaaaatagaacaagaaccaaagctcagtacggggcatttccctcataggctgaaggtgcgcccaacataatttggagtacagactcagaggcacctgaacacgcgccagctcaaggtgctccggctgagaaggacggatgaagatgaacgctcagggcctactaaattcaaagtctgtacgtgaaaatcccctttggcctggtgagattggttggaaccttctatttaggagagcccggctcgctcgcctaaaactggagcttgcatggaagagggcactttttttttttttagacgaagtctcactcttgtcgcccaggctggagtgcaatgacccgatctcggctcactgaaacctctgcctcctgagttcaagcgattcccctgcctcagcctcccgagtagctgggattacaggcgtccgccaccacgccctggctaatttttgtatttttagtagagacagggtttcaccatgttggccaggctggtctcgaacccctgacctcaggcgatccgcccgcctcggcctcccaaagtgctgtgattacaggcgtgagccaccgcgccggaccagaaagaaggcacttcttaatagtaggctcagagcttgaagtagtaactttgagaaaattcagtgattctccaattacaaagcattctccaattacaaagcaaggacaacagataaagttgcccttgagacaactgtattttacttaatgataaagaaacatttttgcagttttatatcccagagtaaccgccactaaaggcgagtgagactcattgcaggcctgtacagtgcgaaccagagttcgggctccagttccgctgtctgcgggtctcgcgcgccccctcccggcggcccagcccagaatgaaggccttggctggggaagcgaaagcgaaagctgcccgagccctgacgcccgccctggccgagcgtagctggcggaccagagccggtagcgaggttgggagagacggagcggacctcagcgctgaagcagaagtccccggagctgcggtctccccgccgcggctggtgagttggtgcggaggggaacctggagcgccaacagggacgcagcccaagtgactacccactccacgctcctgcttcccagtccctctgcacccggcgataggaggg

SEQ ID NO: 35905 - DNA, 2300 bp, Homo sapien
ctgacttgaatgctcatctctttactactaagttatatttccttaaaatcgaatataaaaatgccaagtccatgggtagagaagaggactattcaatagtctttattcttctgtcacgtgtttcaccctagggttctcatttttatcctacttttgcacccttcatgtaaaacagtccttaatgaaacaaagggtttgcggagaagtactcagaatgggaaacgttggtgtccttggggttgttagcagagccagcagtgatcctgtgaggtcagtcccagccctggaaacacaggtgtctccctgggctgagggtagtccccggctctgacggtccgatgtctttcctcaggtggagcagctcctgtacgaaagccctgagcggtactcccgctcagtgcttctcatcacccagcacctcagcctggtggagcaggctgaccacatcctctttctggaaggaggcgctatccgggaggggggaacccaccagcagctcatggagaaaaaggggtgctactgggccatggtgcaggctcctgcagatgctccagaatgaaagccttctcagacctgcgcactccatctccctcccttttcttctctctgtggtggagaaccacagctgcagagtaggcagctgcctccaggatgagttacttgaaatttgccttgagtgtgttacctcctttccaagctcctcgtgataatgcagacttcctggagtacaaacacaggatttgtaattccttactgtaacggagtttagagccagggctgatgctttggtgtggccagcactctgaaactgagaaatgttcagaatgtacggaaagatgatcagctattttcaacataactgaaggcatatgctggcccataaacaccctgtaggttcttgatatttataataaaattggtgttttgtactgtggtttcttatgtttccggcacaccaaacggcccactgccttttgcagcgcacttttcagctgcggatgtctcctcttttatcatcctcaatgttttaccccctaactgcatcaccttttcccttaagctttttaattcctatgaggccccttccacttcccctatccccttaggcccacccccaagaatgtgcaagaccccagccacagggcccatcagggcactagcggccgcagctcagagccgtggcctctccgaagtggcagatggggcgggcgcggccagagcaagtgccaggcgggaacagagggactgggcgcgcctcacaactcaccacctcgcccgctggtccttcctggctcgcctggctctgaagctgcacctggaggggaaacctcagaacagtaggcgggattgcctagtaaatatctcccattcagggaggcccaggtcgtgtgacgtcgacagttgctgggtagatgaggccaacacaggttgcaagaagaggcggggtttagaggcgtgaaactccgcagtgctcagccaagcagggagcaacgctaggaagggcgggcagaaagggcacgctcttgtgggtgactacaggttaggagaccgttgaacctggaggggccctaggatggaccccgtggaaagattcagagactgcgccctctccctggcgccgccttcccctacacgcggcgggtatattctgttgcagttggcccaggacctgtttccaagactctgccccctcgcacttccgtccctcctggttttgtaaagtgatgctcataggaacccccaccccgcgtgacactactcccagctcctggctgacttctagtcttctggttgaagctgcgcctttagatgacacgaccctacccacccctgtttccagcggatgcccgggcctggaggtacctcttactgtaacccatcgccaagtgggcttttgaaggcgcctgttcctttctcgctttcttcggaagacccttgacccatcattcccccgacccccataacgggagagcagagaagccggtccccagtgtgatggtcctggtccaggcactaactgtccttttctcggaaaaggcagggggatgtggaaaagagtcttgttccctccccttcgatctgtggctttcgctttcacttcctcctccgagagcggacagatctctgggtgctgggcggtcatggcgctactagatgtatgcggagccccccgagggcagcggccggaatcggctctcccggttgcgggaagcgggcgtcgctcggacccaggacactacagtttctctatgcgatctccagagctcgctttaccccggggaatgcaggtcggggcagta

SEQ ID NO: 35906 - DNA, 2300 bp, Homo sapien
actcagttgcccaggctggagcgcagtggcacaatcttggctcactgcagcttcaacctgctgggctcaagcgattctcccctcagcctcccgagtagctgggactacaggtgtacaccactatgcctggttgacttttatatttttagtagagatgggtttcaccatgttgcccaggctggccttgaattcctgagctcaggtaatctgcccccctcagcctcccaaagggctggggttataggtgtgagccactgcgcccagtcctatagactgaatttctaaagcgaaacataaggaaaagaccatcctcataatatcgtttatttaaaaaaattattttttgtacagacagcgtcccgctatgttgcccaggctggccttgaactcctgggcccaagtgatcctccctccttgacctcccaaagtgctaggattataggcatgagccaccgggcccagcccatcctaatcatattaatattaattaagctagtctgtttacatgcactgtcactcatttattcattaggaatccttctgagctaggcatttatcatcattctacagatgacaaaatggaggttaaaagaggttgaataagctgctcatatagaggtcatatagcttttgagtggcgcagccttgacccaaattcaggtctgcctgacttgaatgctcatctctttactactaagttatatttccttaaaatcgaatataaaaatgccaagtccatgggtagagaagaggactattcaatagtctttattcttctgtcacgtgtttcaccctagggttctcatttttatcctacttttgcacccttcatgtaaaacagtccttaatgaaacaaagggtttgcggagaagtactcagaatgggaaacgttggtgtccttggggttgttagcagagccagcagtgatcctgtgaggtcagtcccagccctggaaacacaggtgtctccctgggctgagggtagtccccggctctgacggtccgatgtctttcctcaggtggagcagctcctgtacgaaagccctgagcggtactcccgctcagtgcttctcatcacccagcacctcagcctggtggagcaggctgaccacatcctctttctggaaggaggcgctatccgggaggggggaacccaccagcagctcatggagaaaaaggggtgctactgggccatggtgcaggctcctgcagatgctccagaatgaaagccttctcagacctgcgcactccatctccctcccttttcttctctctgtggtggagaaccacagctgcagagtaggcagctgcctccaggatgagttacttgaaatttgccttgagtgtgttacctcctttccaagctcctcgtgataatgcagacttcctggagtacaaacacaggatttgtaattccttactgtaacggagtttagagccagggctgatgctttggtgtggccagcactctgaaactgagaaatgttcagaatgtacggaaagatgatcagctattttcaacataactgaaggcatatgctggcccataaacaccctgtaggttcttgatatttataataaaattggtgttttgtactgtggtttcttatgtttccggcacaccaaacggcccactgccttttgcagcgcacttttcagctgcggatgtctcctcttttatcatcctcaatgttttaccccctaactgcatcaccttttcccttaagctttttaattcctatgaggccccttccacttcccctatccccttaggcccacccccaagaatgtgcaagaccccagccacagggcccatcagggcactagcggccgcagctcagagccgtggcctctccgaagtggcagatggggcgggcgcggccagagcaagtgccaggcgggaacagagggactgggcgcgcctcacaactcaccacctcgcccgctggtccttcctggctcgcctggctctgaagctgcacctggaggggaaacctcagaacagtaggcgggattgcctagtaaatatctcccattcagggaggcccaggtcgtgtgacgtcgacagttgctgggtagatgaggccaacacaggttgcaagaagaggcggggtttagaggcgtgaaactccgcagtgctcagccaagcagggagcaacgctaggaagggcgggcagaaagggcacgctcttgtgggtgactacaggttaggagaccgttgaacctggaggggccctaggatggaccccgtggaaagattcagagactgcgccctctccctggcgccgccttcccctacac

SEQ ID NO: 35907 - DNA, 2300 bp, Homo sapien
ttagttcgtctcatcacttggaacctgtctgattcacctcactctcttctccccaaccctgcaggtaacatcatgtctcgggtaacagaggacacgtccaccctgagtgattctctgagtgagaatctgagcttatttctgtggtacctggtgcgaggcctatgtctcttggggatcatgctctggggatcagtgtccctcaccatggtcaccctgatcaccctgcctctgcttttccttctgcccaagaaggtgggaaaatggtaccaggtatgttcatggagttggcccgctctacacagaccctcatctcccagacttggcagactcagttcctctcacattgctttcagtccagctttcctggcacccttactgattctccatcttcatggaacaccctgtccctgtggtccatgttcccaggttgctcaacattaacctccatactctctgggtcttcttttctagcttctccccacaatctgtctttaagaatttgatccccaacccgttctgagtcattttcctcttcctcgtatttctttagcatccaaggggcatagctgtgtctctttctcttttctccttttcctctgtctcttctcacctttaatttccaaataggtaactcaggtattagtgtccctgatggtttgccaacccgtgtgacatctcttgtccatgtatccacagttgctggaagtgcaggtgcgggaatctctggcaaagtccagccaggtggccattgaggctctgtcggccatgcctacagttcgaagctttgccaacgaggagggcgaagcccagaagtttagggaaaagctgcaagaaataaagacactcaaccagaaggaggctgtggcctatgcagtcaactcctggaccactagtgtgagcacctgaagatgaatacccattcccttgtccttaagatgccgtgactccattcccattcctatgaccctgctcccactcctcctttactgggaaatggttggttcagtattttcgtcctagcaacctgaggctcaatgactctactcagtgtccctagccccctccctctctttaaagatgctaggtggcttcctttcagtatggtacataaaatccacccaaccatgtggattggagagatgcgtgtcttccagtcctagggccttcctttgcctctcaggggaagtgcagggcgccataaattcttgcacctgggactgcttcatgctggtaccttgtagatttgttagtgagagtgatgggaatagtggaagccagggatgagggacatctgtgatgcactggaaagagagctacgccagtgatccgaagatcctggcttgatgatgcaatttacttgtcttgtgatcatgacaacaaatttaccttctctgagactgtttcctctttatttatttatttgtttgtttgtttgtttatttttacttattattattatttttgagctggagtctcgctttgtcgcccaggctggagtgcagtggcgcgatctgggctcactgcaagctccgcctcccgggttcacgccgttctcccgcctcagcctcctgagtagctgggactacaggcacccgccaccacgcccggctaattttttttttttttttgtatttttagtagagacgaggtttctccgtgttagccaggatggtctcaatctcctgaccttgtgatccgcccacttcggcctcccaaagtgctggaattgcaggcatgagccactgcgcccgactggttgtttcctcatttttcaaaaatggagtgatataaccttctttataaggctcttcatgtattagctgacatcacatgaatgaaagccttttgtgaagagtaaaatgctccccagacaaggtgatagtggtgatggtggtgaagataactgtgacttgcatgatgtgcattgagtcagactccatggggtctctggttcattctcctgtctgcctattgagcctgccgatgtcacttaggagacagggacttgatatttccttcaggttaatgactgcggttctttgtgtcccctccagatttctctacctcagtccctttttttgtggtctctttatagatttcaggtatgctgctgaaagtgggaatcctctacattggtgggcagctggtgaccagtggggctgtaagcagtgggaaccttgtcacatttgttctctaccagatgcagttcacccaggctgtggaggtgaggtccctccaccttcactccccagtgtgattccttcctctggcccagcaccatctgtgtgatgtccttccat

SEQ ID NO: 35908 - DNA, 2300 bp, Homo sapien
tagtgcagtgctggagttcgtgggtgacgggatctataacaacaccatgggccacgtgcacagccacttgcagggagaggtgtttggggctgtcctgcgccaggagacggagtttttccaacagaaccagacaggtttctcctgaaactctttcattatacgccatgtactgttcatatcctcatacatctgctttgatctcccccctccccgctctctctctctcacacacacatacacacattgttccttctcattcttgatataccctctccctgtctctctctctctgtctctgtctctctctctctctctctcacacacacacacacacaattgtttttctcattcttgatatacctcaggagcaaaatattgtcctccttaccttaagaaaaacctagagttttcatctagcattttcttataaatctattcctatgtatccttagatagaaaccatagaatttcaaacctggaaattttgagctcatagagaccaactgcctcatctgacagagaaggaaactgaggccaagaccctaaatgctgaaactgcacagttacatatggctagagacacacttggggttagaaccctggtctcttgagtgctccacagacttcggcatgctttctagcagcactagaagctgtacagttacatatggctagagatagacctggggttagaaccctagtcccagtgagtgctccacagactttggcatgcttcctagcagcaccctcctcctccatctctgttatgtgaccagtttaagctcttcctgcctgtgtgtatagcatgggacatacaggttctctagggaacagaaagctttcaggaaaatggaaattcacatgtgcattaatgactttataattaaaatgaaggtcaggcctttcctctttaacactcatcttccctgcactgagatttgcagacctctggagaaccctaaccttgtttcctgcagcctccttagaaccccatgttgacacccctgaccctggcatcctggctcattgttagttcgtctcatcacttggaacctgtctgattcacctcactctcttctccccaaccctgcaggtaacatcatgtctcgggtaacagaggacacgtccaccctgagtgattctctgagtgagaatctgagcttatttctgtggtacctggtgcgaggcctatgtctcttggggatcatgctctggggatcagtgtccctcaccatggtcaccctgatcaccctgcctctgcttttccttctgcccaagaaggtgggaaaatggtaccaggtatgttcatggagttggcccgctctacacagaccctcatctcccagacttggcagactcagttcctctcacattgctttcagtccagctttcctggcacccttactgattctccatcttcatggaacaccctgtccctgtggtccatgttcccaggttgctcaacattaacctccatactctctgggtcttcttttctagcttctccccacaatctgtctttaagaatttgatccccaacccgttctgagtcattttcctcttcctcgtatttctttagcatccaaggggcatagctgtgtctctttctcttttctccttttcctctgtctcttctcacctttaatttccaaataggtaactcaggtattagtgtccctgatggtttgccaacccgtgtgacatctcttgtccatgtatccacagttgctggaagtgcaggtgcgggaatctctggcaaagtccagccaggtggccattgaggctctgtcggccatgcctacagttcgaagctttgccaacgaggagggcgaagcccagaagtttagggaaaagctgcaagaaataaagacactcaaccagaaggaggctgtggcctatgcagtcaactcctggaccactagtgtgagcacctgaagatgaatacccattcccttgtccttaagatgccgtgactccattcccattcctatgaccctgctcccactcctcctttactgggaaatggttggttcagtattttcgtcctagcaacctgaggctcaatgactctactcagtgtccctagccccctccctctctttaaagatgctaggtggcttcctttcagtatggtacataaaatccacccaaccatgtggattggagagatgcgtgtcttccagtcctagggccttcctttgcctctcaggggaagtgcagggcgccataaattcttgcacctgggactgcttcatgctggtaccttgtagatttgttagtgagagtgatgggaatagtgg

SEQ ID NO: 35909 - DNA, 2300 bp, Homo sapien
aagcagatgtatgaggatatgaacagtacatggcgtataatgaaagagtttcaggagaaacctgtctggttctgttggaaaaactccgtctcctggcgcaggacagccccaaacacctctccctgcaagtggctgtgcacgtggcccatggtgttgttatagatcccgtcacccacgaactccagcactgcactataaagaacccggaaaaaaaggggatcagggtgtgttcagggaacagactgaaggtcccaggtatccccatataagtgcatttcggacagcagccccaacttccaactccctcatttgcagggtgccccattttcagcccccagacctggctatggtgagaatggacatgagagttaagtttcgagtgaaggtatcggctgagccatcttgtagaatccagtcagtgaggcggcccgtaaagaatggaatggccatctcccctggagaaagagaagagaggtcacgcacaaatattaagtctaagtaggtcagttccagtcagactggccccaccacgcctcctccccctcaccattatcctggagggcatcagcagaaaggaaacactgacgtctcaatcccgaacctaaataggctgccctggaactcactaccctgtggttgctctaccagaactttcaggattttattaggaaggctggagatcatgaagtagaaaagcctcctgttagagatgaggatgccccgcccttcggccccagagcaaaggatttccccgcttccggcgtggcccaaagaatcaagacccggtcagcaatggagcccagaacctctggcccccgccagtccagtgccgtttcttctacaccgaagtggtgttccaagacccacgctaggagtccttctcctgctccacatttcccagaacccacgctactctaccttactgacaattacctttgattcctgtcccagtccccttgtgtcctcccctcttgccctgcgttccccttaccaagagaggagaggaccaccaggaccaggaacagcgagaggcggcgcgtctccgagcccaggcagcctagaagccgacgcacagggtttccagagccgccctgaccgccgggcacccagaggctcccgagtttgtgccacagggctgctgcgggcagtgccgctgcataactgacaacgaaggcggtagggtgacttccccagtgcagtagcctggtgctatccgcggacccgggggctccccatgagatcagctctcggaacaaggcaagtcccggcagggccaagcccagtgccgcagctaatggcttcaaagcagccagccagccctgggcacctgcgttttcgctcttggagccaaccgttgccctgaggaccccgcaggcccccagccagagcacggcccagcggctcaggcccaccgcccagacccggagcagtggcagcgcggtgggcaccagcagggagaatatgcggggcagcgcggtccggagcagcacccagtcggcgagaagtagcagtactgtccccagccatgcgagagaagctccggggaggcagcggcacccgcggggagcgggacacctagagctagccattggcactcggacgccgtcccggtcccggccgggcctgggactctccgcgccccggtggggcctgaagctccgggtaccgccgagtcctcccctactggcggctgggggagggaacgagggcggggctctcggaaagtcccaggaacaggctgatcctgcgctggcgagaagctcagccatttaggggaaagcgaaatcgaaagcggccgcctgctcactagataacgcctacttccaaaagtggcctgcccagactattttggtagcaagcgtggaaatcagatctgagaatctcgggagcagccctggtgcccaattttctccatcacgcacacccttctcgcctctccctgcctcctgcctttccacttgcaccagttttcccaccccagcctcagggcggggctgcctcgtcacttgtctcggggcagatctgccctacacacgttagcgccgcgcgcaaagcagccccgcagcacccaggcgcctcctggcggcgccgcgaaggggcggggctgtcggctgcgcgttgtgcgctgtcccaggttggaaaccagtgccccaggcggcgaggagagcggtgccttgcagggatgctgcgggcgggagcaccaaccggggacttaccccgggcgggagaagtccacaccggggtaatgggtctgggcttgagggttggcagaggggtggaggagatgcagcggccagggg

SEQ ID NO: 35910 - DNA, 2300 bp, Homo sapien
gagaagaagaaacattcccagagaggcgaagtgactggctcaaagattacacagtaacaggccagagctgactgtcagtacaggctttttttcccttcatctttccactttctctattgcttcatccggctgcaggggaatgccacagcccagctgtgatacaacacagaaagaactgtgtccctaagttccaacttgcctagtggaatcctctccactgtagagaggtggagatgaggctcctacaggtagaagtgaagcagctccgcaagtgaaaattatctccaacggaagggctcatagtatgtgcagatgtggtgtagacccaacacagagtaattgactatgatcttgggaaacaaggtcagtctatttttttttttttggtccacaatcctccactctcaccccccatttcatcagaagtgagctcttccaatttactgaacattggaaaaaatcgaggagggcagtggttagcatggccaggggcaaggcaggagagaagcagcaaggaacacatacagatggttgaaaataaaagtttcagttatggaatttccgatcaagaggtaaatacatatctcagcagccagggaggtaaatttgtaccaagagataatttgactgagaagtttaagctgacttttccaggtcaagaaaagaatcaagaagaagtgagggaagataaagctacatttattctactattgagttggaaggagccttaaagatcctcggttcaaatgaggaaaccaagtcacagaaaatgcaaacgacttatgcaaagtcacacagagttaatagtagacctgggactaaaattcaggtctaactcttatcccttgtttccacttctacttcctacttgccactgctcatttggcagtgaggggagatttcccaaattataagtggtttcactgtgtctttcttaccaggccgtaagttactctggccccaaaggacgctcctctgagtatgctttccgacggaccgacttatcatgaatagagggtcaaagaacagggttaacttcaagttagaggctattcctctctaacaaagccgcccccaagccacgagtggtggcagtagtccagagcagaagccagccagccagtcttggggctgccatctgccccaggcgcccatcctaagcaaagtccccccagtgggcacatgggagtgggcagggaagacacagggaagggagtaaggcagcatctgggccaaggagaggccttcctgggtcaagctagggaagggcatcactagttaacacagaacgcccattatcagtgcttgggctaagagttgcccagtggcaagtttatcaaaagtctgtgtgatgagttggtccttctcaataagtgcctatatttccttctcccaagtgctgttctacttcacccagggcaccatttcctcatctctttgcaccatccccaaccccctttcttgatttaaccagcccccactgtccgggaccagagtgaaagcgaaagcgctttagagtagcttcccgttgacgcttccagctaagagtcaaagcacccgctttttccaccagcctcgcgtgcctgttcccttcacggacactctagacgacccccctcagaaaagaaatactctatgctcattgcgggttgcaagcgctggctgctacaggcgacctccctgcgctcccgttggtctctgcattcacttctccgcgcgcgcttccagggtcccctggccgctgcatctcctccacccctctgccaaccctcaagcccagacccattaccccggtgtggacttctcccgcccggggtaagtccccggttggtgctcccgcccgcagcatccctgcaaggcaccgctctcctcgccgcctggggcactggtttccaacctgggacagcgcacaacgcgcagccgacagccccgccccttcgcggcgccgccaggaggcgcctgggtgctgcggggctgctttgcgcgcggcgctaacgtgtgtagggcagatctgccccgagacaagtgacgaggcagccccgccctgaggctggggtgggaaaactggtgcaagtggaaaggcaggaggcagggagaggcgagaagggtgtgcgtgatggagaaaattgggcaccagggctgctcccgagattctcagatctgatttccacgcttgctaccaaaatagtctgggcaggccacttttggaagtaggcgttatctagtgagcaggcggccgctttcgatttcgctttcccctaaatggctgagcttctcgccagcgcaggatcagcctgttc

SEQ ID NO: 35911 - DNA, 2300 bp, Homo sapien
atctttcttaataattcagttctctggtgataatgtttgagcttaaaatctctatcttcagaaggtaacgtgatttgtgaattttctgtcaaatcaggaaagaatcactggcattgccctcttcccacacatgcataggataaaatagctctactggactttttattaatcaaagagcccgagagacagctgaatggctgaaccaagcagagagtggaaacttggggagggtaattccttgctgggccttaaaaggagtccacaagataggaaaaaaacgaaaaagccaaataagatgaacctctattcaggccccaatgagaggctgcttgactctgatctttcgttagctggctcaaaattttgttcttaaagaattatttttactcaaaatcaagaactgttagaaaacaagaaaaattatggagttttgttgttgatttccacctctctacatatatatatgaaatacatatctcctcccgatacacatgcacacacgcaaaaacatatttaactgaaacaacggtttcatgaaactatagttactctcattacctgtgatgcaggcaagtattttcaattgtattttattctatttcattctacttggaaaaaaagtcttttggtctcaacataaatgggttctgacctgcagtttcaagccaatacgttacagtaagagtaaatgtagggtttctcccagttttatctggcagtcccaaagtcaggatcagagtaaccgatggagcatcatttgtacgctccacgtctgaggaggaggtctgggaaaagatccaacgtgtaggactggcgcagaggctcaggcctgtaatcccagcactttaagaggtggaggcgggaggataacttgaggtcaacagttcgagacaagcctggcaaacatggtgaaaccccgtctctactaaaaatacagaaattatccaggcgtggtggtgcgcacctgtagatccagctcctcgggaggctgaggcacgaaaatcgcttgaacgcgggaggcggaggttgcagtgagacaagatcacaccactgcactccagcctgggcgacagagcgagaccctgtctcaaataaaaaaaataataataataatccaatgtgtccctagtctggctttcagggtcttagatgaggttcggaagtggacttaggagccttaggagcgcagccagtgctgtggattcccacatccacgggacctgcggtttcgggttattccattcagggatacatgacgtccctcatttctacctaccagtgggctggtcaagattctcatttatcaagtcagttggagtgggcttaagtaagttctcagccaaggctgtggggtctggaggaccagatatcccgaccaaaagccccccctcccattcctttcacacgcctgccgcagaggtgcacgggtgcgagtggggaactgaggcaagaagcagatggggcggcaccgagagaagagaaactacgctagaggaaaagctcgagctgttacccctcccaacttcttccgccttccgccttcccccttccccctctttcccctcttgcccctctccagcttttctggtccaaccctcttctgcgcctaacactggcacctccttttcttccggctgatgaataattgtccgcaaaccagcctctctggggcactgaggggcgggaaggttagaaggagccagggctagagtcctggaaggtggcagtcaggtcgcagggccacagcagtcactctgcgactctctcttccggtgtttctccagcgccaagcgggagaagacggagcctgggagctgggactggaggagcgggaagcgcagtatcgggaccacggctctgggaccaggaaaaacgcagactctccagagtcaatgtctacttcagccagctcaagggcgcgacaacctggcgccgagcatctcaggccgccgcggggaccccccctaagggactcgggaacacctgcctaccctagaagaggcggagaataaccccgtagggagttaagcggcctctgcctacagcgttcctcccgcctccacggcgccgagccctgattgacgttcagccaggccaatcatagcctgtgtctgaggcgcgcggagctggagcgcccagggcatgtccgccgatcccaaggaggcaatctgtcaggcgccgcccgggcggcagtatgcctgagggggtcctccgtgttcgcgcctcccgccgcctgcactgaaaggtctgtacctgagcctggatacttgaacagaggcagacactgcggctcaaaaccc

SEQ ID NO: 35912 - DNA, 2300 bp, Homo sapien
gacattgacctgttctcccttccctggctcctctaggtggcttcgtggcccatgtggaaagcacctgtctgttggatgatgctgggactccaaaggatttcacatactgcatctccttcaacaaggatctgctgacctgctgggatccagaggagaataagatggccccttgcgaatttggggtgctgaatagcttggcgaatgtcctctcacagcacctcaaccaaaaagacaccctgatgcagcgcttgcgcaatgggcttcagaattgtgccacacacacccagcccttctggggatcactgaccaacaggacacgtgaggagagaggggtgcagaggggctaccaggaagtgcagttaggagggcaggccagggaggatcccacagtggcccaggggtttgagatttgagcagcaaataagagaaaatgtgtggatctgaaatgtagaaagacggaggattgaacctcaaggggaacaaggtggctgacgtgagtggaacaggagtaaagaaggggaggtgaggcttgaaccgcgaggtgccatgtggggagcttatgcagaggctggggcatctcaggatgcatacccaagatgttcttgccttgttatcccagattttgatgttccagatctgatgtgggcccaggcatgggaatatttggaatcccaggggattctgacacatgctttttctcacccttaaactcttgcattgacaatggcttgaagtttgtgaaagtaaacttgaagatctccacagtacagaacagtgtgtctcaagggtggtttctgaaccacctttctcagaattgcctggaggaggtgcttgttaaagatgcaagccccttagtaccactccagatctgttgaaagaaagtatctggggatacagcctaggaaatctgcattttaacataattccttggatttttatttaagattgtgtttgaaaaatgtcaagatagaggcaagcaagaggatcacctaggagagtaaattagtaaaagatggcagtattagcaatctcattagtttgactacattcattccaaatttaagagtgagtcctaagttaggcttgtttccttgaactatgtgaggagaaaaagctttaactagcaaaagaacgtattaaacaagatttggagaaaaattccttttccaccttaaaaaaacccaatgtacaactctggattactcttagcttccttatttcaaatactttccagtttatgtacttgaaataaatacaacaacttctagaacagcttgcagttcagatctggcttttactaattgtaatcaaacataattctggaggaggaaagaaagaaaggggcaatgaaggaatgggagagaagaaagagtaatgcaggaatacattctaacggttccccttcaaggggcagcatggcagagggggctggggtggaaagtgggttgcaaaatctacgaagagttgcgatagggaagaaaccaggttgaggaagcagccagaatgtcaccctccttcctaaacatgtttttttctcctatgcagggccaccatctgtgcaagtagccaaaaccactccttttaacacgagggagcctgtgatgctggcctgctatgtgtggggcttctatccagcagaagtgactatcacgtggaggaagaacgggaagcttgtcatgcctcacagcagtgcgcacaagactgcccagcccaatggagactggacataccagaccctctcccatttagccttaaccccctcttacggggacacttacacctgtgtggtagagcacactggggctcctgagcccatccttcgggactggagtaagtgtatggcagatggatggaattagggtcaaagcagagaaaatgagatgtggatcgatacatggtacatggtagacagcgaagtgctgaaaatggggactgagtctggaggaacttacggggggcttaggaccagaatggggaaatgggataaagaaatggaaatatttaggttggtgcaaaagtaattgcagtttttgccattactttcagtggcaaaaaccgcaattacttttgcaccagtttaatatttagtctgtgctattgctgctctggtggtgtggctgatgttgctgcgtctatgtttgagggtgagaggggagcgtgcttgctttgaaatgaggctgtaaatttggcaatcatattttcagaaccccaaattgtaatacactattctagcctccttagatttcaactattctggtgccagaagcagatgggagctgaaggaatgatgaaggttgaag

SEQ ID NO: 35913 - DNA, 2300 bp, Homo sapien
tcaactgtatagttcacaatgggatagaagaatgaattgccgtttaaaatctgctttttcaggccaggcacgatggctcatgcctgtaatcctagcactttaggaggctgaggtgggtggatcacttgaggtcaggagttcaagaacagcctggccaacatgatgaaaccctgtctctaccaaaaaaaaaaaaaagacaaaaactaaccaggagtggtggcacatgactgtaaccccagctactcaagtggctgaggcatgagagtcatttgaacccaggaggcgaagattgcagtgagccgagattatcccactgtactccagcctaggcgacagagtgagactttcaaaaaaaaaacctgtgaaaaaaataaatacgcaaatacataaaatctgccttttcaagacacacacgtgaccaagaagcatatgaaaaaatgttcaacattactaatgattagaaaaatgcaaatcaaaatcataatgagataccgtctcacaccagtcagaatggctattattaaaaagtcaaaaaataacaaatgttggagaggttgcagagaaaacggaaggcttatacactgctggtgggaacataaattagttcagccattgaggaaagcagtttggcaatttctcaagaaccttaaaacagagctaccattcgtcccaggaatcccattattaggcatatacccaaaggagtatacattgttctaccataaggacacatgcacatgaatgctcactgcagcagtattcataatagcaaagacatggaatcagcctaaatgcccaccaacagtagactgtataaagaaaatgtggtacatatacaccatggaatactccacagacaaaaaaggacgagatcacgtcttttgcagcatcatggatggagctgggggctgttatcctaggcaaactaacacaggagcagaaaatgaaatactgcatgttctcacttttataagtgggagctaaacattgagtacacatggacacaaaaaagggaataatagacactgggccctacttgagggtggaggatgggaggagggagaggatcaaaacactacctatcagatactatacttattacctgggtgatgaaataaatttttacgccaaatcccgatgacacacaatttacctatataacaaacctgcatgtgtacccttgaacctaaaacaaaggttaaaataatttaaaataaataaaaaataaaatcttacttggtattctcaaaaaataaaaaacaaaatctgtcttttcaggggaagaaaagtaggaaagctttatctcattttcctagtggcttcataatgcagggacctgcccccagggaacagggtatagtaggggaaacacacaggggtgtttagagtttggcgaaaggcaggtgagctctgggcactgacccgtcaccagctatttttcaaggagtctgagaggtgttaacctgcggtctaccccgtgagattgctcagagtgtaggaggatatggtttactagctccggaaagcagctattataactgaggaggaaatgaagcttgactggctagaacagaagcaacaatggaggcccatggagggattttccaggcccctattcctgatctccatggtggcgctgcttcccttattctgcagtcttgctttgagaccagacaattctgtactctgtctgtgccttcttccttctcagcagccctgcctctgccacctgccccagaagggctctgggtcctctcatctcaggacagacaagggtttttgtaattatcttcttgggtaacctccctgtaaggaataggagaggttatctggtcctggtcttttgggagagcattgagaagaaaaagttaaaccagtgggcagcccaggctgcatacatcctgggaatattgcgattattctctccagtaatctacggaaatctactggttgttctgcagaaaaagaattaagagagacaaggagacctgttgtctaagactaaggcaggatgacgtttacctagtaactgatgatgctaggctgaggcactcagtgatttgtctctacatttgtccctgcctacctagccaatctgtccctgtttgggacactggactcccgtgagctggaaggaacagatttaatatctaggggctgggtatccccacatcactcatttggggggtcaagggacccgggcaatatagtattctgctcagtgtctggagatcatctacccaggctggggcttctgggacaggcgaggacccacggaccctggaagagctggtccaggg

SEQ ID NO: 35914 - DNA, 2300 bp, Homo sapien
gatgggagatcagaaggcaagagaaactgagaagcatcctgcttcagcctctaaacagtgtcggtggctggcaatagctggtagctattggctgtagctgtagcagcaggaagaatgggagactcaggactccagcctcctgagcagaagtaccttctcaaggattctagccttgaaggaggtggcacctttctagtagattggaactgactatgacagtgtctctcacaaggcaatgagtagatttacagattccagctcagggatgatggcagcttctgatttccagatagcaatctttttttaaaatgtacatttctaggactctccttttttttttttttttgtacttcttgcccttttaacacctttgtaaccaattctctatattaaattctttcagtctgaagcacataaagtagttaaatgctcctgactggatcctggataactggtatgaggtttggggtttgagcccatgcatgcttttgtccttgtttcacttcccactccttctgcacagtttacttgggtgatcttattcatggcctctgcttcgacatttgtgctgatgactctcaaatcagggtcttcagaccatacctggggtccatacccacacgcctcactgcgctcccatgcagtttcagctggctgttccactggcatttcaaattcaacatgtacaaaatcaagctctttctctctgtaaacctgctcccatggcattcttttctgcttcaattcagtccatccctgaccacccacccagccacccatgctggaaatctgagatatctttgactcctccaccttcccactcccacagctaatcagtagccaaaccctttagattctacttcctaattatcttgatattctatctcctccgcctcctcttattatgacttaattcaggctcttattatctgtcatttaaattattgctgtattgctacaggagtggtgtgtatatgtgcaactgttcatcttggtatgctatagactcttgcccagcagttttgcctcaattctttaaaagctccagttcattgtttgaaatatcaatcagaacattttttccaaaatgctaaaatgattgtcattccccagttttaatatctctatcatctgctaagtaaaagcaagctcctccttgtggcgtagcagggcccacgtgatctggcccttgccagaatttgtagcttatcacaacatccttctaccccccattacctcctattatacaggaacacccaagcgaccttcacaacattcatatcaactagtacacagggtctccaaagaggacctctggatgcctgtgatctttgtacttctgcctaccctttgccctggcgtgtttttctcttccttcatgttctgctggccaaattgtttttccttcaagtcttaggagcctgcctgattatgttcctcctattccgcatcctcataaaattactgcgacttccaaaacacttggcacattcttatttgaatacattacattgttgtgtaattatcccttggccccctcccccagcactagactctaagctctttgaaggcagactatgcctattcatctttgtatttctagccctgggcccaacacccagaatttcttgtattttcaatatatgtctgccaaatgaattagagctaatgcctgaaggagaataagtttttttgagaaagaggaagagccaggagggaggagaaggcagggtccgaagagccctgggggtttacttggggaagatgcggttccccattgcagcattctgccaggaggtggcactgctctgaagagccagctggtcgcttacagactgaggctgacagcttgaaaccaaagagggaactccaccaggaagcaacattcctccactgggcttcccagcccagttacatgccatactctgccctggtcaaacagccaagtcttcaggaggttactggccccaggcgtctccccagtgactgatgatgttaaaccctacgcttctctgattggtttagacaaaatgacaagggcacctattggaaatgatctggcaaaacatgatctaaggccaccctctcggggagggagttggggaagctgggttggctgggttggtagctcctacctactgtgtggcaagaaggtatgggtcatgaacagaaccaaggagctgcgctgctacagatgttaccacttctgtggctgctaccccactcctgggccgtccctgaaggtaagatggtactcctatttacttccatcctgaacctagggagcccactcagctttg

SEQ ID NO: 35915 - DNA, 2300 bp, Homo sapien
atcctaggccacagagcaagactccgtatcagggaaagaaaaaaacaacttcttgcaatgacacaaatgttcaataatctgtgctttcccatatgacagccactagtcacatgtggctattgagaacttaaaatgtggctagtgtattgagacactaaatttaaaattgtattaatttaaatccaaatagccatgtgtctagcaaataatttaggagactgttggtatagctcaggtgatagaattaggacagaagggtgagttgatggatagttaagaggcaaaattatgagtctgtaagggtgtgagaaaaggaaatcaagaacaggctcccagattacagactttgtggttaaacagccaccattactcaggacaacagaagagaaagagcaggtctagagtgtatagtgatttcatcaattttgaacatactggtgtctgagagttatcccagtgggaatatttagtagaaagtttagcttagagagctgtctgaactaaagattcagacttcagaggctttgagccatggagtcagattacctagagaagttgaacaaaattagaagcaaacaagaatcacagcaaatatcaacacataaaaaggggctaaggaagaaaaatctactgagactggagaggaacagttacacaaataggaaaagaaacaagtgagagtggtatagaagtcaagggtagagagaatgtcaggaaggaaacatgatcaaatgtcgaatgcctcagaggtcaaataaagtgagaactgtaaagtgcttcctgactttgccagttaggaggttcttggtgacatctgccagaaaagttttggtggtagcagcctgacagaggtagcttgaagagtggggatggggaaagagaatgtgacaaagaattgagatagtaaggataatttcaatttcaggtcttggctgtgcaaggaagccgagagacatgagtctctaagagggcacgatattgagagggttgttatctttctgtcagcggggaaaccaagagaaaagtttaaaaaggtcaaaagggggagaagggaagacagcttccgggtaacagagaaggttgaccaggtcaatagtaaaggatttcctcaaaccgaagggaggacctctagtgaaatgagaaaggaatacacaattgacccagtttgcaggtgggaaatgggaagccagttctgcaaattggcctttctgttctgtgaagtgccatctgtcggtgaggagagattagggtctgcagcgtgaaaatctggaccatactctgggtaatcaagggagaggttatcggctaatgacaaattaaaggcttactttttagctggcaactgaatcaccataacattttatgttaccagttccaaaattttggggggaattcactcaagcttgggagaggagagatcataactttaagagtataagaggtttaaacggtccactacgaaataaatagagaaggaaaagttatcagctggtaaatatcgtagaaggtagagcggtccagggactcacaggtctcactaaagaaaagtctagcgtaggttcacggcacggagagattttaaggctgcctaagactaaagccaaatacgaagtccacatctgcggtccgcaccttatctctccgcgcggcaggcgcgacgagggcgagaaactccctctccagtggtcgcaccacacgacaccagggaaggggcccctctctccagaccctcatatctccaggtccaggccccattttcctccgctgacagctcagcagcgtgcgcttccgctggattcaggccaggaccagcgaagccgcaccttacacccaccgaggaggaaacaagcctggccacccgaggctaccccgctaggccgcgggtagtgggggagggggcgctgaggcaggaggtcagcacccgggcgcgggctcccgccccacgaaaagcgcgcgctccaagccccgccgccggagatgcggttccggtccggacgcctgcgcactacggctctccccgcagcctctggccctccttccccctcccccagtcagggcgcacccttgcgcctgcgctgtgtgtgttcctggtctgcggcagccatgctgaactcgtatggagaggcgagtgggggggacagagtccaggactgcgggataggaagctggggatatggacaagcagcagcgttatagcgctctgggtttcgggacataggcctgggccatgcggcccccttggccccttggcgcgacccccaggaacgttcggaaagctggtcctcgtggctgggggaaag

SEQ ID NO: 35916 - DNA, 2300 bp, Homo sapien
aaaacaaacttgtgtacgtatctgggaaaaataatcaacgtaggtgaacaaatatacggtaagattccccctcgccccggaagggctcgtaagggcctaggtccttgagctgcaaccacgccaccctccctcctctgcagtagcccttcaactccaacctcggttactgcgtctaaaatggccgccaatctcctgtcttctgaccccccgagtagggcaaaccccgggagggcgggggaaaatgagcgtcaggagagcagagtccccttcccccagccagggatcaggccctggcccccaaaagtacaagcggccccgtttgggtggctgcagcatggagggcaatgacacagcaactttgcagaggccttttcccctccccctagcggcccaacctcccaaatctgcttttctccaccggggctctgcaggccaggacagaggcccatcagggggccggccatggaataaaaacttaggaggctgagaaaatactaggccttaggaaaagggcagccagacattgctctcgtttattccctgcattccggaaaatcactgcctcccgatcctctatcctcccttcccccacatgagtcaccagggaggctactgctactcagtaatttgggaaagtaactctttcctcctttccgttccctcccccgcagtacacaaggagagaactgttcaggactgggggaggggatgagggaggcgatggaagaggccaccctggagaaacccgaaaccttgggagctgtgaaatcattccaggtcccgagcctccctcgcatctcagaccatgctgtctagaccccctactgccagcacccaccttgggcctggtttctgttcctaagcagacctcaagctttcagcttgtaagcaccccagcctggagtagacacgtgctcagtaaagaccctacaggggcaaaaggccccacaggccgtgtccacgtgaatgcacacaaattcggtaagcgactcgaagcgtaacctccagcctgcggtgtgacgactggagctcccctaccgcggacacaaagggcgcacagcaatgctccctccagaggctctggggagaaaggaagttggcgcctgggaacaacctcagttcacaacatgggtggccaactcctaaagcattcacatccacgggtaggggccacagccaccactcctcagcccaccgccaggtcacccctccctcggccgccgatggatcccttctcacctggctcccggctgctgtacccccaggggacgaatggaatagggggggccacaccgccccctaacccctttgccctccaatgggtacggaggcatgaggctggccattcccctccccccccatggccctctcccgctcgccccccctccacgctcccattggctgtaaaaggtttgaaggacaaatcttcccactctcaggattctttcctgaaccccaagaatccccctcccggactccccaccattggttaagcacttgactgacatctccgccccacaagggccccttctcacctggatcctaaagccttccagggggcctccaaagttgccctcggcttggtacggggtatgtaatccggggtgtcaacccccccccagaaaacgaagccgtgctgggggagggggcgtagcccccagcccctcccttcccgaacgggctgggggggtggggagagcatcggggccgcgcggccacgtcagcagcacccagattggctgaccggggtcacgtgcccgcttcccccccaccccccgcctttcccccagccacgaggaccagctttccgaacgttcctgggggtcgcgccaaggggccaagggggccgcatggcccaggcctatgtcccgaaacccagagcgctataacgctgctgcttgtccatatccccagcttcctatcccgcagtcctggactctgtcccccccactcgcctctccatacgagttcagcatggctgccgcagaccaggaacacacacagcgcaggcgcaagggtgcgccctgactgggggagggggaaggagggccagaggctgcggggagagccgtagtgcgcaggcgtccggaccggaaccgcatctccggcggcggggcttggagcgcgcgcttttcgtggggcgggagcccgcgcccgggtgctgacctcctgcctcagcgccccctcccccactacccgcggcctagcggggtagcctcgggtggccaggcttgtttcctcctcggtgggtgtaaggtgcggcttcgctggtcctggcctgaatccagcggaagcgcacg

SEQ ID NO: 35917 - DNA, 2300 bp, Homo sapien
gctggtcctcgtggctgggggaaaggcggggggtgggggggaagcgggcacgtgaccccggtcagccaatctgggtgctgctgacgtggccgcgcggccccgatgctctccccacccccccagcccgttcgggaagggaggggctgggggctacgccccctcccccagcacggcttcgttttctgggggggggttgacaccccggattacataccccgtaccaagccgagggcaactttggaggccccctggaaggctttaggatccaggtgagaaggggcccttgtggggcggagatgtcagtcaagtgcttaaccaatggtggggagtccgggagggggattcttggggttcaggaaagaatcctgagagtgggaagatttgtccttcaaaccttttacagccaatgggagcgtggagggggggcgagcgggagagggccatggggggggaggggaatggccagcctcatgcctccgtacccattggagggcaaaggggttagggggcggtgtggccccccctattccattcgtcccctgggggtacagcagccgggagccaggtgagaagggatccatcggcggccgagggaggggtgacctggcggtgggctgaggagtggtggctgtggcccctacccgtggatgtgaatgctttaggagttggccacccatgttgtgaactgaggttgttcccaggcgccaacttcctttctccccagagcctctggagggagcattgctgtgcgccctttgtgtccgcggtaggggagctccagtcgtcacaccgcaggctggaggttacgcttcgagtcgcttaccgaatttgtgtgcattcacgtggacacggcctgtggggccttttgcccctgtagggtctttactgagcacgtgtctactccaggctggggtgcttacaagctgaaagcttgaggtctgcttaggaacagaaaccaggcccaaggtgggtgctggcagtagggggtctagacagcatggtctgagatgcgagggaggctcgggacctggaatgatttcacagctcccaaggtttcgggtttctccagggtggcctcttccatcgcctccctcatcccctcccccagtcctgaacagttctctccttgtgtactgcgggggagggaacggaaaggaggaaagagttactttcccaaattactgagtagcagtagcctccctggtgactcatgtgggggaagggaggatagaggatcgggaggcagtgattttccggaatgcagggaataaacgagagcaatgtctggctgcccttttcctaaggcctagtattttctcagcctcctaagtttttattccatggccggccccctgatgggcctctgtcctggcctgcagagccccggtggagaaaagcagatttgggaggttgggccgctagggggaggggaaaaggcctctgcaaagttgctgtgtcattgccctccatgctgcagccacccaaacggggccgcttgtacttttgggggccagggcctgatccctggctgggggaaggggactctgctctcctgacgctcattttcccccgccctcccggggtttgccctactcggggggtcagaagacaggagattggcggccattttagacgcagtaaccgaggttggagttgaagggctactgcagaggagggagggtggcgtggttgcagctcaaggacctaggcccttacgagcccttccggggcgagggggaatcttaccgtatatttgttcacctacgttgattatttttcccagatacgtacacaagtttgttttctccctggtagcgaagaaaggggaaacgggggaggggacgccccaccaaagcccaggttttctcgggtgggggagatcctttcactctcttgtaagggggcggggacggccccagagatgctctggagatcctgactctgggctctggttgattcacagagtctgcacccttatttagataaccaagttaggaggaagacttaagagtaagttggggggagggggcgaaactgagctcccaaaatggctcctgcccctcctcggaggcggacggccggggggaggggaggaggggaggagggggagggctagtctgagccgcagccgccgcctcctccgctcgccctcctccctggcgctgaccgatggaccagccgctccgtggggaggactccggaccctggtgggggggcgggggggttctttcgcccccgtggcggagggcccctgagaggcggatacgggtgtgcctttgggggtgatgtggcgtgtgggg

SEQ ID NO: 35918 - DNA, 2300 bp, Homo sapien
gtttttattccatggccggccccctgatgggcctctgtcctggcctgcagagccccggtggagaaaagcagatttgggaggttgggccgctagggggaggggaaaaggcctctgcaaagttgctgtgtcattgccctccatgctgcagccacccaaacggggccgcttgtacttttgggggccagggcctgatccctggctgggggaaggggactctgctctcctgacgctcattttcccccgccctcccggggtttgccctactcggggggtcagaagacaggagattggcggccattttagacgcagtaaccgaggttggagttgaagggctactgcagaggagggagggtggcgtggttgcagctcaaggacctaggcccttacgagcccttccggggcgagggggaatcttaccgtatatttgttcacctacgttgattatttttcccagatacgtacacaagtttgttttctccctggtagcgaagaaaggggaaacgggggaggggacgccccaccaaagcccaggttttctcgggtgggggagatcctttcactctcttgtaagggggcggggacggccccagagatgctctggagatcctgactctgggctctggttgattcacagagtctgcacccttatttagataaccaagttaggaggaagacttaagagtaagttggggggagggggcgaaactgagctcccaaaatggctcctgcccctcctcggaggcggacggccggggggaggggaggaggggaggagggggagggctagtctgagccgcagccgccgcctcctccgctcgccctcctccctggcgctgaccgatggaccagccgctccgtggggaggactccggaccctggtgggggggcgggggggttctttcgcccccgtggcggagggcccctgagaggcggatacgggtgtgcctttgggggtgatgtggcgtgtggggggaaaggtccgagctcgcctggagggggagggtttttcccttaagtcatccctcccaggacttgctttttctgctctgagccggacgccggaatggagtttgaggaagaggtgaggtgtgttgcattgtatagggtagatggatgcgtttggagattttaatcccacttttagggttgccgaggatttttcgaacgagcagaaatgtattggtaactgtaggtgtgagtggggagggattagaaaggtgcttggacgtgcaaatttgggagacgtattttagcttttgtggtctttgggactaaacagtagtaaataatgttttgctcgtctttccatcgtttggcttgagggagggagtggagtattataagactctggcaacactgttttagactgtggggcatgggaacgttagatcccctcatcgccgttctgaagcccgtagctgttcgccatagaggagcaggccgcggcttctaagatggcgtctttttcctcgtttcagattcttcgctgctgctgccttaccgccgagaaccaccacccgccaggcgtcttgcggccacacccctggcgggttcaggcaggctacgcccacgcgacccctcccgtttccctgctttggccaatggaggagctacgaatggcacgacctgctcgagcttggcagtctccagttgggctgtgcatggaagcttgggaagactttgttggaaggggaggcggggagagagtgctggaggctctggggcgatggcttccgcacctcttccaaccaccctctttccctggagtcggcggaccacagctcagccaattggcttggagatgtggcgggttgccacttccctgtgggtctctgcggcactcttctgcctggtgactgacaccttggaaatgaagtttatgacgtcatcgttgcggctggccaatagaaaaagctcccgcggagaggtgttccttccccttcgactcagcttcttcacccgcgtgagcgagcgcgcgcgcgcggagggggtggggaaaagctcaagcagggtggcgcgcatgagcggcgaagctcctcctccccgcctatatataaagggctggcgcggggctcggcggcgccatttcgtgctggagtggagcagcctctagaacgagctggaggattctgcctaccgatacagagccttcgagtcgtccggggccgccattacaatccacctccatccgcttggaaatggccttcgtcccggcctatgactggtcccagcgggcagtacagaccccctagaagcccctggagctcccctttttcgggccccgcccaatcctcggagtc

SEQ ID NO: 35919 - DNA, 2300 bp, Homo sapien
cgccccaccaaagcccaggttttctcgggtgggggagatcctttcactctcttgtaagggggcggggacggccccagagatgctctggagatcctgactctgggctctggttgattcacagagtctgcacccttatttagataaccaagttaggaggaagacttaagagtaagttggggggagggggcgaaactgagctcccaaaatggctcctgcccctcctcggaggcggacggccggggggaggggaggaggggaggagggggagggctagtctgagccgcagccgccgcctcctccgctcgccctcctccctggcgctgaccgatggaccagccgctccgtggggaggactccggaccctggtgggggggcgggggggttctttcgcccccgtggcggagggcccctgagaggcggatacgggtgtgcctttgggggtgatgtggcgtgtggggggaaaggtccgagctcgcctggagggggagggtttttcccttaagtcatccctcccaggacttgctttttctgctctgagccggacgccggaatggagtttgaggaagaggtgaggtgtgttgcattgtatagggtagatggatgcgtttggagattttaatcccacttttagggttgccgaggatttttcgaacgagcagaaatgtattggtaactgtaggtgtgagtggggagggattagaaaggtgcttggacgtgcaaatttgggagacgtattttagcttttgtggtctttgggactaaacagtagtaaataatgttttgctcgtctttccatcgtttggcttgagggagggagtggagtattataagactctggcaacactgttttagactgtggggcatgggaacgttagatcccctcatcgccgttctgaagcccgtagctgttcgccatagaggagcaggccgcggcttctaagatggcgtctttttcctcgtttcagattcttcgctgctgctgccttaccgccgagaaccaccacccgccaggcgtcttgcggccacacccctggcgggttcaggcaggctacgcccacgcgacccctcccgtttccctgctttggccaatggaggagctacgaatggcacgacctgctcgagcttggcagtctccagttgggctgtgcatggaagcttgggaagactttgttggaaggggaggcggggagagagtgctggaggctctggggcgatggcttccgcacctcttccaaccaccctctttccctggagtcggcggaccacagctcagccaattggcttggagatgtggcgggttgccacttccctgtgggtctctgcggcactcttctgcctggtgactgacaccttggaaatgaagtttatgacgtcatcgttgcggctggccaatagaaaaagctcccgcggagaggtgttccttccccttcgactcagcttcttcacccgcgtgagcgagcgcgcgcgcgcggagggggtggggaaaagctcaagcagggtggcgcgcatgagcggcgaagctcctcctccccgcctatatataaagggctggcgcggggctcggcggcgccatttcgtgctggagtggagcagcctctagaacgagctggaggattctgcctaccgatacagagccttcgagtcgtccggggccgccattacaatccacctccatccgcttggaaatggccttcgtcccggcctatgactggtcccagcgggcagtacagaccccctagaagcccctggagctcccctttttcgggccccgcccaatcctcggagtctgtccaccccctctactccgccctcaagaggatttcaaagatggaggcggcggctccctaaaccacttttcgtgttcatccgcctccatccgagatcgaaacgggacctcgtcggccccgtaggggcccgacaagaagagggaatccctgcagaccaacagcgggctatattgacgacggtgtctgagatcggggaccgtcttttgaagagtcagtccctccttagttgcccgcctcagctgaggccgccgccattttcttgctgtccgccgtctgcagagcgcgccaagctgcccggagctctccgagaggccccaaagagactgctttcgtgccggccaggcagggggtttgtcgcctggaggcccaagaggaacggcctccccccaacttagcgggttatgctggaccgggcggtgaggggaaccgaggccacccggactttccgcggctgagggcagcgccggttccttgcggtcaagatgctgcaaaacgtgactccccacaataagt

SEQ ID NO: 35920 - DNA, 2300 bp, Homo sapien
tccggaccctggtgggggggcgggggggttctttcgcccccgtggcggagggcccctgagaggcggatacgggtgtgcctttgggggtgatgtggcgtgtggggggaaaggtccgagctcgcctggagggggagggtttttcccttaagtcatccctcccaggacttgctttttctgctctgagccggacgccggaatggagtttgaggaagaggtgaggtgtgttgcattgtatagggtagatggatgcgtttggagattttaatcccacttttagggttgccgaggatttttcgaacgagcagaaatgtattggtaactgtaggtgtgagtggggagggattagaaaggtgcttggacgtgcaaatttgggagacgtattttagcttttgtggtctttgggactaaacagtagtaaataatgttttgctcgtctttccatcgtttggcttgagggagggagtggagtattataagactctggcaacactgttttagactgtggggcatgggaacgttagatcccctcatcgccgttctgaagcccgtagctgttcgccatagaggagcaggccgcggcttctaagatggcgtctttttcctcgtttcagattcttcgctgctgctgccttaccgccgagaaccaccacccgccaggcgtcttgcggccacacccctggcgggttcaggcaggctacgcccacgcgacccctcccgtttccctgctttggccaatggaggagctacgaatggcacgacctgctcgagcttggcagtctccagttgggctgtgcatggaagcttgggaagactttgttggaaggggaggcggggagagagtgctggaggctctggggcgatggcttccgcacctcttccaaccaccctctttccctggagtcggcggaccacagctcagccaattggcttggagatgtggcgggttgccacttccctgtgggtctctgcggcactcttctgcctggtgactgacaccttggaaatgaagtttatgacgtcatcgttgcggctggccaatagaaaaagctcccgcggagaggtgttccttccccttcgactcagcttcttcacccgcgtgagcgagcgcgcgcgcgcggagggggtggggaaaagctcaagcagggtggcgcgcatgagcggcgaagctcctcctccccgcctatatataaagggctggcgcggggctcggcggcgccatttcgtgctggagtggagcagcctctagaacgagctggaggattctgcctaccgatacagagccttcgagtcgtccggggccgccattacaatccacctccatccgcttggaaatggccttcgtcccggcctatgactggtcccagcgggcagtacagaccccctagaagcccctggagctcccctttttcgggccccgcccaatcctcggagtctgtccaccccctctactccgccctcaagaggatttcaaagatggaggcggcggctccctaaaccacttttcgtgttcatccgcctccatccgagatcgaaacgggacctcgtcggccccgtaggggcccgacaagaagagggaatccctgcagaccaacagcgggctatattgacgacggtgtctgagatcggggaccgtcttttgaagagtcagtccctccttagttgcccgcctcagctgaggccgccgccattttcttgctgtccgccgtctgcagagcgcgccaagctgcccggagctctccgagaggccccaaagagactgctttcgtgccggccaggcagggggtttgtcgcctggaggcccaagaggaacggcctccccccaacttagcgggttatgctggaccgggcggtgaggggaaccgaggccacccggactttccgcggctgagggcagcgccggttccttgcggtcaagatgctgcaaaacgtgactccccacaataagtacgtttccgcgagccgcgtgtgggaaggggatgttgcagggcggcggcacaggggtgtggggcgccgtgttgggagtactgagcggccccggcgcgctgctgttgcggcgcagctgtcgactcggtcgcgcggagggaattgagcgacggttttggaacggtggtggcggctcggctactgctcgtggaggggaatacaggttgtcaatttatacgctattaatgccgccgtggcccagtcttaaccgagtcaggcagagctagtttgacggtggagtggagtgaggttgaacagcaggtttggcgtttggtgggtctggtatctagcggcggtctgttagccttttagggggg

SEQ ID NO: 35921 - DNA, 2300 bp, Homo sapien
agtacaaaggaagagtaaaaacaaaagagtagaaaaagatacagtgaacaaatacccaaagacagctgtagaacttattactatcagacaagacagagtaggacagaaagattctcaggacaaattgggaaaaggctcagttcaccaagactgtaataattcccaagagtaaacaccttaataacctaaatgcagagagggcaaaagttgatttaaaaattagaaacaagttgaaaaacctacagtcacagttagagatttaaatataccattcataggccaggaattgtggggcatgcctatagtcccagctactctgggaggctgaggcaggaggatcgcttaagcccagctgtttgaggctgcagcgagccatgattacttcactgccctccagcctgagcaacagagcaaggccctgtctctaaaaaataaataaataaatgcaccactcttagttatgtataggccagtccaaagataaagaaaaccgtaataaattagaatgacaaaatccacatgcttgatccaataaacatgtacatgtataaaattctgcatcacatttattagagcccatgtgaaatatttacagaagttcaccacactccaagccatagaggattatcatgtaattaaattataagttaataacaaaaaacatactttaaaaaatctatgtatgttttcaaataaaaaaaacacccgatactcgactgttattaaccaaagaagcaacattctttatcatgagtttttcatggctttcccgtctttcatctcatggctccagctcccacctcacttggggggaggtgaaggtggcaagggtcctaaccagggcaggaccaaagcagtgaagacactgttcattcatgcgcaggtgtctcctaggcgcctatgatgtgctaggcattacgtagacactgtggactagaaacgaaaaaactaagattagggctccccataaaccgggccatgcaaatcaattactagctgtcatttgattaatttgaagtcagaagctgtgtctgccccacttaaaataggcatcccttattcattgaggaaagagcattggagcaggttttaccagtccacagactacccgagaaccacctggggagcatgctgaaaacacaggttccctggccctgccttggaaaggctaatctaacccattaagtaaagaggaaactcaggaacacgtattataacgaaccccccaggtgattctcatttggaaccagagacccgcatgatttcctagctccctccaagttgaaaatcatcgatttcatggtctttgacacatggcctaatttggttagatttctctttacacagacgttagctttacgttgttgttgttttgttttgttttgttttttaaatatatatactggactaaattctcccagtgcctcttattagccgagcccaaccagaagccaaaggcaagggtgatgccgtcctccagcctgtgtcagcctggaggaggtgcccgggtcctggagggaccaacagagaggaccagcacctctgccctcctcggggagtccacgggagctctttacactttgctttagaccaaacaactccaacaattacacattttttcttacacaatgaaattaaataataataaaagaaaaataaaataacatttttgaaagtgatttaaagttttaagaggtttttattccattgtgtagccaatgttttccttttaaagattattggtaaagtttattttactttctaactcaaaatttgtccacggaaacttcttgggaaagtaggattccctgcatcgcagatggacatagagagaggatttgttggagctcagctgcgcggtgctctgacggccttttctctctcttcagggggtcccttcttggaggacgtggtaatagttggtccaagcccctcccatcctccaaaacttcctctggcctctcctgggggcccagtgaatccttccaccttctcaccccggctctttccctctttacccagcaacagatacattcactcagagaatttctgtgattggctgaagacagcaggggtcgcccccatcctcgaatctgttttcttcttctttacctccgccttgttcctgtcctcaccacacggactgagactgatttgattaaagcaccagagtgtaatggccctcagagcagggctggtcctggggttccacaccctgatgaccctcctgagcccgcaggaggcaggggccaccaagggtgagtgcgagggcgaggagggtgcggcggggagcagagatt

SEQ ID NO: 35922 - DNA, 2300 bp, Homo sapien
ttctgctggcccatctacagggattatcatttccccaattctgccacacctcacacacccacaggacatggtctgttgtggaaaaagtgctatcttagtgtgtaaaaggtcattcagtggcatgacttagagggattagagtacccatctcagaactcaaatgaggtctgagtctgtctgtcttgcctttgtccaagggtgtgtttaagattagcacccattcatatttactttctcccagaggtctgtgagtcctgcgatgtgcaggagttaccaggttcttccacaggactgtcatcagggtcaggagggctcagtctagggaccttacactgggagcgtggacacaccacctaccctaccatgtaaatatgcagctttaacgacactgcctctcttggacttcgattccttgtcttcaatatggggatgatataacctgccttatagcaaagctcttaagatcaaatgagatcaataggtctgaaattgctttggaaaaataaagtccatagagaatataaattgactggtaaataaggaagaaagtgaaaaaaaatcatcaaagaccccacctccttcaaagcatctgattctattttgtttagagtgaatatttttacaaactttcaaagaacattacttcttactttagacacttataaatgtgatcctgttggaccaccaattctaatttcaaaaaaaatcaaattggcatcatttctttaaatcaatattaaaatgtaaatagaaggctagcatgtaaaatgcaagagaagaaaataattatgtagtagaaggtgtctagtaggattaaggggccaggagaggattgtggagaaaaactcagtttttttagtaactgcctgggtgggacttttctccttgtcatttacctgccatagataattagacaaatacttcctcgatgtctcaggtaatttatttttacagtagacattaataatacctccctcaggtttaatatgaggtttaaatgaggtaatgcatgcaaagcactaataacagaatctctcatgtcctaatctgttagtaattattatttatgcaaggtaaggctaccacaaataagataaaatattaacgtaatatatgtacttcatcattacattaaatagtaaatgttttgtgaccttctctatgagtatcaaataaatagctcaaaattgaaatatttaaaatgagactagaaaagtatttcttaaatatggtaaagagaatataaaataaaaaattaacattacctgtaacagaaaaacattagagaaacccttcttaaaaacaagatcaaaatatgggcgcacattgttaccacaggtaatgctgtcctgggtattcttatatgaaaatgaaataacaagactagtaatttaaagataaaaatgttattacactgtttaaataccaggaaaaatcaaatactaagaaatctgaaaaataaaaattatctagaaatttcactaacaaaggtaaccaggaatagataaacaattaaagatcaacttcattcaagttaattaaaacctctaaatagaaattataacacttctgcagaaatgattaaataaaaaggaggtatctcagggaggtggacctgaaagaaagattaattatatattttattagatagcacattcattcttaattatcagcagaatatttttgtaaaatattgacaacataacataaaacatgatttaaaatatagtgaccaaaaaacatcaaagatcatctgactgtctgggatgggggtggggctcgggagaaggaacataatggaaaacatttgccgtcagaagaaggtgtaacttatctttttacatctctttctctaactctgaaaatgaactgtgaactggagctctcttgaccacgctggtacctaaaattctcccatctcttccccagcaccttccagcgtcctctttacccagcaacagagaatgtcagctctatgatttctctgataggtgaatcccagccatgctgattcctctccacccatttccagtgctagaggcccacagtttcagtctcatctgcctccactcggcctcagttcctcatcactgttcctgtgctcacagtcatcaattatagaccccacaacatgcgccctgaagacagaatgttccatatcagagctgtgatcttgagagccctctccttggctttcctgctgagtctccgaggagctggggccatcaagggtgagtgctcaggaggacgcaggagcgtcggggtgagtgatggggtggttcacatcaattgctgcttca

SEQ ID NO: 35923 - DNA, 2300 bp, Homo sapien
ttacaccttcttctgacggcaaatgttttccattatgttccttctcccgagccccacccccatcccagacagtcagatgatctttgatgttttttggtcactatattttaaatcatgttttatgttatgttgtcaatattttacaaaaatattctgctgataattaagaatgaatgtgctatctaataaaatatataattaatctttctttcaggtccacctccctgagatacctcctttttatttaatcatttctgcagaagtgttataatttctatttagaggttttaattaacttgaatgaagttgatctttaattgtttatctattcctggttacctttgttagtgaaatttctagataatttttatttttcagatttcttagtatttgatttttcctggtatttaaacagtgtaataacatttttatctttaaattactagtcttgttatttcattttcatataagaatacccaggacagcattacctgtggtaacaatgtgcgcccatattttgatcttgtttttaagaagggtttctctaatgtttttctgttacaggtaatgttaattttttattttatattctctttaccatatttaagaaatacttttctagtctcattttaaatatttcaattttgagctatttatttgatactcatagagaaggtcacaaaacatttactatttaatgtaatgatgaagtacatatattacgttaatattttatcttatttgtggtagccttaccttgcataaataataattactaacagattaggacatgagagattctgttattagtgctttgcatgcattacctcatttaaacctcatattaaacctgagggaggtattattaatgtctactgtaaaaataaattacctgagacatcgaggaagtatttgtctaattatctatggcaggtaaatgacaaggagaaaagtcccacccaggcagttactaaaaaaactgagtttttctccacaatcctctcctggccccttaatcctactagacaccttctactacataattattttcttctcttgcattttacatgctagccttctatttacattttaatattgatttaaagaaatgatgccaatttgattttttttgaaattagaattggtggtccaacaggatcacatttataagtgtctaaagtaagaagtaatgttctttgaaagtttgtaaaaatattcactctaaacaaaatagaatcagatgctttgaaggaggtggggtctttgatgattttttttcactttcttccttatttaccagtcaatttatattctctatggactttatttttccaaagcaatttcagacctattgatctcatttgatcttaagagctttgctataaggcaggttatatcatccccatattgaagacaaggaatcgaagtccaagagaggcagtgtcgttaaagctgcatatttacatggtagggtaggtggtgtgtccacgctcccagtgtaaggtccctagactgagccctcctgaccctgatgacagtcctgtggaagaacctggtaactcctgcacatcgcaggactcacagacctctgggagaaagtaaatatgaatgggtgctaatcttaaacacacccttggacaaaggcaagacagacagactcagacctcatttgagttctgagatgggtactctaatccctctaagtcatgccactgaatgaccttttacacactaagatagcactttttccacaacagaccatgtcctgtgggtgtgtgaggtgtggcagaattggggaaatgataatccctgtagatgggccagcagaatatttgagatcaccttcagagcaaagaaaacgcataatctccccaaacatcatgacttatctgactggttaaaatgagtatcactgtctttcctccgtcatcttaagtgcatcacaggctttatattttcagacctttcatactaactttctgcctagtgagcaatgactcatacaaagctcagtgtccattggttcttttctcagactctgtccaatcccagggtcacagaagactacttgggttcatggtctctaatatttcaaacaggagctccctttagcgagtccttcttttcctgactgcagctcttttcattttgccatccttttccagctccatgatggttctgcaggtttctgcggccccccggacagtggctctgacggcgttactgatggtgctgctcacatctgtggtccagggcagggccactccaggtaagagccgaactgccattcttggagggtc

SEQ ID NO: 35924 - DNA, 2300 bp, Homo sapien
atggcctcatttctgacccagttcaaatacatttcaccaaggcaaggattcctgtttgttctagttgccttctctaatgcccagaaaacatttgctcaattacttctagatttgggtggacatccaccctggaattgtcactacttctttcctcccccttccacctctcccttgcctctgtgttttccctgttctaactcatgccttgattgcaatttccctgacaaataatagcagtttcctacctcatctccctgcctctggtccctcctctagccagcacccttagtagtcttctgaagacacatctccaaccttctctttttcatttttcaaaaatcttcagtgttctgacaatacttatctggctacatgggaacctctagggagctgattacaagcagagatccccagacctccccacccagggaatctgagtctgggggcactgagtctggagatctgtgcatcacagaggatctccagaagagtcttcagaggagtgaggttggggacctgcgggcctggaggagaaacccacactccttaggctggcatcagggctgtctgcaatctggcagttgattactgtgaaagaaaatgctgccatgtcactgattggtgcctctacaaagtcttagtaacagtttttgccaattgcgttatttttatttgaacacctctctcaaccaattacctcagcaactttcctaagctcatgtcactcacctcatccccacccagtgtgtccaccttctcactcatagcaggtgaacttcctttcactttccaggaacaagaaaatcaaaggtgtgatctccccagcttcctcctcctcctcccttcatttttttcctctttctagaaaaaaggtccagggctcaatcccacatcctgatactactccctcaagtccctcaggttggtgcaccaggctccccaccccacaagttcacaggaggaagccaaagctccaaggccttcctgtcccatccttgagaaatcctcttactgcacacacctcacctctctccatccctttacacccagacttcctgaaggaaaaagacgaatgaactgagacactgccctgtgacagccgtggggaacccaagacaagtaaaatccatctcagccccgaggaggatgcgccacactcagcctcatgcaccccctcccattccagctcctgccgctgcggccaacctgctctccccaggtctccctggtttccaaacccactttccatcttctgttttctgaccttcccaagtcactggcaccgctgtccactgtgctgctgaggtcacctcccctcagcttccaagactcttctctgcgggcctctcctcacactgcacttgggtttttttggtctctttcacaggcttttctgtcttggccaaatcacaactgtccagttcccaggatccggtcctttgctcttccccctgggtcccctctccctggatggtctcatgtatctcagtctcctccccggctgcagacccttctgtctacctgcccatcagaccacccatctgcccctcaagcacctcaaacccagctacctccctgtaggtttcttctctgtgtggcctgctgtgccatctccacctccatctccacaccatacccttgtgcgctgtcctgtggcttccttttttcaccccacatgcagtcagctgccaggcctgatgaagtcccgggggtctctctgctctcgtcctcctcactccatgctcagcccagtccaggtccccgcgctcgctcccctgacaagctccagatgggctccccccatgaatccccaacccaaagtcccctttccgcccggcactaaggtcccttaggccaacccggctgctcctgcgccctgggcacgggcccgcggggctgccctgggaccgccggcccaaagccctcactcacctcggcgctgcagggtcatgggcccgcccagctcgtagttgtgtctgcacatcctgtccggcactgcccgcttctcctccaggatgtccttctggctgttccagtactccgcagcaggccgccccagctccgtcaccgcccggaactcccccacgtcgctgtcgaagcgcgcgaactcctcccggttgtagatgtatctctccaggaagcgctgtgtcccattaaacgcgtagcattcctgccgtccctggaaaaggtaattctctgcggggagggggcggacatgagcggaggcgccactctcatctaatcctctttctccctctctctctcaatattaacgattcttcccaaatcttcccacccag

SEQ ID NO: 35925 - DNA, 2300 bp, Homo sapien
actcgttgattgatgggcatttgggttggttccatgatttgtgattgtgaattgtgctgctataaacacgtatgtgcaaatatctttttcatataatgacttattttcctctgggtagatgcccagtagtgggattgttggatcaaattatagttccacttttagttctttaaggaatctcctcactgttttccacagtggctgtactagtttacattcccaccagcagggtagaagagttccctgatcaccacatccacaccaatatctactgtttttttatttttttatcatggccattcttgcaggagtaaggtggtatcacattgtggttttgatttgcatttccctgatcattagtgatgttgagcattttcttatgtttcttggccatttgtatatcttcttttgagaattgtctatgcatgtccttagcccactttttgatggggttgtttgttttttcttactgatttgcctgtgttcattgtagattctggatattagtcctttgtcagatgtatagattgtgactactctgtgggttgtctgtttattctgctgatggttccttttgccgtgcaaaagctctttagtttaattaagtctcaactatttatctttgtttttattgaatttgcttttgggttcttggccatgaaatccctgcctaagccaatgtctagaagggtttttccaatgtgatcttctagagcttttatagtctcaggtctcaggtttaagtccttaatccatcttgagttgatttttgtataaggtgagagatgaggacccggtttcattctcctacatgtggatagccaattatcccagcaccatttgttgaaaagggtgtctttccccaccatatgtttttgttcgctttgtcgaagatcagttggctgtaagtatttgggtttatccctgggttctctattctgttccctttgtctatgtgcctatttttataccagtaccatgctgtcttggtgactatggcagggaacgtgagctttttccccgcaatcctatactggccccttctactgcataattattttcttctcttgaattttacatgctagtcttctatttacattttaacatttatataaacaaatgatgccacttttacattttctttattagattaggaggtcgtacaggatcacatttataggtctttaaattaaggagtaatattctttgaaagtttatgaaactattcagtataaacaccacagaatcagatgttttggaaaatgtagggtcttttatgacattttttcatttcttcctcattcactgtataatttttagtctcatttttccaaagcaattacagatccgttgatctaatttgaccttaagagccctgctgtaaaggcaggtcatatcatccccatactgaagacaaagaactgaagtccaagacaggcagtgtccttcaagctgcatacttccatggtagtgtaggtggtgtgtccatgctcccaggtgtaaggcccctagactgagccctgctgaccctgatgacagtcctatggaaggagccagtatcccccgcacatctcaggactcacagacatgtgggaggaagaaaatatgaatgtgcactaatctgaagcacggccttgaacaaaggcaaaacagactccaggcctcattttcagttctgggatggatactctaatctctctaaatcatgccactgaatgaccttttacacattgagatagcatttcttccacaccaggccatgtcctgtgggtgtgtgaggtgtggcagaattggggaaatgataatccctgtaggtgggccagcagaatatctgagatcaccttcagagcaaagaaaacacatcatctccccaaaactcatgactctgactggttaaaatgagtgtcagtgttctccatctgtcctcgtaacagcatcactggctctatattgtcagatctttaatactaactttctgcccagtgagcaatgactcatacaaagctcagtgcccattggttcttttctcagagtctgtccaatcctagggtcacagaagactgcttgggttcatggtctctaatatttcagacaggagctccctttaatgagttcttgttttcctgactgcagctctcttcattctgccaaccttttccaactccatgatgatcctgcaggtttcagggggcccctggacagtggctctgacagcattactgatggtgctgctcatatctgtggtccagagcagggccactccaggtaagagcagagctgctattcctggagggtctggc

SEQ ID NO: 35926 - DNA, 2300 bp, Homo sapien
aggctggacagtggaggagggcaggagttgagtttctggaatcctctaagtgattatctggaagccatgggaaatgctggatgggcagaacctggggcaaggggcagaaacgctggagaaagcctctggctgggagggtcccatggctttcttggaagagaacctggaccttctctccttgacctcagttccggtttggcagtggtgggggtgacaagggccctgtggtggcggcccaggaggctcaggcccaggcgatcctgcagcaggcgagggtgagtggggctgcttccctggaaagggaaggctctggggggcactggaagggttggctggagtgagtgtgcggcaggggaggcctgggttggtttggggttaacagggaggttggggagaatcctgggcagtggatgaggatcaggagaggaagggtgaatttggagagtgctggggctgggggttcccactgcctgtccctcagctctgctgtccccctgctcccctagctggcgctccgtggaccccctggccccatgggatacacagggcgccctggacccttggtgagtgagcagggtgctcgggtggaggatgctttaattgtgtgtggggtgtggatagttctggaaaggggcttcttttggggaacactccgaggccactgttggctgtgtccttccttacggccatcctctcttctctctcccagggccaacctgggagccctggcctgaaaggagagtctggagacttaggacctcaggtgaccactttcctccactgcacccccatatctgttcaccagctcagtctccctcactcccctccctatgcctcctaaccccaccccatctctcctctcaccagggccccagaggacctcagggcctcacaggccctcctggcaaggctgggcgaagggtgagtgccccaggggtggatgggtgttgtggggagacagggcctgcagggtaggggactgcggccctgcttgttctgacacttcccttgttctcccagggccgggcaggtgctgatggagcccgagggatgcctggagatcctggagtgaaggtaacaggcttgggcccctccctgaagcctgtagccttcagcccacgctgggctcagttgtttcttggggatgacctagttctccaggcttccccaggatcagcacccccccagctcagggtgcagtagggaggggtgggcttggacagggtcgtgtcctcactctggctatccttcctcctcctagggtgaccgaggttttgatggactcccagggctccctggagagaagggccatagggtgagtacattagtgggtgtgtgttgtaattggggatagatcttctatgggagtgaggataggtagggaagggaggctggaggcttggcaggagctcagtgaaagtaatggatgggctaagtgcagaggttcggtgtctgcctgtgttgggggctctgaagcccctcttatgagttcccccattttgcagggtgatactggtgcccagggccttcctggtccccctggtgaggatggagagagggtaagtgtagtggcaaatgtaggggctgggtgcaggggaggtctagaaggcacagcagctttaccgtgtcctcctcctccagggagatgacggggagattgggcctcgagggctgcctggagagtcggtgagtgtccaagggctggtgctgggggagggggctctggggaagccaggagggggacatgagcactaaagggacacagttttatccattcatgccgtctcctcccctcaccgtgaatgcagggacctcgaggtctccttggccccaaaggcccacctggtattcctggaccccctgtaagtgactccctgacttctgaccctgaggtgaccccttgacctctccaactctccacctttctagctgccttcctgctccctctcctctctcggcatgcttcccattccctgtgagctccccctgctctggccccacactgccctgcctcagcattcgctccccgtgcacagggagggccatgtggcgtggtgccctgagggctctgggcataggaaataaatcttcaagaaaaacaaaaccaaagcccacaagcccacagatccacagtcccacacactgcaggcctgggccagctgtgtttgcttgggtttgggatggattggaggtctgaccgtcacaccctcgggaatggccgggcctctgaaaaccacaggtccctccgggccaccttcaggctgctcacacccatcttgtgtttcagggcgtccgaggca

SEQ ID NO: 35927 - DNA, 2300 bp, Homo sapien
gtacagggcagaaccaagaacataaaccctccaagggatctgcttgatatcccaagttggaagggaccccagatacctgtgaggactggttgtctctcttcggtggccttgagtctctgaatttgtcgggttctcccatgatttggggtgatttctcaccctctgtccttcccccagcacaaagcactggccttgcctccaggaccttgcttccttctcatcttgcctcattttgcttcccatctgaagagtggaaatggggaactcccccagaggtggatactggggggcaggcctcccaagctgatggacatgagagtagggccctgacaggccttcctcctctcaaacctggcagatgggggcctctctggaagagggaggggccctgtcactgtccagagtctctttttacacttcacctccttctgcagtcagactgaaatataaaaaaggtggtggtggtggtgaaggggctggtggagatgtaggaaccgatctgctatttttaatttcctgtgaggatagagacttgcagttagactcaaagaagtactgtactttcccaggttgactaagaaatgccagtggtggaggtgggtgtttgggaaaggcagggccctgaaatggcctgtccctagggctctccaagcactagccttcccagcttcccgccgccccccctatctcttcctgtctaacttggggaaggggcctgggctgtgaggacagggcccccacaggggatggtttcacgagtgtagtcccggaggccttccctttacagctctcctccagccctgggcacatagcataggctggggacacaggatcctggcctgagaattgaggggaggtggccagcccgcagaggtggggtgctggggctgcatgatttttgccctgcgtcccttctctttggggctcctttcccctctcatacataaaatcgctttcaaattaaaatcgctgttttctggactgaggtgactgtatgaggatgggcagcgccgtttcgggcttggggggggtatccggttgggagctccggacgcgatccctggacgccgccgccgaggttccgtggggcccaagaggtgcacgcagggtgggggacacaaggcaagctttgtcggggagggggggagagggtgtgccaggctgggggcggggccggccggaggaggaagggggggcggtggattctcaaaggcgccttgttcgctcgtgccctctccgcgccagcgggcggcggcgcctcggctcgctgcggccttccctccgggcgcgctgcgggctccgggcagacccggcgccgtgcccgctcgtgggggcgcactgggcgccgagcgctgcgtgcttctcaggcgttgcccgcccggaggcggcccacgtccccgagtgaccccatttccctggacccttccaaccagagtcgactgctcgctcatcttaccactgctccccctctacctcggctctgggactccctaaccgcgtcccccatttgcatctccttggacctgactatcctgtgtttgtcggtgggtcccagtctctggcctcttgctctccgtagaacaccttcccccacatcccccgccccagttcgtcgctatctatagccttgtctataaatacccccgccccggcccggctctgtaattacacggggcggggtgagggaagtaattatggagacctgattatgggtggggtggggactgcgacccccaggcccgcctctccccctcccactgtgccctaaatcccgcccaggcctctgctgaaagggggctctgggcccccaagagggagggaatgggagggagtgtgtgtgactggacgtttgggtcctagaaaaggaaggggctagggaagatattggggttcccgaaaagagaatcttagggtacaggccgttgagacctacaaggggcaggagagagcgagcgatagagggagggttcccgcctccctccccaggtggagactgagggtggggtttcccttcggtggctgtgggcgggcggctggaggcgggggccgggccgggggcgggggcgaggtgggggctctgggcgccagggtggccggggacacacagaagcggcagccaccgaggagggagcagtgccgggagccccgacggcgccttgctgcatggagctgggccgctgacagctgtcgctgcccgcagcctctgacctccctgggaccccggcgtctgaggctcatagtctgctccctgtcttctgtcagcctcagggcatccagcgtctcaggccgacctgggtccc

SEQ ID NO: 35928 - DNA, 2300 bp, Homo sapien
aggctgcgggcagcgacagctgtcagcggcccagctccatgcagcaaggcgccgtcggggctcccggcactgctccctcctcggtggctgccgcttctgtgtgtccccggccaccctggcgcccagagcccccacctcgcccccgcccccggcccggcccccgcctccagccgcccgcccacagccaccgaagggaaaccccaccctcagtctccacctggggagggaggcgggaaccctccctctatcgctcgctctctcctgccccttgtaggtctcaacggcctgtaccctaagattctcttttcgggaaccccaatatcttccctagccccttccttttctaggacccaaacgtccagtcacacacactccctcccattccctccctcttgggggcccagagccccctttcagcagaggcctgggcgggatttagggcacagtgggagggggagaggcgggcctgggggtcgcagtccccaccccacccataatcaggtctccataattacttccctcaccccgccccgtgtaattacagagccgggccggggcgggggtatttatagacaaggctatagatagcgacgaactggggcgggggatgtgggggaaggtgttctacggagagcaagaggccagagactgggacccaccgacaaacacaggatagtcaggtccaaggagatgcaaatgggggacgcggttagggagtcccagagccgaggtagagggggagcagtggtaagatgagcgagcagtcgactctggttggaagggtccagggaaatggggtcactcggggacgtgggccgcctccgggcgggcaacgcctgagaagcacgcagcgctcggcgcccagtgcgcccccacgagcgggcacggcgccgggtctgcccggagcccgcagcgcgcccggagggaaggccgcagcgagccgaggcgccgccgcccgctggcgcggagagggcacgagcgaacaaggcgcctttgagaatccaccgcccccccttcctcctccggccggccccgcccccagcctggcacaccctctccccccctccccgacaaagcttgccttgtgtcccccaccctgcgtgcacctcttgggccccacggaacctcggcggcggcgtccagggatcgcgtccggagctcccaaccggataccccccccaagcccgaaacggcgctgcccatcctcatacagtcacctcagtccagaaaacagcgattttaatttgaaagcgattttatgtatgagaggggaaaggagccccaaagagaagggacgcagggcaaaaatcatgcagccccagcaccccacctctgcgggctggccacctcccctcaattctcaggccaggatcctgtgtccccagcctatgctatgtgcccagggctggaggagagctgtaaagggaaggcctccgggactacactcgtgaaaccatcccctgtgggggccctgtcctcacagcccaggccccttccccaagttagacaggaagagatagggggggcggcgggaagctgggaaggctagtgcttggagagccctagggacaggccatttcagggccctgcctttcccaaacacccacctccaccactggcatttcttagtcaacctgggaaagtacagtacttctttgagtctaactgcaagtctctatcctcacaggaaattaaaaatagcagatcggttcctacatctccaccagccccttcaccaccaccaccaccttttttatatttcagtctgactgcagaaggaggtgaagtgtaaaaagagactctggacagtgacagggcccctccctcttccagagaggcccccatctgccaggtttgagaggaggaaggcctgtcagggccctactctcatgtccatcagcttgggaggcctgccccccagtatccacctctgggggagttccccatttccactcttcagatgggaagcaaaatgaggcaagatgagaaggaagcaaggtcctggaggcaaggccagtgctttgtgctgggggaaggacagagggtgagaaatcaccccaaatcatgggagaacccgacaaattcagagactcaaggccaccgaagagagacaaccagtcctcacaggtatctggggtcccttccaacttgggatatcaagcagatcccttggagggtttatgttcttggttctgccctgtacttctcaccccatcaaggttctgggaacatggccccccaccctgccccagggcttggagtccctcttggatgtgtgctcctccagtgtgagaagcacc

SEQ ID NO: 35929 - DNA, 2300 bp, Homo sapien
cctgtaatcccagctactcaggaggctgaggcaggagaattgcttgaacccaggaggcagaggttgcagtgagctgagattgtgccactgcactccagcctgggcaacagagcaagactccatctcaaaaaaaaaaaaaaaaaaaaacacacacacacacacaaaaacaaagaatattagagttcttttaggggaggaagcatgcactgaaagatcagtcacctcaggaaaggcaaggggtctcataaagaccacaggcctgacaaggttagaggattggaaggtcaatgggccatggggaagttcacacaaggatctggggttacaaggaaaacaagaaaatgaaagtggccaggcagtaagttggtcacaacctctcacctgggggctgctgacaggcccggagaatcctgggggagctggagggggcagaccaggggaccccatggaagaactgatgactggaaagggagagcccagtgggggtggtggcatcgggggtgggggtggggccccagagcctccaagggatggagctgttgaagggggtaggggtggcccaggaggagaagggggagggactccctggggaaggggatttggggaggagctgtctgggcttcgggagtctgagggaggggtatgtacaggcacacagacacacaagagacagaagagacaaaaaaagaaaatgagtcttcaaacatccaactagagactttaattctctaataccccaccgtgccggacccagcccactccacccatccccaagttcagagacaccctgctgtcaaacaacagtgtaactccggctggtccgatggtagtgggttatcagaacttattaacatttgtgtcactaaaattggtatacaacctcccactgctatatttgactggctaaaaaaacccaaaaacagcgtaactcctcattgtggtgagaggagggagttgacaaggagaggaggatagttcaggtgaggaaaattttccaaccaatccatttgaatgaataccaggtcatcccaaagccacacctgtctcgtgggtggggcagcacgtggggtagaccatcgagcccctctattcccagcgtaaagccaggtagccagagcgtgcaagggaaagagacaggcaggagagacccctcctaagacgcaggatctgcctgtaaacgcccaaagtcctgaggtttaagaggaatcgtgcccttcccaggcccgcgacctccggtgcccaaggcctcaagcggtcacagctaggagggcggaagctccccttccccgccccgccccgggggggagggtgctaaggccctcgggagggaggggacgcgtgtttacaaacaagggggcgggagcgcaaggaaaagagcaccgggggagggtgtgggggaggggtcgcagataaagcggtcactggctcgcctgcccttctgctggggcactcaccccgcccgctgtcgcccatcccgtcccgtccagcctcccctggctccggctccggggtttgttgttctccgcctgccaccgccgccgccgccgccgctgcgggatccagccagggccgtcgccgccgccaccgggacgcgaccccacaatgcatttcttttcgcacccccaccggcccacactgccctgcggcatgccgctgagggaggaagggcgggcgagcggcccaagacatgatccctggctgagagtagggataccgaagaggtcccagggattcccaaggattgatcggaggattagctgagcacgaggaagcccctgagagaaagactctggcctggattgggtcgaattaagcccgtcgctctgctcagtaccaaaatgacagcgccaatgtggcagccatctttgtacagacgggaagtctcggcgcgagttcccgccccctcgtctagttggaaaccgaggaggcggtctcctccggcctgttagcccgcctcgcccaccctcccctcaaatcacctccacactcgcgcatgcgtgtcagtgcaggatggattcgtcgctaccggagtgccgccatattggtaaaggcattagggcgaaggtggaacggaacttcctgttctcgcgggatctaaaggcgggactgccacgtccaagcaaaccgggaaaggagaggatcccggagccggtgagaattctctgttttttctctaccatcctttccaggccttttcctcacctaatgagtcgtagagacgagggcccagagagtctgtaaagtggctggtgaaagattagtgtcccagggccctacatccgggaggtggttcgggataa

SEQ ID NO: 35930 - DNA, 2300 bp, Homo sapien
atgtgatttgtgatgatgtcccttgcccaaatttatcaccaactctggcccttacctaagcctcttttttcttcttcagcgttctgaggtctcactggcccatctttgggtactgtgctccctcctcgcctcttctgaacccctcttgtttccttttcttcttcctctgagctctgcttctccttggtagaacgctctgagggaagaaaagagttggtcagagtggagaacagatcttccaacatgtcctctccctcctgagggccataagatgaggagattctgaggcaggcaagtcagctttcaggaaagttgttcctgggctcaccttgtcttccatgtccatgacttccacgtgtatgactgtgagcgtgtccatgtccatgactgtgaccatgtcctcctttcacatgtctcacaaatttctccacgacaagaaaggcaacaattccactgagaacccacagtcccacagacagaatggggccctggcctgggaatggaggcattgagacattaagggagatgtgcattccagactcctcctcctcaagtgcgggaggtgaggaatagggagagacggaccttccccagcaccccaactcccatccccatctgtctcttcctcaccactgtgggagtgtccatgtccgggttgctccagagtgtggtgagaatgaggttctggaagaaggggggaaaaccagatgagggaatatctgacacaatgagtgtgtatttgggggaatatcgaaaggtcagggatcataaaggagaaagaacccttttcctccaaagaacgaaataggttagatttgaggtagaagtcagaggttacttaccaagagcatgaggaatgaggtgcaggaaagcatctcccaggagcccaccggaagcaaaactgagcaagatctgaagtagagagcgatgccggggagagttcgactccacggggataaggaagaggacaaaaaatggagctgctgagatcagcactgtggcccccagtgcctggtgagggagagtcaaggtcaagtactgtggagtttcccaacaatccagaaccagcccttctctctcccatcccctggagactcacataagcccagagagtgacagcatccaggtcctgcttgatgcctggagccccagactccccatagcctccatggctatgctcatggtcatgtccatgtcctctgtggtagaggctctcatgggagtagccatggctatggccatggtgtaaatcctcatgtgaatgtccatggtcgtgatcgtgggtatgtccatgccagatgctctcgtgagtgtggccatggccatgggcatggctgtggccatggtggaaatcttcatgtgagtgcctgtggctgtggccatggaagtcctcttgcagatcgtcgtgcaggtcgtcatgacccccgagtccagccaccagaagccccaaggtcgcccaggtcagcagtcccacggccacccagtggggggcccccaggcctctggccatcacgctgaccagagggacagaggcagtgactccacttgactcaactctatacctacacagggtccgctttactccaatcgcgccctccgtccacctctatgggccgctctcccattcccttaagttcccacctacattgttcccaagactagttctctttatcccgaaccacctcccggatgtagggccctgggacactaatctttcaccagccactttacagactctctgggccctcgtctctacgactcattaggtgaggaaaaggcctggaaaggatggtagagaaaaaacagagaattctcaccggctccgggatcctctcctttcccggtttgcttggacgtggcagtcccgcctttagatcccgcgagaacaggaagttccgttccaccttcgccctaatgcctttaccaatatggcggcactccggtagcgacgaatccatcctgcactgacacgcatgcgcgagtgtggaggtgatttgaggggagggtgggcgaggcgggctaacaggccggaggagaccgcctcctcggtttccaactagacgagggggcgggaactcgcgccgagacttcccgtctgtacaaagatggctgccacattggcgctgtcattttggtactgagcagagcgacgggcttaattcgacccaatccaggccagagtctttctctcaggggcttcctcgtgctcagctaatcctccgatcaatccttgggaatccctgggacctcttcggtatccctactctcagccagggatcatgtcttgggccgctcgcccg

SEQ ID NO: 35931 - DNA, 2300 bp, Homo sapien
actcttttcttccctcagagcgttctaccaaggagaagcagagctcagaggaagaagaaaaggaaacaagaggggttcagaagaggcgaggagggagcacagtacccaaagatgggccagtgagacctcagaacgctgaagaagaaaaaagaggcttaggtaagggccagagttggtgataaatttgggcaagggacatcatcacaaatcacatggaatatgtgctgtgggtaatggcaggtatctgagaaacactaaaggactgggtgtaaagtggtctctgaggggaggtgtgagaatagctgaccaagactggaacaagtggtgatggaagcctctgatcattttctcttcttgtcctgtacaagacctgcgtgtgtcggggtacctgaatctggctgctgacttggcacacaacttcactgatggtctggccattggggcttcctttcgagggggccggggactagggatcctgaccacaatgactgtcctgctacatgaagtgccccacgaggtcggagactttgccatcttggtccagtctggctgcagcaaaaagcaggttggtgatgtctgccaaacacagctgcctcaaaccctttatctctcctcactcaccctaaacccaaacagcctcttattagttccaaacaattcatactgtcattgacaagtcctctagaaatgagggggaagaagttctggttactttgtcctttagctcagtatttcttaaactggtctataaaccatctgaatggtttagtggagtcttacacacacacgcctactcaatcagaaagtctgtggaaaggacctctgatctcttaagatttttcagaaattgtctattctagactgctccctcttctctttttattttgatgtttagtttccaaatccatgtcccctatacctataccccaccagccacttctaaaccactgataatctttagctattggtgagtgcctttttctcttttctgcccatcaggcgatgcgtctgcaactactgacagcagtaggggcactggcaggcacagcctgtgcccttctcactgaaggaggagcagtgggcagtgaaattgcaggtggtgcaggtcctggctgggtcctgccatttactgcaggtggctttatctacgtagcaacagtgtctgtgttgcccgagctgctgagggaggcatcaccattgcaatcacttctggaggtgctggggctgctggggggagttatcatgatggtgctgattgcccaccttgagtgaggggtggataaactacccctgccccaaacctctacccctaactccaggtcaggggtgcgtagaggttgggggccctggccagggacatctgccaaaggaaggaactgtagcctgggagaatggttactttggcattagggccttcaagggctggcagtcttacagaggctggagcggtgagaatgagaggccagagggaccatagtgttgggcactgtctgaccatgttgcatttggaaggctaaatggggccatgaagaaggctggaagggacagggggtgatggcagcctacctggtgtcccctaccccacctgttctcggagaaccaagttgctacacaggaagttctccaaggtccagtttcctttctcccaccagttggtggaggcttcagggaagaccagagtcctggacagagagggtaacaggaggagtcggggataaacatcaaacatcaatcgtgtgtcctgatttgggagtgattggggggatggggtgggagagggttagttggtattctcatggcctgattttttttgtttctattccttttatatcactgtgtttgaatcgagggggaggggtggtaaccggaaataaagacctccgatcttccgccccacatgcagtctttgtctttttggggggaatggggccccttgtcttctccacacccggggcccctaagcagcagtgtcgggccacgccccctcggtgggaggtcggcctgcgctggtggccgcagatggcctaaggctggcgggcctttgattggccccggctttgcccttgccacgcccctctgcgctgggattggcttagtgctgggattcccacccacccacagcccgccatggcgtctcagctccagaaccgactccgctccgcactggccttggtcacaggttgagggggttctttccccgggcggtttggggtattggagtgaggtcaggggcgtgcccttggagtgcgcggccgctgtgacctctggccccttacccacattttactttctgccctgtg

SEQ ID NO: 35932 - DNA, 2300 bp, Homo sapien
cttggcatctgaagatagtggatacatcacagggacctcagtggaagtcactggtatgaggccagcatggggagggagagggcagagaagtagaacccagactatatgagaaagcaagtaaggggagtctggagccactgggaagggcagaggttcccaaggccagggacagaagtgggtaccccctagcccatttgtgtctccacccatgcatctgtccaaatgtttctgcccctcccaggaggtcttttcatgtaactgcctcaaggaccctggactctgctcacccccccaccactctgcctggcctcctgctgatgaggactctaagttcccaggatacaaaaggggtggcagtgtatggttcaggaatgctgaatatgggaagcaggggtgcttgtgaccctaataaattccaagtcctcttccctgccacctccggctcttcttgtgtccaagccctcagacccttccccacctccccctcctttccctttcccgaaggattgttccctttctctgcctggtctcccagggcaacccccgccgccgggtgtgagaggaaagagtatgtgtcactgtgtatgcgtgacactccgggtctttttgaagggaggggttcgtgcgtcacccctttccactggttctgcagcaccagtcccctccccccaactccctgggttcttatggtccccaagggtgatttgttcatggccccatcttggtgtccagtctggccttgaaagggggtcttggaacaggtggccctcccccacccctctcctttctctgagtccccccctcccctttctctccaccttacaatagctgcagccggcctggggtcggatgggggggattaggggagggggccaggattaggggaatgaaccagccgatgaaaggggctggagagagcaggagggagggggctgggaagaggaggaggaaggggaggggggtctgcgctaatcgactctggcgcccacataaggactggccacggactgaaggagaggacagggaagtaggggggaactggggtggggggcgagggcacccactgctgccttgtcccagggacaggccaccccctggcagccgcagcccaagtccgggagcctcagctcgggcggggacaagatgcccatcagggtctctaactgccccccaccccctcgccctgtatccctctcattccctacactcaatggggatcgctctgccccttcctcttctctttcctccccatccccttcgtttactctagagtcctcgaagaggcttctgcccacttcccactccagacattctgcccctgtgtaccccacccacacgcgcacccccccttcccaatgggagctccatcttgtgtatgtccctgtttccgcgtggtgtctccattccccctttcctcccgtgcgcctccctcccttccccgccccgggccgcggctcctgattgtccaaacgcaattctcgagtctatggctccggccgagagttgagtctggacgtcccgagccgccgcccccaaacctcgagcgggagagcgggtcggagggtctagggagagccaaagcagagggtggagggagtccccagggtggtaaggggaatcccgggcacatcgggacctaggtgtgttctcaggactagaaggctaaagcggcagatcttttgcagccttttcccccgggatcctggaatgggggttacggagaagtgaggggggttgatccccagagtcgccagggtacgcagagtgggggaggtagcccttttcacgagccctctgtcccctcctggggtcccagatattccaggccccggccccccggagctgaggccccgcgtgggggcctctggaagggaaccgaggctaaggttgttggccgcgcgacggtgctgggccgggggcggagaccgtggttccctaagtggcgcagaactcccgggacgcaggatcctcacgcgggacgagcccgtcccgtgggcgggagaaccgcggcgtccacgtcccgtcccacccgcgccgcgaatggtgggtgacgtctccgccggcggggggagcgggtgtagcggaggagcaggcggaagtgacgtagggccccagcgcccgggccatggcggcggcggtggcgggagctgctgtctgagcagcggttgcggaccgagcgaacttggcccaggagcccgggcctagggagaggcgcggcggcggcgggagcgcgaacggctggagctgggtgaggggcagtgccggcgcgggggcgggagcgggggcggagaggggcgctt

SEQ ID NO: 35933 - DNA, 2300 bp, Homo sapien
gattagtacaggggaaagcctcaccgttttaagagcttcctttactaactcatcctccagatttgcctgaatgtgaactggaaatagaagtttatcataagggtccagctccacagctccctctccccacattgagtatctgcacaccaatccctaccttattccttccagcccccatgcctctcagattacaggtactgcacccaccccatgccatcgcttaccatccacttcatccaggatgaattcatcagaagtgatatccaactccccaagttgcagtggttcctggagcccaggaccacccgcctggaaagggataagttaatgggagtagggtacggtgaaagacagaaagaaaaaatataattggatatccccagtccttcaagtgagaaggagctgcttttactgggagccacaggtactgctttgaaaaattctaagagtctcacgttgtacccactctcctattttgtgctgatgggtaaggaatacgacaaggagtgagacgatccagtgagacagtggaggtagcccagcatggtggtgggctccttgtagtcccaactacttagaagctgagacgggaagattgtttgaggagatcaggagttcaaggtcaacctgggtaacacagggaaacccgtctaaagaaaacaaaaaaaggtaaaagacaagacagtgcagtggaggccggacgcagtggctcacgcctgtaatcccagcactttgggaggccgaggtgggaagatcacgaggtcaggagatcgagaccatcctggctaacacagtgaaaccccgtctctactaaaaaatacaaaaaattagccgggcgcggtggcgggcgcctgtagtcccagctacttgggaggttgaggcaggagaatggcgtgaacccggaaggtggagcttgcagtgagccaagatcgcgccactgcactccagcctgggcgacagagcaagactccgtctcaaaaaaaaaaaaaaaaaaaaaaaagtgcagtggagatgaccgaatgaggaaagctaggaattgcagaggatagagcagaacttgcacttaaatttaagaccctcagactcctgccatcttgggtgttctatcacacctctggggaaccccaggctttctagaaatgtcaaaacacatagtgtttacctgcatgccaggtgcaatcttacacatattcatctaatcctaacgacgatgtatacaataggttctatcttcctcaccttaaaggtgtgagaaatgatggcacagagaagctggttaacttgcccaagggcacacagcgtgtaagtggcagagatagaactcaggcagtctggcttcagaggccatgttcttaacctttacactatactacttcgtgactctaccccaaaatgtggagtgaagttgaaattttgtgccccagaacatgagtttcagccactagggtcccgctcagggtcgggtctgatcacagggaagggtacggggagccaaacaggtaatatcacgggtagcagccaagttcccacccttgtgcctaaacccagctcaggtctttctgaagctaggagcaccggaactacggaggagaaacagctccgcgctctcaccagcgggccctcttcctcctccatatctgaggtcccagcccgcaacaccagttcccgggccgcagccgccatggtcgcagcggcggccattccccgcagcctcacttccggcaactgtcagtcccggcgagtccgttccccggagtggagctacaagtcccaaagggtcttcctcagcgcgaaatcgttcccagatatttgagttaagttgtttgactccagctgtcccctttcagctctaaccacttcacccaactgcaaatggaaatatggaagtctgaaacacaaactagccccggaaccttcgctgttctcttacctatgaaccttacgaactgtaaagaaaggcgcaccggaagttgtggtacccaagccatactctcataaatccagccaggtcgcgctgaaacagtttccggaagcacttctcctagatcgcaccgcctcttcctcctggaagctatataatgatatcgcgtcacttccgctctctcttccacaggaggcctacacgccgccgcttgtgctgcagccatggtaagactggaatccgtgccgtgatccagcggcatcgcagctcgggcaaggaaagccggctgtcagggttctggaaacgtcctgccctgagggcctgcgactttctgtatggagccttggatcgcgtccctggaaagggacaccaaagattt

SEQ ID NO: 35934 - DNA, 2300 bp, Homo sapien
tctcagctacttgggaggctgaggttgcagtgagataagattgcaccattgcactccggcctgggtgacggggtgagactctgtctcgggataaataaataaacatgaccaagggtcaaattattaggttgattcagaagagagcagggtctttcaaatttattaattaaatgacgaggtttcaccatgttgaccaggctggtctcgaactcctgacctcaggggatccgcccacttcagcctccgagtgagccactgcactaagcctcaaatttaattatatgtttacaagtgaaaagatttacttcaaaatgggtgtgggaagagatatagatgaaataagatttctaatttttagttagatacatccatgaaggttattctctattacacttatgaatgctgcacctctacttaagcctcacagccggtctctgaaataagtacagtatttcacactgccttattagtttcacagagcacccaacagaaggaatttccctctacaaattcctcaacagagccaacagtatccctactactatccattccctaacgtcgcctaagtacctaccatgcaacagaagccaagaagacaggcctagccctgcacgcatggacacatactggtaggctatttccacaactaactacacattctgacttaagggaaaaaaaaagaacgttatgtatctagaaagccaagaattcattaggtttgtggagagaaatactcaagtgaaataatattcttgcattcattgattcgattcttaaaagccaaagaaagatggatgtactccttcacacttcgacaggaaaggagtgtcaattatggctcatctgagtaaatgtcccactcagacttcttccaccctccatctacaggcttcttcacactttttatctgttggtatttctacttatccctcaagatgcccaataatcctccaattctcagggaatataaatttcgcaggaagggttgctgttatgatggtgggatgggtaaagaaaccgaatctagaagaaatctcacaagctcgtggttcaggaaaatcttagcgaattcgggtgagcaaccatacctcctccccacttccccaggtgaaatgttttggcttgaccttagaccactatcttggctttaatcacttattttctgtggtaaatgctaaaggggtcagtctctccctaaaccactttcttttcttaatccagcagtcaaggtgatctggatgagactcaagtctccccagccttgcttcatttttgcttatgtcttcacaacccaattctcatttacattccctattccttaccctacttcacttaccttaatggcagtgatggcaaaggctattttccgccgcccatcgatgttggtgttgagtactcgcaaaatatgctggaacttttcagggatcactagagactagttgaaaaagtacgggggaagaaatcagacacagtaaactatcaaacagtaaggccgataaggcaaacgaacttcatacaaaaaggttaagcctgtcacacaagtggcaagacacccgccccccattccttaggttttcacaccacagagcaaactcctcagtcctgcagagtaggcacatgaagcgttcaagcttgggaaaatgcaacctctggagagaggaagcaggtctcctgcccattcccaaaagtgcgtggcaaaagccagagttccccatatacgcccaagccttagacagctttcgtgcgcccgagcagtgacccttcctcgggcccgctctccggaattggaaatctttggtgtccctttccagggacgcgatccaaggctccatacagaaagtcgcaggccctcagggcaggacgtttccagaaccctgacagccggctttccttgcccgagctgcgatgccgctggatcacggcacggattccagtcttaccatggctgcagcacaagcggcggcgtgtaggcctcctgtggaagagagagcggaagtgacgcgatatcattatatagcttccaggaggaagaggcggtgcgatctaggagaagtgcttccggaaactgtttcagcgcgacctggctggatttatgagagtatggcttgggtaccacaacttccggtgcgcctttctttacagttcgtaaggttcataggtaagagaacagcgaaggttccggggctagtttgtgtttcagacttccatatttccatttgcagttgggtgaagtggttagagctgaaaggggacagctggagtcaaacaacttaactcaaatatctgggaacgatttcgcg

SEQ ID NO: 35935 - DNA, 2300 bp, Homo sapien
tttgattatggggatacagtgatttgcctaaataattgtgacccttagagattctgaggaactgacagcccaataccttaatcaaagcctgtaactcataagaccctggtttactgcatcagcttggagtggcaggccccttgttctcctaaatgcaagaatcagaaggcacttagtgacaactacatatgctgagcaatgggggaaaaaaaagatactgcctgctttcaaagggttgtctgtaatactaaattctgtgttcatgattcagtcatacccctgaacaaagttacttttttctttttttgagacggggtctcactgtcgcccaggttagagtgtggttgcgtgatcttggcttgctgcaacctccacctcctaggttcaagctattctgctgcagcctcccaagtagctgggattacaggcacctgccaccatgctcagcaacttttcttgtatttttagtagagacagggtttcaccatgttggccaggctggttttgaactcctgccctcaatgtcatctgcccacttgggcctcccaaagtgctgggattacaggcgtgagccactgcgaccggcccaaagttaaccttctgtcgaacggtttatatctggaaaggtgggtgaggaaagggtgacctaggggattgcaaaatagattattgcagatcctacctttgtgagctttttgaatgaggctataaaggaatttaaaaatcagattcaacactaattccgaaacccctcacttcattcagggtgtgggccgaagatatgctcatgtggtgttgaggaaagcagacattgacctcaccaagagggcgggagaactcactgaggatgaggtgaggacaaggaagggggctgggggtggggtcagcctcagaaaggggtccatctagatctgaccttggtctgcctgccaggtggaacgtgtgatcaccattatgcagaatccacgccagtacaagatcccagactggttcttgaacagacagaaggatgtaaaggatggaaaatacagccaggtgtgtactgaaatgagggcaggattagaggaagggtggagggtcctaacagaattgggcataggaggtcaggggataaaacatcccttgccccctcctctgaatccaggtcctagccaatggtctggacaacaagctccgtgaagacctggagcgactgaagaagattcgggcccatagagggctgcgtcacttctgggggtgagtggggggtctcatctccctgcctacctcgactcagcattcctcctactcgctcttctttttccccaaccttttgtttctgctgtgcatgacctgtgactcttctctttttacctgcagccttcgtgtccgaggccagcacaccaagaccactggccgccgtggccgcaccgtgggtgtgtccaagaagaaataagtctgtaggccttgtctgttaataaatagtttatatacctatggcttcctgtcctttctgtccattctaatagggaatgttaaagtgctgggtcctttttccatttagagctgccctactcagttgcccacacagtgctattagttttagcagtggtgatgctgcagaccccccagtctccctatatgtagctagtgatgtccctctctgtaaagagaaatgtgagggtaaaacagttcagccttgaggggctgacccagaccagtttagagaccaacaccctggggttggtgtgcagcatcattgtggagtgggttagctgagcctagccagttgcagttaaggtgagtttgcaggtcttggtcactctgggtttttttgtttttgtttttgttttcttttaaggggtcatctagtcataagggaaaatccttcgggctgtgaccgaagcaacaaaggcaaaaacgcggacgttggttatgaagggtgtggtctccctggtggagtacgtcggtgggttgggatggggagcggctggacagaccggtctcactccgtttggtgccactccacccgcccgggtttccgcgccctgccgcgctgctccgacgccgcttccggcggggatgggagcgcgcaacgcggaagcgggcggcagaccggccgccggggcgaggcgggggaggggccgtgagtgccgcagtcggccagccatggagcggagcttgctggcggcgaggccgcggcgacaaggtagccacccccgcagcatgcctcgaccgcggtccgcagctgcaccgcctctccccgccccccagggtgcgctggtcccggtcgcgcgctcagacctccgcatcccgggcgt

SEQ ID NO: 35936 - DNA, 2300 bp, Homo sapien
tgggagagagaaggtcctgttcctgcctttcctgtggccccaggcactctcagctctgaagccaggctattgctcgacaccgcaggatgcccaggactccctggaaccaggagcaaaagggcgcagtcctttccccgtcagagccacccaccagcttccaggcttcctgcatcttccaggggtccagcctgtgggacgtcagcaggaatttcccatagcagcaccggtctagcgggtagtgggtggcaccagccagcttgacacactgtgttggggcgaggcctcctcgtcgggcacttacccccacaaagacatcctctaatgggagaaggggtgcccggctggccaccttgagaatgagctgcacagcagacgctgacagcacataccccgtgcctgaggcatagggtggaaaggggccccaggtgtgaggccactgctcctctgatacgcggtgcctgccccccggtgtccgagaggggttcacgcgccagtgcacccggcccaagtacagaagaggcacttcctcgctgtgcaaaacctggcctccttcctgctcagcctctctctggggttccgtgcttctctcccattgcccccaacggccccctcgcaagaccagctctgataccagttcagggacgttgacatacacatcatcgtccgtcttgaggacgtatcgggccatggggcagtgtttctcagcccagttcagcccgctgagggtctttagggtgaggttgcggtaggagtcctggaaggcggcctgcaagatatccccctgggctgctgactccgaggccaggtcactcccctgggaaccccacacggggtgctgtgcgttcggctctcccagcaagaatagcgtctgtaccctgagcccccgggcctcgcgcagcccgccccacgaagcccgaatggcgtttctctggttcaggttctccggagccgtgcacaccaggatgagcaggaagggaggggccccgggaccactgcaagcttcctggttggggatcaagaggcggggcagggccaggggcggccccggtgaggcgggggctgggagcagggaggctagtgagaggctcagcagctcctcccccaaccccgaaggcccgaagagggtccagacgatcaccagcagcaaagcggcgagaaggaggcgccggaagagcctgagctgcatggtgcggcgtactccgaggggatccgtaagagcgaagggcggagactagctccccgggcctgggtcacggccggggacttaaccgaccacgcccgggatgcggaggtctgagcgcgcgaccgggaccagcgcaccctggggggcggggagaggcggtgcagctgcggaccgcggtcgaggcatgctgcgggggtggctaccttgtcgccgcggcctcgccgccagcaagctccgctccatggctggccgactgcggcactcacggcccctcccccgcctcgccccggcggccggtctgccgcccgcttccgcgttgcgcgctcccatccccgccggaagcggcgtcggagcagcgcggcagggcgcggaaacccgggcgggtggagtggcaccaaacggagtgagaccggtctgtccagccgctccccatcccaacccaccgacgtactccaccagggagaccacacccttcataaccaacgtccgcgtttttgcctttgttgcttcggtcacagcccgaaggattttcccttatgactagatgaccccttaaaagaaaacaaaaacaaaaacaaaaaaacccagagtgaccaagacctgcaaactcaccttaactgcaactggctaggctcagctaacccactccacaatgatgctgcacaccaaccccagggtgttggtctctaaactggtctgggtcagcccctcaaggctgaactgttttaccctcacatttctctttacagagagggacatcactagctacatatagggagactggggggtctgcagcatcaccactgctaaaactaatagcactgtgtgggcaactgagtagggcagctctaaatggaaaaaggacccagcactttaacattccctattagaatggacagaaaggacaggaagccataggtatataaactatttattaacagacaaggcctacagacttatttcttcttggacacacccacggtgcggccacggcggccagtggtcttggtgtgctggcctcggacacgaaggctgcaggtaaaaagagaagagtcacaggtcatgcacagcagaaacaaaaggttggggaaaaagaagagcgagtaggaggaatgct

SEQ ID NO: 35937 - DNA, 2300 bp, Homo sapien
cttataccagatcctcagtctcactaaagacagcgatatgggagacacccaggggcctggcccgccagcccaaaagatggtcatcgggaagagaaaaagaaaaaaatgctgcagttgttctctcaagctagggcagaagaggggtgtcaagctcctcaataaacttgtctccacttcttcgagtgcagtgtggtcttcaccaggacccccagaacaccacaaacctggagagcccagaggctgccagaccctgctgcatgggaaggacatctccagggacatgggagagaggacagcctctctgaggaggaaggcccctaaaaggcaaagctaaggccacagcagccacaaggtatggggtgggggtagaggcaggacactgacccctccgatcctagaatggcctcatgcttggcaagggggaggggaacaggtccacaagatgatccagacacattatccaaaaaatcgctttcctctttaataccaacccaccccaggagacagctgtccacccccagttggggaaggggccacactgcccccacctccttgttccagggaacactcatttccctacaggtgatcttggggagagactgttcccaggcaaccctggagtctggctcagcgcacaaatctgtccagggcagatggccgggcccccgtgggcttggccttcgcctccttatgatgctgctgctgaaggctctgccggaccttgtcctggggaccggagacggggaggacacaggcacagagtgagaagtggcaggctgacaagggcagaggcacaagcaggagggtgcagcctgtggaaggcccggcccatgccaatgctcatttaccctgtgttcctcatccatgaccttcctcttcctcttcaccaggcttgccgtggagctgcggcccttctgctttggctttggctggaagggagccttagcctgcgggtcatagccctgagggaggggacaggagtgatatctgttacagcctcggagtcagggaactggcagcacccacctgctggccgcacttctggggacaagccatggtggggagaggatgtgggggagaagacgggcctgggcattcaggggcctgctccataccagcctctctatctgctccttctttccctgctccagggagatgacatccacctcggccagggctcgtgggtccagacaaataagctctgcaggtacctgggggtgtcacagagggacaggactcagcaaggagccacaggagggtagcaccaaaaagagaagccagggaggctgctgaacccctctacccaagacccccagcatgagacatcaggagagctttctctacctccaaccccaaaccacaccttccccagcagcaggggcctcactctctgcagcaggggaacctcacctccaacaggggcaatctcaccctctccagcaggggggaacctgaccctctccaggagagggaatttcaccctctccagcagagggaaacctgaccctctccagcagggggaatctcaccctctccagcagagggaaacctgaccccgtccaggagaggggaatctcaccctctccaggaagaggaaaccttaccttctccagcaggggggaacctgaccttctccagcagtggggaacctgaccttctccagcaggggggaacctgaccttctccaggaaggaggaacctcaccctctccaggacgggggaacctgaccctctccagcaatgggggggatctcaccctctccagcaggggagcctcaccttctctagcagggccttcacctcccactcctggcgctgcttccggcttctgtatggattactctccaggccatcgaagttgggctcaccggcccctgaagggagggagggagaagcatggagccataaggaagaacctcagtccaacagctccagcccaactaagcccccagttcctggatgtctctggcccaaacttccacccagagttcattcacttcaagccccatcccctggcccactcaccagggaccagcatgctggtgatgcccccagtgtgccccacccccagcacatcttcaaaggggcagaactgaaggccatgcacagggcctgagagccggtgggtgaggtagggctgttcaagggagggtgggctggccttgccctgccctgcccagatgttgacaacgtcacccattcccgccaccagcagtcccctctgggagaaggccaggtgccctgctccatggggcagggtccgagtgctcagaggctggtacgtccctcgcaagtcaaag

SEQ ID NO: 35938 - DNA, 2300 bp, Homo sapien
gaaacctgggggagaggaagagtggttcaattgggaaatgaggtcacaggctatcattcaatcaggaatggactatctcaccccaactgaccgctgacagtgaggccactgaccggatgtcccgcaccgcctccatgacgttgatctcgcacataagcttctttgttacccaatcaagggcagccacatgacctcggcgccctccaaaagccaggtgtctgttggaggtgaggggcaggcagggtgttaaggcaggggaccaccgactcagacaacttgaggtctgccccacgccagccccatctctccaggcgggcagacacatgttgctgtaggtgcttaccctcacacccaagcaaatcgaaggaccctcccctcatcagcaacccaaacatacactgggaatggctgaagtggttaaggaaacacatcttagttcaagagtcactagaattcaaccttaccttccagttcgagagtagtttagtctgtagggtccaaactgccgcagattcaagtcaaagtgctgggaaagagaagagtgaaaaaaaagagtgccctgcagtaacgccttcttctagcccccattcctctattgtcctgcaccaccaatcaatcccttggctcctttacctcctcaggctcaccttggctgcacttgcaatgtccacagcctccacaatgtcagcctggcatatctttgctgtgtcttccccatcctccccttccagaaacctgaaagcaagggttaggatggcagtaaagcttcccaatatgaagcaagtataccaacataaaaacgagaaaagacagtcccaaaaggcagggaatgggggtccagattagggctcactcacccaggttcttcagcaagcagcagctcagaacgagcagctttgatacttgtttcctcttcctcagcttcagccacctcaagtcggcttcgagttttggctttagaatgtggtagctgtaacattgttggtggggaggagtggcagaagaaccacaggataagtggggtcacaggagagctacctgtcccagcctccatccaactcacccagacactccctgcctccagcacttcccaactctccggctggacctcacctttcgggatttgtcaatgcgacagaacttctggaccacttccacagggacgggggcggggcctgggaatggatcttgggtctaggggaaaggaggacgcaattagcagacagccttggattgaccccaaccctctcactctcaaggaacgaggcggcctgcctcgccacccatcaggtcccacgctcaccccggacaagccgcgctgggactccgggttcttccattctcggggtttcttcgggacctgaggcttcttagagatccgagacttctttaagatgtaagcattttttggtctctgaggacggagctcccgattcttcttgttacgaggaggccctggagaggctccggctgtggtcggaacggtctcttcctcccagtatcgccgcggtttctacaggcacatcaggaactccgcactcacgccccgccccccgaccccacagctaaaaacttcgtttcccacccagggaggcctctacctttctcttggtctgaagtttgtctttcttgggcgggacatccttgcccggcttgggggctgtctccatctcgcccacccgaacggcgatccacgtgcaaaactcctctcagctgccacacagtcggcttgaaaactcccggaagccctctgtccttcatccaatcagcagcgtaccaggtatgaagctctctaggtgccatcttgagtgagggcacgctctccttagaggggcggaacagtttttggcaccttatcgcgagcggcagcttatgcaagagtgatttaaaaaagaaaggcaggtccggagccaggggctaagtagcggtgcggtttctttttctggattagtttccccatcttgcctaaaaatgtcctagtctagtctttttagcagaactccactccctaaacatgtcagaactacacttcccatcaagggtcagaaagaaacttccggcacagtcttttcccagcattccttgtttacttccgggtttattactactgaaggaagaacgtgagtaggttaggatttcggttgagaggcttggggtcttgcgtttcgcccaccatctcctggggacagggtggagtcgatatccgggacgggggggaggttgcggtgcccctcagggctacctctcaagagtgctatcatttccgcaggccagatcagaaaagggagctcaggtacctt

SEQ ID NO: 35939 - DNA, 2300 bp, Homo sapien
cagtttaaagctacattcaagcaaattctaggaagacagaggctgaaaagtactaatagagatgccagggctgttggcaaggagggtaaccacatttcatcctggggcctcaggttagagaactgtgtattctttttcaattaaaccgacattcctagcaatatggtatgttgcaaatgcccttccaaaagaatcatgccaaccaagatgagggagagttaagggttgtatatacaggcaagaagtaggtttgaagacatttaggatttcactttcaagaaagaacactgtgccacaaagagattccaagtgcaagagtttgaacctgagggggtaatacaggtggtgtgtgttaaggtggaaggggctgtggggatatgacagaagtgcctggtcaggaaacagagccaggtgtttttacattttattagctacagtatagatcctagagctgcctcattccctcccctcccctcccctccccccaccatggggtcaggccttgccaggagcccctgcctttgctgcctgggcccgctggaactcctgctgcagctgagcaagggtctccctctgttgctctgactgccgctcaagatcccgaagctgggattcgtatcgcttactaaggagagacaagggagacaagcagaaagggagaaattagtaggactcactatggagagtgctaaacgcaagaaagagataggtggaaaacttgagatccaggggagggagaagaaggggggttaaaagggaaggaaagggttggaggaactggaggactaggggccactatggagagctgttctgcaatggttcaacacctctactccaatggttcacttgcatcacagggtgcagcacacggtggtggaataaaaactcacatttcagctgtgatatagtccagcctcttccctactgtggcccgagcctcccccagctcctgtttgactagcaccggacccagaagtttaaagaccacgttggacccatccagcagggccagttcctgatggagggatgggacatatgtgatcagaaccatggctagtacaggtccctcctcgccccacaaatcccagtccctcacctctttcacgatattattttctgttagttgtgcttcaagtttctgcctccccgacatggatttacttaagtctggggatgagaggaaaggcaatttagaaacatcaaatgtgccacctatccccacaatcctagtcaggtggatatggatctgaggaagcagaaaaggatgggggcagcgggtgagtgaacagggaagagtactgagactgaggcggggaagtctctgcacgcgagggcccagatggggcaacaaaccttatctcggtaatggctttgggttgtaagtgcattgggcgagaccataccgaccctgttcccttacccttctgtagctgttgatatttctccacttctccctgtagcttcttctggatcagctccgccatggcggggatgaaagcctactgggtgcgagacaagggcgctgggtctcactctctggaaggtacctgagctcccttttctgatctggcctgcggaaatgatagcactcttgagaggtagccctgaggggcaccgcaacctcccccccgtcccggatatcgactccaccctgtccccaggagatggtgggcgaaacgcaagaccccaagcctctcaaccgaaatcctaacctactcacgttcttccttcagtagtaataaacccggaagtaaacaaggaatgctgggaaaagactgtgccggaagtttctttctgacccttgatgggaagtgtagttctgacatgtttagggagtggagttctgctaaaaagactagactaggacatttttaggcaagatggggaaactaatccagaaaaagaaaccgcaccgctacttagcccctggctccggacctgcctttcttttttaaatcactcttgcataagctgccgctcgcgataaggtgccaaaaactgttccgcccctctaaggagagcgtgccctcactcaagatggcacctagagagcttcatacctggtacgctgctgattggatgaaggacagagggcttccgggagttttcaagccgactgtgtggcagctgagaggagttttgcacgtggatcgccgttcgggtgggcgagatggagacagcccccaagccgggcaaggatgtcccgcccaagaaagacaaacttcagaccaagagaaaggtagaggcctccctgggtgggaaacgaagtttttagctgtggggtcggggggcggggcgtg

SEQ ID NO: 35940 - DNA, 2300 bp, Homo sapien
ttggggccccgaggccctaaactcctaggtccagatcctaggtgagggcaggttgactggcagggctggtttttcgggatcggtcgggggaggggctggggccacgtgactctctgagtctaccgcccccaaccccctatcatcccacttccccttttccttcctgtactgggattggagctgctaccttcgggggtcccttagggctgagatagtggaggcgctacccgagggaccagggtgaaaggggtcctgaaaaagactaattctctgggctggtatagtccttggccgggaggggcggggcatgcggcagtgcctggactgaggtttcagctacccctagtcgctgcctctggcttgctgcctctcgcttccctctcctgccctttgtaccctgcttctctgtcgtgtgtgggttcagctctggggagaaggggctttgggggtctccaggatcagaattcctgtactccatccacgcctccactgcagccccttcgactccaccggggccctgaggcggctggggtggggctgtctgggccccagtgggggagacctggggtcaccagctcccccaacccttcctcgcactcgctggtactatgccctgccaccacaggtgaggggtacagagggaggagcagggcctggggtgaaggctgagggcaatggggggtggtgtggaactgtctgacttccccttccttgctcctccaggcccctgtgtccgtctgggatgaggaggaggatggtgccgtgtttaccgtcacaagccgccaatatcgacctcttgatcccttggtgagatcatgactttagcttctcacctctgactcttcattcccagttttccttcctctggctgactttctggccagagtgctaggttggagttctggagtcctggactctgctgtgtgacataggccaagactcttgccctctctgaatatcagaaaaatgagtctggaacatctcctgggtctgggattgtcctcagaaatctaggtgcagagtgggagaaagggttagcgatcatctctctgtgttctccaggtccctatgcctcccccacgttcctcccgacggctccgagctggcactctggaggccctggtcagacacctactggatacccggacatcagggactgatgtgagcttcatgtcagccttcctggctacccaccgggccttcacctccacgcctgccttgctagggcttatggctgacaggtcagagtcataagggacgcagggtagtggagtatctgcccggatttcctaaagccgcaacatcccaccaaaatagtcaaagccactgagggtttgggaaaaatggacagatagatcctcttctccccctcaggctggaagcccttgaatctcatcctaccgacgaactagagaggacaacagagtgagtgacccctggttcttaatctcacagtcccctctgcccaggctgcagctttacctctcacccttggctgattcccttctcccagggtagccatctctgtactgtcaacctggctggcctctcaccctgaggattttggctctgaggccaagggtcagcttgaccggcttgagagcttcttacttcagacagggtatgcagcagggaagggtgttggggggggcagcgctgacctcatccgcaatctccggtcccgggtggacccccaggcccccgaccttcctaagcccctggccctccccggcgatccccctgctgaccccacggatgtcctggtgttcctcgctgaccacttggccgaacagctgaccctgctagatgcggtgagaccctgacctctggcccctatgccccctgaccccttactaacctctccttgactccagatcctttccttgcttccaccccttcctgatccagctcctagcctcctccacctaccattttgattctccccttttccctttggtcgttacccttcaaaccctgtgcccctctggttccttggccacctgagatcctcagatccctgatattggaaggctgacctcacttgactatgaactttaacctctgacctctaccctgcaggaactttttctcaatttgatcccctctcagtgcctgggaggcctgtggggtcacagagaccggccaggacattctcacctctgcccatctgtccgagctactgtcacacagtttaacaaggtggcaggggcagtggttagttctgtcctgggggctacttccactggagagggacctggggaggtgaccatacggccactccgtcccccacagagggcccg

SEQ ID NO: 35941 - DNA, 2300 bp, Homo sapien
cagttcattgcgggtcgacgtggtctccagaatccccgagtgtagaggcggaggacagtggagctggggactcgggcgcctgggtcctggtccctgagcgtccagcgctcccctagtccgcggccctggctcctgtcctcacttccttccccttttggctcctgctctcggagcgggcggacgcgggggggagcggaaagggcgggagggcccaggagcccggcgggggggttcaagggggtacggaaaagccggggaggggactcggtccggggccggagaccgacggcaacagcggctcaggacccacgctgcccccacccctcccgagcaggtcagagcctgagcaccctgcgcgtccccgtactcgtgacctcctccttccccaacagcaccaagggcccccctattccacccttctgttgccccctcccccaaccttcctgcagaactcccttccggtcttcttgacacccacccacgtcccttccctgcccggttcccccgcgcctgcctgactctccacccccaccccaccccgtctctccccaggcgcccccatggcccgaccccgctgattccttcactcggccatgctcccgcggcccctgcggctgcttttggacacgagcccccccgggggagtcgtactgagcagcttccgaagccgggaccccgaagagggtgggggcccaggtggcctggtcgtgggcggggggcaggaggaagaggaggaggaagaagaagaggtgagacgcgggtggtgggaggtagggggcgtatgtatttctgaagtctccacttttctcttgtctctgggtccctacatctcctcctccttgcctcagttattctcgcgcctccctgggtgtcggcccgtttctctgctgcggggagtcctggcgtctccgtggttctctgtcagtgtgactcaggacctgcccgcaggaacctgccctgttcctgcctggaacttctggctggctgtcctgtccctgcgggtctttggccctccacctctgcctgcctgagtgtgcctacctctctgagcagtcgtgtcttggtccctgtctccctccttgtttttgtttggcggggaggggtttgtttccacagtaaccagctcctctgactctgggattggggagggaaccctcagatttcgtgacccctccttccctctctcccccttccccccgcccccccgccccgccccggtcctgggtagaggccgggaagccacggttctgggacctggaggaaagatcctagggtgggtagagagtggtcatctgttttcattagggattaatggtggtggccaggagcaggatttcgggcctcaggaggggccagaatttggatttggggccccgaggccctaaactcctaggtccagatcctaggtgagggcaggttgactggcagggctggtttttcgggatcggtcgggggaggggctggggccacgtgactctctgagtctaccgcccccaaccccctatcatcccacttccccttttccttcctgtactgggattggagctgctaccttcgggggtcccttagggctgagatagtggaggcgctacccgagggaccagggtgaaaggggtcctgaaaaagactaattctctgggctggtatagtccttggccgggaggggcggggcatgcggcagtgcctggactgaggtttcagctacccctagtcgctgcctctggcttgctgcctctcgcttccctctcctgccctttgtaccctgcttctctgtcgtgtgtgggttcagctctggggagaaggggctttgggggtctccaggatcagaattcctgtactccatccacgcctccactgcagccccttcgactccaccggggccctgaggcggctggggtggggctgtctgggccccagtgggggagacctggggtcaccagctcccccaacccttcctcgcactcgctggtactatgccctgccaccacaggtgaggggtacagagggaggagcagggcctggggtgaaggctgagggcaatggggggtggtgtggaactgtctgacttccccttccttgctcctccaggcccctgtgtccgtctgggatgaggaggaggatggtgccgtgtttaccgtcacaagccgccaatatcgacctcttgatcccttggtgagatcatgactttagcttctcacctctgactcttcattcccagttttccttcctctggctgactttctggccagagtgctaggttggagttctggagtcctggactctgctgtgtgacataggcc

SEQ ID NO: 35942 - DNA, 2300 bp, Homo sapien
tctattcatcgtgggaaccatggtgtcaatacatatcatgtagcttctgaaaaactccactgtacacttatagaatgaagaaggcaaaaaacttttttttttttttttttgagacggagtctcgctctgtcgcccaggctggagtgcagtggcgcgatctcggctcactgcaagctccgcctctcgggttcacgccattctcctgcctcagcctcccaagtagctcggactacaggcgtcctccaccatgcctggctaatattttgtattttttagtagagacggggtttcaccgtgttagccaggatggtctcgatctcctaacctggtgatccgcccgcctcggcctcccaaagtattgggattacccgcgtgagccaccgcgcccggctgcaaataatctttctttttttctgagacagagtctcgctctgttgcccaggctggagtgcagtggcacgatctcggctcacggcacgctccgcctcccgggttcacgccattctcctgcctcagcttcccgagtagctgggactacaggggcccgccaccacgcccggctaactttttgtgtttttagtagagacggggtttcaccgtgttagccaggatggtctcgatctcctgaccttgtgatctgcccgcctcggcctcccaaagtgctgggattacaggcgtgagccaccgcgcccggcggcgaaacacgatattgtactaacatcttaattttgttataaaatctcacaaaccccctgacatagtctcagagatctgtagggccgaggttacatttggagaacccgtactctagggccaaatccattcttcttgccctggctcacttgtcccccccaccgccccgcgctggagccactgcctagttcttcagccctagatggtgctcgccagacctcctctcaatgctcatcacacacagggctattcctttcctccaatgaaccaaacgcctcccgcccacctccaggtcccagtcctctgttccctttgcctggtccacccttgccctccctgggtcgcagacgaggtcggcctcgtcattccccgcagaccgccgcgcgtccctcttgtgcggttcaccacagttgtatttaagtgatcgtgtgagtcgtcgttaaatgcctgtctccccgcggatcatgggctcctcgaggacagggactggcctgtctgtccactgctgtaaccccgcgccggcatagggacctaaggcccactggagggcgctcatcaagtagctgctggatgttgacgaaggaagcggcggcgcagctcagggatctccgagtcaggacggtcggccagacccacggggtaacgggtctaatcgtgtaggaataaagctgtattccagtgcttccaaacggttctctcattccaacccctttccaagctcaatgaatattccaatcacctctggtcccttccagtgaccctgaaccgctcagagaacgccccgtcgacaccgttcggggcgggcgccactactggcgcatgagatgcgctcaagcagagggtactccaccagcgaggatacaccgagccgacggggatctcggtctcggcgccggaagcctctgagagccgaatctggaaccggatgtggctgcttcctgccccgccccctgccgagggggcgggaatcgagggcccttcggaaaacccggccgggatttcggtcagctacattcgtgggttgtggtagggagggtaatcccgtggggatggagtgaccggctctctctccgcctgaaacgcttcccgcgggagttttagccgtgttattgttggggaagggaatgtcaaattctgctcctgccttcccccaggggctggagactggaatctttattccagttcattgcgggtcgacgtggtctccagaatccccgagtgtagaggcggaggacagtggagctggggactcgggcgcctgggtcctggtccctgagcgtccagcgctcccctagtccgcggccctggctcctgtcctcacttccttccccttttggctcctgctctcggagcgggcggacgcgggggggagcggaaagggcgggagggcccaggagcccggcgggggggttcaagggggtacggaaaagccggggaggggactcggtccggggccggagaccgacggcaacagcggctcaggacccacgctgcccccacccctcccgagcaggtcagagcctgagcaccctgcgcgtccccgtactcgtgacctcctccttccccaacagcaccaagggcccccctattccacccttctgttgccc

SEQ ID NO: 35943 - DNA, 2300 bp, Homo sapien
cagctaccaccaccatcactactgctgcagccacctctgtcactgtccctggtgctggggtgccatccgggagtgggggcactgtggcccctgctaccatgggctctgcgcgctcccatgcctccagccgggccagtgagaatcaatctcccagcagcagcaactacttcagccccagggagtccactgatttctcatcttcctcccaagaggcatttgcagcttctgcagtgggcagtggggagcgtcgaggaggtggccctgtattcccagcccctgtcgttggcagtggaggggccacatctggaaagctgctgctggaggcagatgagctgtgcgatgatggtggggatgggaggggggcagtggttcctggggctgggctccggagacccacctacacaccccctagcatcatgccacagaaacactgggtatacgtgaagcgaggtggtaattgcccagcgccaacacccctggttccccaagacccagatctggaggaggaagaggaggaggaagatctggtgttgacctgtgaggatgatgaagatgaagaactagggggtagctccagggttccagtggggggagggcctgaggctaccctcagcataagtgatgtccgtaccctgagtgagcccccagacaagggggaggagcaggtcaacttctgtgagtcctccaatgactttggcccatatgagggtgggggtcctgtggcaggtcttgatgactcaggggggccaactccctcttcctatgccccctcccaccctcctcgaccgctccttcccttggacatgcagggcaaccagatcctggtcttcccgtcgtcgtcttcatcctcatcctcacaggctcctggccaaccaccagggaaccaagcagaacacggggcagtgaccgtggggggcacgtcggtggggagcctgggtgtgccgggtagcgttggtggggtccctggagggactggcagtggggacgggaataagatctttctgtgccattgtgggaaggccttctcccacaagagcatgcgggaccggcacgtgaacatgcacctcaatctgcggccgtttgactgccccgtgtgcaacaaaaagttcaagatgaagcaccatctgactgagcacatgaagacgcacacaggtctcaagccctacgagtgcggagtctgcgccaagaagttcatgtggcgagacagcttcatgcgccaccgaggacactgtgagcgccggcaccgcctgggcggggtcggggccgtacctgggcctgggactcccacggggccatccttgccgtccaagagagagtctcccggagtgggcgggggcagcggcgacgaagcgagtgcggccacgcccccgtccagcagacgtgtctggtccccacccagagtccacaaggtggagatgggcttcggtggaggtggaggagcaaactgaaggggcaggctactggggtggggtagctttcgggaaagggaataaggagcacgatgcaagggcgctgtggcccccgggtgatctcccaccacacttactgtcttcctttatctctgtggacttgtatatattctggaaggggaaccacagtttcaccatcgcccgcccattctactactcaacccctcccccccaaggtatttccagaactaaacccttcctttccctctgatgggtacactgaagcccctgctccacagagtagattgcacatggagggagggagagggggcgtgttgaacatcctgcagtcacagggtcaggggtcaggtggttgtagtctgtgcctgaagtctgtgtttgtgttgtcgtggagacaaggcctttgagccccacccttgtcctagaacctaccccctctcaaggatgcgctctttatttctaccctgtctctccccgccacccccgacttcccgtggaaattcccaactcggttctcatggaggagtgggtggagacaaggagggagtaagtcgtaggagtacaaggtttttattttttttaacagtgattaaaatatttattggtcatttacttggcttcccgataacccgtgtgtttgctggggacgcggcacagatagggggaagccggagtaatggttttcgggcaagtggatgttggagagcacacacaggagttggggggcgggggagggcctggggttggggagggctcgaactcggggctgctgggtagtccaggagggcgcggtaaggctggggtgtcctggtgagaactggagaggatctacccgggtccctgcctggccagtggggaaacaccggtccc

SEQ ID NO: 35944 - DNA, 2300 bp, Homo sapien
gatctccaatgaaaagaacctggaacctggcaaacagatcagcagatcttcaggggagcagcaaaacaaaggacgcatagtgtcaccatcgttactgtcagaagaacccctggccccctccagcatagatgctgaaagcaatggagaacagcctgaggagctgaccctggaggaagaaagccctgtgtctcagctctttgagctagagattgaagctttgcccctggataccccttcctctgtggagacggacatttcctcttccaggaagcaatcagaggagcccttcaccactgtcttagagaatggagcaggcatggtctcttctacttccttcaatggaggcgtctctcctcacaactggggagattctggtcccccctgcaaaaaatctcggaaggagaagaagcaaacaggatcagggccattaggaaacaggtaataacaagaggaggaggaagagggaagccaaggagggattgcaggggactttcggagagcaatactggggaactgagtctgctgggagagactggactgcccccctccagcctcagtcttcccgtacccctccacatatttatgtttctgtttctagctatgtggaaaggcaaaggtcagtgcatgagaagaatgggaaaaagatatgtaccctgcccagcccaccttcccccttggcttccttggccccagttgctgattcctccacgagggtggactctcccagccatggcctggtgaccagctccctctgcatcccttctccagcccggctgtcccaaaccccccattcacagcctcctcggcctggtacttgcaaggtaagaaggggagggcgtgtttcctctgacaatttgttctctttcattggctgtttcagctgctctgtctgaatattccacgtgccacatcctgtctcttcctttttcccacccattttatcctctaaatcctcctgtttcttttctcctgtactccagatctctttgactctttgtctctcacttccctgcagacaagtgtggccacacaatgcgatccagaagagatcatcgtgctctcagactctgattagctgcctccccttctccctgcctccagaatgttctgggataacatttggaggaaggtgggaagcagatgactgaggaagggatggactaagctaatccccttttggtggtgtttctttaaaaaaaaaaaaaagcttaagttttacacagaaacattaataaacaataaagttcttttcttactgtatcactgtctttttcttgtccttctactgttacagattggcattagctgtccccttgctcagggttagcccagtatccccggggtagtcccgctctgtcctttctagcctggcctttttttttttttttttttttttgtctcgctgtgtcgcccaggccagggtgcagtggtgagatcacagctcactgcagcctggacctcccagtctcaagcgataatgcctcagcctcccgagtagccgggactacaggcgcgtgccaccatgcctggctaatttttgtttttgttgtttgtattttttgtagagacggggtttcgccacgttgttcaggcagtacttttttttttttttaagtgcttcagccgccttaacgcactttactttttcacttcgtgcagtaggagtgagaaagccaatgaggggccgactcaaggttatttagccaatccaggcccggagaaagggggcggggcttcagtgggactgtaaggagctaggaagagggcgattagatcccaccaaccagctaatggtcacagctcagaggcggagcctggggaacgatacctggacccatcgccaatgggaaaaggcaggcttatagctttaaaggggaataaatgcttcggccgaaccaagtcctgagctcccagcggaggaggggacctgatcttttaaggtggaatgtggcgatgtttctttaaaggcaaagtggccgagtcggccgagtattgcccagcggcacgggcggggtgcccggctgtgcctttaaaggcggaggggcgggaggcggagcggaggcggagggcggagggagtcggcgcaagatggcggcgggaggggcccaggttgctgctctggccgccgagtgaggggcggggggggcccgggggcgcgcggcccggtaagcggggacgcgcgaggttggggggcgccttccgggtgggagaagaggccgaggtagcgcttggggcggagcgggggggggcggggtccgttgtgggcggaggtagacaaggggcggggtcgaaaggcccga

SEQ ID NO: 35945 - DNA, 2300 bp, Homo sapien
gagacggtttctgaggtgggggccggacggtgcggggatcagaggcgggggcggggatatagagggagaggtattggggagagctgggcgctgagtctgaggggaaagctgtggtaccttcctgtccctgaaagggagtggagcggccgggggctgaactgggggagggggatttggcgggaagcgcatctagcggaccggccggacccacggttgggatctaagaggaatcgcgagagcgtagcgcggtgcggggggacttttgatcagttacgggtcaccgagagaatggggaaaattagggtggggtgaaagggaggggacttgggtaaaatatcttcaacctaaagccccagtttgaggagactcatcggagggtgaaatatggagataattcaaggaggagaaaagagaacggactgttgggagggaacctctttcacctcagagagtctaggagttggggtgatcattcaggatagggtgggtgtggggttgacttgtttgagagcagagggggcaaacacatgaggtggcgcccacaggagtgtgttgtctgtgcaagggggtgtcaggacgatttggggtgcagtgtgggaggaagaatcaacttgccaactctaagaaataggggggaaatgcaacagaaagaccggaaatcgacgtgaggggtggagcagaaggtggcaacttaaggtgtgggggtggtttgccccccccccacaccacttgaagggccccaaaaagcatatagaactaatggttattgaaatcaggtggtgaagacagtgttggtcagggctggatgttactgaaacccaaggagttcagaaaatgtgtgaggtgaagggatggggctatgctggaggggctcattctgaggccccatccccttccagcaggaattctgaaatccccaccacttcctccctccgggggatttgatcccctatggccaccgctaacagcatcatcgtgctggatgatgatgacgaagatgaagcagctgctcagccagggccctcccacccactccccaatgcggcctcacctggggcagaagcccctagctcctctgagcctcatggggccagaggaagcagtagttcgggcggcaagaaatgctacaagctggagaatgagaagctgttcgaagaggtgagctttagcggggaagattgttgtaccccagggagggggatggctgactggttctcctgtcctttctttcccactaaccccacctcccctttctctcaaccccctcccttgtctctcttccccttccttcttcccctgaaccttctagttccttgaactttgtaagatgcagacagcagaccaccctgaggtggtcccattcctctataaccggcagcaacgtgcccactctctgtttttggcctcggcggagttctgcaacatcctctctagggtcctgtctcgggcccggagccggccagccaagctctatgtctacatcaatgagctctgcactgttctcaaggcccactcagccaaaaagaagctgaacttggcccctgccgccaccacctccaatgagccctctgggaataaccctcccacacacctctccttggaccccacaaatgctgaaaacactgcctctcagtctccaaggacccgtggttcccggcggcagatccagcgtttggagcagctgctggcgctctatgtggcagagatccggcggctgcaggaaaaggagttggatctctcagaattggatgacccagactccgcatacctgcaggaggcacggttgaagcgtaagctgatccgcctctttgggcgactatgtgagctgaaagactgctcttcactgaccggccgtgtcatagagcagcgcatcccctaccgtggcacccgctacccagaggttaacaggcgcattgagcggctcatcaacaagccagggcctgataccttccctgactatggggatgtgcttcgggctgtagagaaggcagctgcccgacacagccttggcctcccccgacagcagctccagctcatggctcaggatgccttccgagatgtgggcatcaggttacaggagcgacgtcacctcgatctcatctacaactttggctgccacctcacagatgactataggccaggtagggggttggtgggatgcctctcagtgacccttatatgtcaggtatgaggcggatggggcatctctctagtcctttctagggtttttactcttctagtcccttcaagggctgagtgctctgactttatgtcttcccacgtaggcgttgaccctgcac

SEQ ID NO: 35946 - DNA, 2300 bp, Homo sapien
gattacaggcatgagccaccgcgcccagcctccacaaaaaactttttttaaaaaaattagccaggtgaggtggtgtgcgcctgtagtcctagctacttgaggtgggaggatggcttgagcccaggaatttgaggttacagtgagctatgaccgtaccaccgcattccagcctgggtgatagaacaagaccctttttttttccttttttttttttttttttttttttttttttgagataatctcgctctgtcgcccaggctggagtgcaatgacgcgatctcggcttactgcaacctccgcctcccggattcgagcggttctcctgcctcagcctcctgagtagctggagctacaggcgcctgccaccacgcccagctaatttttttgtatttttagtagagacggggtttcaccatgttggccaggatggtctcgatctcttgaccccatgatacgcccacctcggacccccaaagtgctgggattacaggcgtgaaccatcgcgcccggccgaccctgcatttaaaaaaaaaaaagacaaaagaaaggaaaaaaaaaaaaaaaaaaaagaaaaggtggtattcatggtgccttggtgaaagaaacagggtacatttccctttattttaaacaggtaagattacccccaggagatttcatggttgagaactatacttttgaggggggaggggaaaaaagagaactattcttttttttttttttcttaagagggtgactctattgtaaaaggagaagtgaagaatgagaacctgtactgcaggtgtttccttaggaagaccaattttgggaaagttgaggttcttgaaattaaatcccttacatcttccaagtcccagtcctcgcggagagtttttatgttccccattttgaaagctgtagactttgacgactggagagaagtgatgtgggattgttcaacggacgggtgtttgcgattctaggactcagcgttagggatctaataagctctgtgaccctagttaagtggcaagatgcccaccacttgtggaaatgggaatcttagcgattgggaccctgttaatctttctggtttcctcataagctcacctctggacccagccttgcctccacgagtccctccagcctccctaaacacaacgaggtgggtatcaaatctgtttcttcatccttcattcttttttcccctctccccgaagaggaggaggaggagacccaaagtattttatgagcctcatttcgcctcacagcagccctcgcagcggcaatttgcacaaactctcctccaagccccaccccatcatcgcccatccgcagaccctaggcctcccacgacaaagcacggccacctggtcagcacagacggcccttcgaggaccccctctggagaagaaccattcaggtcccaacggtctggctggtcattagttctgtggtgaagcttgaaaagcaaatcagcaacaatagtaataacaataacacttttatggcgcgttgtgctcatttgtacgcatgtgttataacgatcgcgggacgcagcacctggcagtagaaacagctgctggacagcggcaaggagcgcgccgcccttgcaggggaaggggctgggtcagccgaataagccgtggaaatgggaacctgggggacaggaaagcagggccagatagcttgccaatagcccaactgaaagaaaaggttttacttcccttttaagagacttctgcccttccctgaaactctgcacagctttggaaagcccaattcctaatccaccctgttcggttcccctgcccctccttggaaacgaggctcggtcctccctacgcgctactctccggcggttgggccccaggcaggaagtttctgattggcggagtcgtagaagcaccgggtgaaaagagctccactggctgcgcaccggagtccgggcgtagccagtgccgtacggcaaaatggcggcccccagctgctttgggacgcctgggttcggggagacaaactccgacctggaagagaccgctgactatgtgggccgcactggaggtgttcgcggggcgggcctactgtcacctccggccacaggaagcctgtgttccgtacgacaatatggcggcgcttagttgcatgaaggcggaaactctgtgacttccggtccgtagtggggcctgcggtgggagtgggaaggaaggcggagggaaccatgcgaggttctgagaattgcggcgagggtcgcctcgagagacggtttctgaggtgggggccggacggtgcggggatcagaggcgggggcggggatatag

SEQ ID NO: 35947 - DNA, 2300 bp, Homo sapien
tttgtatttttagtacagagagtttttcaccatgttagccaggatggtctcgatctcctgacctcgtgatccgcccgcctcggcctcccaaagtgctaggattacaggtatgagccaacgcgcccggccaccaaatagtgtaatttttacagttacactttgtaactagtgttgctgaagacggaaatgcaattgattttgaaaattgattttttcctcttactgattttttatccatcaaccttgctaaacttatttatcaattctatctgaattttattttagggatgctgcacatgcaataatttcatctgcgaatattaacattaatgtttcttgtagtccttatatatttgttgcttattggactggctacaacttccattgttttattgatgaggattattgagagcaggcatccttgccttgttccccatcttgaaaggaacgctttcaacatttccccattatggtgatgtgttttgcgaaatttttgaagatgtcctttatcagcttctggagttttaaaaaaaatatcaacgggtgttgaatattttgagtgactttgctgcatcaattgagatgaatacattttccccctttaatctgctaatgggtctatatttctccattccatttaaatttttttttaatttgataaatatcttttgctatatgtttcttctcaggtctcccttctcagttatccccctttaccttccattgttggttttctctagtttcttccttttctttttactgtgttctcttcaagctcttgctttttggagttttcccaggatatcaaaggttggggggatggcaacatggttttcagacagtgtgtctccccacaatctgcttctctctacaagcttgtttgaagccaagttaaagcaatggatagaagacggcagcgcgggtgtcagacctgccaatttccaactgcacaccaaatccccgaacatatgcttgaggcccctgcctttcggtttcataaataaaaccctgtcctgactacctccaggattggatggaaactcggatgagtaaatatggtagaacgactttgcaaactagcaccctattcacacgtaaggggttgctcttgtcaccgagactgttagaggcaacgtgagttaacagaaatagcttggattttgaagctaatggaatctagatccattcctaaccagcagtgtgaccttattgtgtaatctttctgaacctgtctccatccatctctacaaagaatgtggcacaatgtaggaactcagtgaattttcgtgattaaaagacgagataatacaggtgcacaatctgcaaaacataaaatactccataaatggaagcagtaaatcttccccgagctcgagactccaaaggccctgagcccagtaccagtaacagcacccaggtaagtaggctggctgagagaagagggctataaagaaaagttctttcctgagctttgaatccccactgtcaggcttcaatggagcgcaaaaattcctaaatttggtgagaaatggcaacattaccagggaatgaacagaccaggccactcacatccacgtgagggctccaggagccacttccgggcccagtcaaccacgaccaggagaggcagcgctggagcctcaatcacgtcgacggaaaacaagtgcgctccctactgcagtcaccaggaggcgctagtcccgcctgtctcccggcacgggtcctcgtttgcgcacgcgtcatttctttcctccagcgtccccgccccttctcctccggccgccaccagtttcgcttggccagttgcgttcgtgcggcgacgtccacgcattttctgacgtagcgagcgacggcggggagccgagcggaagtccagcactattgccgctagaggaggggaggggtgagaagcataagtggcaccggaagtggaattaatccgcctacctctcctgcgcctgcgaaacagaaaagacaaggcgcctgtcgggcggggtgtggcttcgggtggcggagaacgctgcgattggccctcggctgtggcgacagcgacgattggtccctgcgtgcagagcgcggtgagagtgggtggtggccgttggaattcaaaagtggcgggtgtggcgcggggctggtagcggccggagccgtgcgagttctctaccctgcttcgcgagcgggcgagagaacgcgagtcccaggatccccggcacccagttctcttccactgcattcccccggcgcgtgtgggaccgaggtggacatggatccgcaggtgagtaggggcggcgcaggtgtcc

SEQ ID NO: 35948 - DNA, 2300 bp, Homo sapien
aaccccagcactttgggaggctgaggtgggtggatcacgaggtcaggagatcgagaccatcctaacacggtgaaaccccgtctctactaaaaatacaaaaaattcaccgggcgtggtggcgggcgcctgtagtctcagctactttgggagtctgaggcagaatggcttgaacccgggaggtggagcttgcagtgagccgagatcgcgccactgcactccagcctgggcgacagagcaagactccgtctcaacaacaacaacaaaaaaaagagcctccttcagattggtgccagtgtcctttagacagaactctagtagtcttttcagattcaacttgtacatttccttccccagacttcaactgatccattttctaaggagtcctagttcctaaatgggtgttattactattttatctcggtttaagtgttttacagtgggagaggttggaggtctctagtacagggtattgctggaaatgaaagcctcctttctctgctcctgtattttcttctggggcttccatctcttctcaagccttttcacctcctccaaacctagtgtgcagaggagaacaaaccataactggcaccagcctgaaccagcctttggaggccttatttcggtatttctgagggcagccctagcattggaggatgggagatcttgggaaaaatgttgtattggttacgctgcaaacttttatcctgtctaaccccctgcccccaggtgaaccagtgtgttattggtactgctcaggccaacaggaagtgaagacggatccagatctgtgtgtgtgtgtgtgtgtgtgtgtgtgtgtgtgtgtgtgtgtgtgtgtccctatgtctatgtatcgggtgaggggtgggagggttgctggagggtgctttattgggtggagggcaccatgtcccagggctatcaaataaagaatagtttggttttttttttaaataaaggttttattagcatttgcccaagaaggcagatactttcatatctgtaaaagtgggagctgtgatctgtaccctctgccaaacgtttacgtgggaggcgggagcgggggctgagggcttcgtcttttctcccctctgctatcaccggttctggaccttggcctggatcatcttcccctctgctaataccccctaccccgtccgtcacatcagggaggtgtgccctctagctatccacgccccctccttggtcactagttataggtaactttcacccttccgccggccaccccagccccagggaagaacgttcctttggtgggtgtcggcaaatggggaccggaccccagagtccagaggcggggctagcgcgcgctcccaaactgttggctctttcctcccgtcccgccctttccctgcctttccgttcgaacggctggggctctgcccgctcgctgcccattggctggctctcggtggcgtcaccgccttgggtcctcgcgcccttcgtctgcgccagccctggaagcacggggcgggacgtccacgggaagcggcgcgcacgcccgccgactccctcgcgccaaccgccgacggccgccgcccggtgaaggaggggctcagtcctcccaggtgccgcgcgcaggaggggacacgcgtgcgcaaaagggcggtgggtggggcgcgactcgtcacggggagggcggggcgcgcgagggaggagggcgtggtgggggcatcgagaagggtgaatggagggcggggctgtgaactggggccggggggcgggacttggagtgaccatggggggtggggcagctaacggatgtggcatggggcgggggaccaggccggaggcgggctgccgggaggggggattccctcgtgccccaagggcgaatctcaggtcggaggaaggggctgaggggattccctctcccaccgggtccgactcttcgctccccaagccgcggagggccagcctcttcttcggcgccctccaggcctgttggaggtgagggaggtggggtgaggtggtgcccgcccccccctccggctcctcctttcccccagtcctcccctcccaccaccctcccccccaaccggtccgtccctcccctccctccctcccccccgccgcctcctcctcctgccgctgccgctgctttggctgctgcgtcatacgccccagagccgccgggacggaggggctgggcctggggaccccccggcctccgcctgcacgcccccccacgcccggacgtgccctctccgcgcgggggactcgcctaggtctcctacgtctgcccctgcccggctcccggcggccccagctgtcaccgg

SEQ ID NO: 35949 - DNA, 2300 bp, Homo sapien
gcaggaccgcgggagcccgccccccactcatgcggcctacgctggtacaggagagttgatctcaaaggccacacgtcacacggagaaacaaccccaggaagagcggcctcttcttacctgggtggcagccacgtgattagaaaacagcgcgcaccatgtgacagtagaagaaggaccacctgcgcctccagagccagccaatcccgaccctatcatggcgcggtttgcccacctcctgatgaaggaggagccatgggagacttgaccaatcgactaccgcatctgcagacgtgcgcggaaatggcacgcccgtttccgtgtgaacccgaaactgccacttgctggctgaggagagccgctgcggcgttccactgtcacgtgagggggccggtcctcttcggcggcggcactcagtgagtgacgccaagtggccaatcacaggccagcctcgcaggccacgtgaggcgagagctggttccaggaaaggggggccagagaccccgcagagtcgatgcgtcaggctgtggagtggggaatcatccttaaaccccacaatgtgcctagtgacctcccctgcactgtttccgaggtcttaaggagtgggagggtctgagaaggacccttcaccccaaactcaggggttaagagagcgccccctgcccttttagttgggcagagatatgcctgggtttgggaatgaacaacggtgatctagaagcccgctgtccctgggtagcagggagtgattaggcaggcacgggcatggcaagacaatagctagctgaggaaagaagcattttaaaacagagcgagaccctgtggtagaggatggtgaaaatggggcctagccatcttaattgaaaacccaaagcttgagacagactactgaatcagagggaaggagaacgagggctgcaggatggggacagtggtgatggtccttctgtcccctcttccctgcctattccactccccaggattggtccacctctcagcctcgggtctcctttccctaacccatcccccaaggagccaggacctgccctacataacttccctggggcccaagcacatcctgtgacccaaaaatggagagaggggccaatgagaggcagagaggtgggaggaggtgcagagaaaaaagctcttgccactgcccccacccaatatttcccctcccttcaaggtctgaggtcattggtctggtggtggggatgcctcggagtttcccaggctgacgtcagggttatacctctcggaggttctagggcagggaagtggggaggggaggttccctgagatctctgtctttgagtttggagtttgtctctgagacagatttcggaggggtctttcagtatttgtgtggagatctttcttaggattgagtttccttttatgcttctggtttggggggtttctatgtttcagggtctgtggtcgcactctgaggtctttcgaagtcttcttcatgaattttgggtctctgagttgtccatctccggaccagctgaagtctctatctccccttaagtcaggagtgtctctgtctctaagttatcagtctctgagatctgagtctggggtctctttctaggtctgagttctctaagctctaattctacatctggctctttctgaatctgggcctcatctttttctgagtctaggtctcaggtcctggtccctgaaatcatcatctcagggtctggagtctaagatatctgtaggtatggagaaccctttttagactggattttcagattttgatattgagcttctctctctgggggatctggggtcgttttttcctcaaatcaggagtctcttttcctctagattttggccctgtgtctcaaattaccccacagtggggggtggtgaagtatctttctctgtgggtctagggtctctctgtctcagggtctggggtctgcatctttaggacctctgtctctctctggtgtgtttttgagtcaggggtctctctctctctcacaatctgggcctcccggagtaggggtgggggctgcagagtctctccctcctcctcctcctcctgctctcttcgctctcgctcgctcccccgccccccctctctctcggctgccgctgctgccgttggctcttattctcctcctcctcctcctctctcctcctctctgcttctctctgctcctctctcctcctctctcctcctcctcctcctccacctcctcctccttctccccctctttctccccctctttctctcttctttctcccccgtccccccgccccctccccccaggcctgatgag

SEQ ID NO: 35950 - DNA, 2300 bp, Homo sapien
ccctgcccctccccctgttgccccccatatggccctccccctccccccaccacgtacctctgaagggggcataggacatcgcggggatgctcccccgatggatggaggctcgagacctgctcatcaggcctggggggagggggcggggggacgggggagaaagaagagagaaagagggggagaaagagggggagaaggaggaggaggtggaggaggaggaggaggagagaggaggagagaggagcagagagaagcagagaggaggagagaggaggaggaggaggagaataagagccaacggcagcagcggcagccgagagagagggggggcgggggagcgagcgagagcgaagagagcaggaggaggaggaggagggagagactctgcagcccccacccctactccgggaggcccagattgtgagagagagagagacccctgactcaaaaacacaccagagagagacagaggtcctaaagatgcagaccccagaccctgagacagagagaccctagacccacagagaaagatacttcaccaccccccactgtggggtaatttgagacacagggccaaaatctagaggaaaagagactcctgatttgaggaaaaaacgaccccagatcccccagagagagaagctcaatatcaaaatctgaaaatccagtctaaaaagggttctccatacctacagatatcttagactccagaccctgagatgatgatttcagggaccaggacctgagacctagactcagaaaaagatgaggcccagattcagaaagagccagatgtagaattagagcttagagaactcagacctagaaagagaccccagactcagatctcagagactgataacttagagacagagacactcctgacttaaggggagatagagacttcagctggtccggagatggacaactcagagacccaaaattcatgaagaagacttcgaaagacctcagagtgcgaccacagaccctgaaacatagaaaccccccaaaccagaagcataaaaggaaactcaatcctaagaaagatctccacacaaatactgaaagacccctccgaaatctgtctcagagacaaactccaaactcaaagacagagatctcagggaacctcccctccccacttccctgccctagaacctccgagaggtataaccctgacgtcagcctgggaaactccgaggcatccccaccaccagaccaatgacctcagaccttgaagggaggggaaatattgggtgggggcagtggcaagagcttttttctctgcacctcctcccacctctctgcctctcattggcccctctctccatttttgggtcacaggatgtgcttgggccccagggaagttatgtagggcaggtcctggctccttgggggatgggttagggaaaggagacccgaggctgagaggtggaccaatcctggggagtggaataggcagggaagaggggacagaaggaccatcaccactgtccccatcctgcagccctcgttctccttccctctgattcagtagtctgtctcaagctttgggttttcaattaagatggctaggccccattttcaccatcctctaccacagggtctcgctctgttttaaaatgcttctttcctcagctagctattgtcttgccatgcccgtgcctgcctaatcactccctgctacccagggacagcgggcttctagatcaccgttgttcattcccaaacccaggcatatctctgcccaactaaaagggcagggggcgctctcttaacccctgagtttggggtgaagggtccttctcagaccctcccactccttaagacctcggaaacagtgcaggggaggtcactaggcacattgtggggtttaaggatgattccccactccacagcctgacgcatcgactctgcggggtctctggcccccctttcctggaaccagctctcgcctcacgtggcctgcgaggctggcctgtgattggccacttggcgtcactcactgagtgccgccgccgaagaggaccggccccctcacgtgacagtggaacgccgcagcggctctcctcagccagcaagtggcagtttcgggttcacacggaaacgggcgtgccatttccgcgcacgtctgcagatgcggtagtcgattggtcaagtctcccatggctcctccttcatcaggaggtgggcaaaccgcgccatgatagggtcgggattggctggctctggaggcgcaggtggtccttcttctactgtcacatggtgcgcgctgttttctaatcacgtggctgccaccc

SEQ ID NO: 35951 - DNA, 2300 bp, Homo sapien
agatccagtcaccaagtgtggaggggccggggcagaaaaagtgggcaggcttagggggaaaaggaggcccgcccttcctgggaggaggcggaggggggaagagggaggggaggggcggcgtgggccagggaggtctgacacacccccacctcccctagatacaccccctactgatccgggaccggaggagcgagtccagtcgcaacaaactgctgagacgcacagtctccgtgccggtggaggggcggccccacggcgagcatggtacggcggccgagcaggctctcatgacccggacaggcgcggggagagggctgaagatggaccgggctggcggggcgggggcgtcggggagcggcgggagctggccgggggcgggagaaggcggagacaaagtcttgcttcccgaggggagatggcgccctcctctggaaggtggagcgggacaggggctgtgggtgagaggcccctgtgggtcctcgctcggcttcgctccctttctcctctccagcagtgaagtttgactattttcctggtgcttgtaaaaatagtctccttagatctttagcttccagtccgtgtgttcctgcccctgcccctcccagcccctggtctgggatcttggaaagaatgacctagttcctgccctccccccagacctcttccccacccctatgctcctgattcttcttccggaccttcagtccttgaggtctccttttattaccccctgttttctcctctcatcagctgcttctattttctgcaattgtatcaccctttctctttcctccctgatttctcttattttctgtacccctcttgattaccccgtccctcccctctgctcccggcgaaagtccatcagactcccatctcatctcctttctgtctgtagagctatctgcgcggtctgtctctccaactctctccctctctccatctgtctcttcccctccctccccctttctgcccccccaaccccctctttagtcatttaaaaaaagatttttgtcttcctgagaagttcgcttaaaaggtttccatgggaacagtgaggggagatgaaggcagagaacagagatctgcagccaaggtgcagagagacgccctcagcccccggaaaccccctcgtcactgcccccttccacttcatttcccttcccggacctagcgatccaggttccccattcctccaacccccaggtgacccctttttcccaccagctccccctcccttcaggaattcaagctaccagtttctctcccttagagagccagtgacctgtccccatcctttggctccttccagccttctgataggtccaggccctactagccttgtgggccggtttggggaccttgggtgggtgggtgggtggtcagggatgtgtgtcattgtcatggaaaccccataccatcggggtgtgtgggtagcacatctctgtgaggcaaagtcaggtggtggtggagtgtatacagagaatgtgtgtgatgtctgtcacatctgtgtgtatatgtatatgtgtgtatgtcatgttcatgtctggggaagatgtgtgtgtttgtgtgcatgtgtgtacacctgcgtttccaggccagaatggtcacatgctcacagagcatgtttatcatgtgtcctgtggttggcagatctgcccacttattccccatctttctccttatcctgagtcctcagggtctaggggtctctggcgggggtctcccgtgtgttttgggtggggacaccgtgtgtgtttggagttgaggtggcatgtggaggttgctgtattggggttcagtaggggctgggaggggttccaggggcatatgtatttggggggagggcttagtgaaagttgatgggggtgaacgtttagggtcttcaggcagacatggaatgtgtaaagggcatggaggatgtgcagtggacataggggtcgttgggaccttggggacttggcaatgccaaggtgtttgctgaggctgtggactctccagcccgggagaggtcgccggacctttgaggggcattggaatcctgggctcctcctctgctgggtggagccgcgaaccctcgttctctccgcggttttgtgtgtgtgggggggtcctgctcaggaggggatggtgggtggcctggtttgttttgggggtccccttgcccccctcccccgtctctctcgcgctgtctccgggcgacagggctcgtgacagaggcggccacggcagcagcggtcgcctagcaacggcggcggggcccgggcaacggcggcagcggcgggagcggcggcggaggg

SEQ ID NO: 35952 - DNA, 2300 bp, Homo sapien
ttaaatttactccctccccacccagaacccagatggggtggagggggccaccggggcagggagggggcggcaaggggggaatgggagttgtctccccttctccccacacctgatctgctctcggctggtcccagagcggggtgagggggcttatgcccccccctcccccagtgtgttgggtggggtggaattgaggttagggtgaggggtcagggtttaggagggtgtgtatgttgggaggacaggctagttgatctgtcctactctgacacacagtcccctctgccccttccttctctcttcttggtctctactcccagggggaggggggaacttactctaggaaaagccatgtctctctcccccagggtggggggacctgtgttggaggaggggtgttggggggcccccttccatgactctgtcccctgggggaggtaggacagggctgggcttccctctcatcctccccctcccaatctccttccacctccctccctcccgccagctccacgatttttcggtgtttctctgtacatagttttctggcgggataggggaggtaggatggatggggtttggggtgggtaggccatgggaggggagaagcccctccttggcaccccctcttccctgactgctgtcccctacccagccttgcccccttcatccttttgcgtttggtattgagactctcctagactctactcctctttcttttgtatggacagttccccttcagtcccatccccctacacatacacccagccggggccaaatttatacttatataaaagttgtaaatatgtgaaattttatccctgtgccctttccccacctcaggccctacccctggaccctccccaaccttccttctctcttctttggctgttgtaattatctggggtttgtactgtacatatccggggtgtgtgtgtgtgggctgggggcaacccttctgtacagagcttcctggccccctccccccccgcccctctgcttccctccccacccaccacctcaagggtagggagttgctcttcctacctgttttattttgttttctcgttctccctccccaccccactcccagccttatctatcccccctcactgtccccttttctccactcccagccccatttcctttttttctggagtgtgtggtgaaacagaaaaaaacatgtttaataaacggagattgttcttttatcgctgtgccgactttcttaggcagggctctccagacctgtacggtggtaagatctgctttctgaaaggaagctgacagcctgagaggaaaaccgtatatccccacctgatgccacactctcctcatagaatgtcactctcccctcccaatgagattttttatattttagagcaggagttttgcaccggccaaacttctccaatctaactctcccctcaccactgtgtcacttagtccgaggccaggaacagcggcgttatctgataaaagagttcatgtatatatccacatttatctcttttaaaaattacctagaaataaggtttctttaattgctggttaaaatgctcccgtgcagaaaacaggaaagaacctgcctggttccttagcaaatctgagttccagtcccaggtccactactattagctgagtgacgcttccagcccgtttcccccgcctggaaactgaggacggcaacccccaccctcgcagggccggtgggaagacacaaagtgatgtgggcaagtgccaggcccacatggtaagtacccaactaatctcgcccctctcaggacctaccgggggcgggtgctacacttaatcaccgggaaacgcagctttccggggcggctgacggcccaccccctccgaccgggctgttctctcccgggccctgcctctcggtcctctgcagcggggaggacttcagcagctccccgggacgcccgttgcgaggacaccctgggcctgtgccctcctactagcaccgccctcctcgtctgcagtagccaatcaacacgaggcttgtaggctgccgttcctcgattggctacggctctagctccgcccgccgcacttggcgacggtgtccggcggggaggcggcggcttccggtctgggacggagctgtagcggcactgtaactgcgagggcagcgccgcgtgtgtaacggcgggggcgtgtcggcgggaaggacaatcgggccgggactcgcggtgtccgggtgaccgcggcttcccgggagcagacctctgtgggcactgtgaggcggaacggagcggcggggcaggagctgttctgggcaggtg

SEQ ID NO: 35953 - DNA, 2300 bp, Homo sapien
cacaactctgcctcccgggttcaagcaattctcctgcctcagcctccagagtagctgggattacaggcatgcgccaccacgcctggctaattttgtatttttaataggggtggagtttctccacgttggtcaggctggtctcgaacttccaacctcaggtgatcagccagcctcggcctcccaaagtgctgggattacaggcgtgagccaccgtgcccgaccaattttttttttttttttttgagacggagtctcattctgtcacccaggctggagtgcagtggcgtgatctcggctcactgcaagctctgcctcctgagttcacgccattctcctgcctcagcctcccatgtagctgggactacaggcgcctgccaccatgcccggctaatttttttgtatttttagtagagacggggtttcaccatgttagccaggatggtctcaatctcctgacctcaggtgatccacctgccttggcctcccttttgtgtatttttaaaagagacggggtttcgccatgttaggcaagctggtcttgaactcctgacctcaggtgatctgcctgcctcgggctcccaaagtgctgggatgggattacaggcgtgagccaccgtgcccggccttttttttttttttttttttttttctagagacagactctccctctgttgccctggtgcaatcatagcttactgcagcctcgacctcctgggctcaagcaatcctcccacctcagcctccccagtagctaagaccacaggcatacaacaccatgccttgctaattttttttttttttttttttttttttggtataagcagggtattgctgttgcccaggctggcctggaactcctgcacctggcctcaagcgatcctcttgccttggcctcccaaatggctgggatgggattctaggcgtgacacaccgcagctggctgccttttttgttgttgttgagacaaggtcttgctctgttgcccagggcggaatgcagtggtgcaaacatggctcactgtggcctcgacttcctgtgctcaggtgatcctcctgcctcagcctcctaggtagctgggaccaccaaatgcacaggtgtgcactaccatacccagctaatttctaatttttttttgtagagacatggtctcactttgttgcccaggctggtcttgaactcctgggctcaagcaatcctcccacctcagccttccaaagtgttgggattacaggcgtgagccactgggcccagcctctattgagttttaatctccgtttacttgactatcaccttcaggatttcaaacatccagagaccaccaaggtgcatggtgcacaggtctaaattgcaggttgaatctcaatctagtattagtattccccaatgcgactacagaactgattattactatttattttttttgagatggagtcttgcactgtcaccagggctggagtgcaatggcgcaatcctggtttactgcaacctccacctcccaggttcaagggattctcctgcctcagccttccaactagctgggattacaggcgcccgccaccacacccagctaattttttgtatttttagtagagacggggtttcaccatgttagccagaatggtctcgatctcttgacctcgtgatctgcctgcctcagcctcccaaggtgctgggattataggcgtgagccaccgcgcctggcccagaactgatgattaacccagctgagcctctgttcatctgaatgggtattgtcaacagcactcacttacaagagttgctgagaagatccaatgagacaaatagttgctaaagtgccaggcatgcagcagtgcttaagaaacttctcaccctgggttttttattggtattgattgatgtagaggtgggggagaagatcaaagacaaggattgagaatcagggatgggaaaagcagtgggccactgacagccgccctgcctgcctgggaggtggggtggggaaagtgggcgggacatgctcctgggcctggcccacccagatcaccctacaggctgtcggcctgtgcgtctgcatccggtggccacagagcaacttcctctagagggagctgattggagccgggtgccgctggcacctctatgatcactggagtctcgcgggtccctcgggctgcacagggacaagtaaaggctacatccagatgccgggaatgcactgacgcccattcctggaaactgggctcccactcagcccctgggagcagcagccgccagcccctcgggacctccatctccaccctgctgagccacccgggttg

SEQ ID NO: 35954 - DNA, 2300 bp, Homo sapien
aggctgcagtaagctatgattgcaccagggcaacagagggagagtctgtctctagaaaaaaaaaaaaaaaaaaaaaaaaggccgggcacggtggctcacgcctgtaatcccatcccagcactttgggagcccgaggcaggcagatcacctgaggtcaggagttcaagaccagcttgcctaacatggcgaaaccccgtctcttttaaaaatacacaaaagggaggccaaggcaggtggatcacctgaggtcaggagattgagaccatcctggctaacatggtgaaaccccgtctctactaaaaatacaaaaaaattagccgggcatggtggcaggcgcctgtagtcccagctacatgggaggctgaggcaggagaatggcgtgaactcaggaggcagagcttgcagtgagccgagatcacgccactgcactccagcctgggtgacagaatgagactccgtctcaaaaaaaaaaaaaaaaaattggtcgggcacggtggctcacgcctgtaatcccagcactttgggaggccgaggctggctgatcacctgaggttggaagttcgagaccagcctgaccaacgtggagaaactccacccctattaaaaatacaaaattagccaggcgtggtggcgcatgcctgtaatcccagctactctggaggctgaggcaggagaattgcttgaacccgggaggcagagttgtggtaagctgcgattgcgccattgcactccagcctggtcaacaagagcgaaactccatctcaaaaaataataataataataaataaataaaataaagccggttgtggtggcgtgcgcctataatcccagctacttgggaggttgaggcaggagaattgctgaacccaggaggcggaggttgcagtgagctgagattgtaccactgcactccagcctgggtgacaagagtgaaaccccatctcaaaaaaataaaataaaaatagggccgggcacggtggctcatgcctgtaatcccagcactttgggaagccgaggtaggtggatcacaaggtcaagaggtcgagaccatcctggccaacatggtgaaaccctgtctctactaaaaatacaaaaattagccgggcgtgatggcgggtacctgtagtcccagctactcaggaggctgaggcaggagaatcgcttgaagccaggaggcggaggttgcagtgagccaagattgtgccactgcactcctgcctggcgacagagctagactccatctcaagaaattaaaaataaaaataaaaacaaggccgggcccggtggctctcgcctgtaatcccagcactttgggaggccgaggcgggtggatcacgaggtcaggagatcgagaccatcctggctaacacggtgaaaccccatctctactaaaaatacaaaaaattagctgggcgccgtagcaagcgcctatagttccagctgcttgggaggctgaggcaggagaatggcgtgaacccaggaggcagagcttgcagtgagccgagatagcccactgcactccagcctgggcgacagagcgagactctgtctcaaaaaaataaataaataaaaataaaaacaaataaataaatagacttagtggggtctgtgctaccacctggacacaaaacctggatgctaagagggaagacagatactgtctggctgctgggagtgttcttgaggacagaacaaacccaggaaggacagaggtgtgtgcagtcctcaatagcccctgccctcagggttcagttccctccctgcctctccctgtttgctccctgccaagcttcctggggctctcacatcttttcctccaagtctccaccccctttcccccaaaatccctgcctgccccccacacctccttccctgcttcatcaaacccctgccccctctacctccaactaatctcccccaacctcccatcctccccagtctttgcttcccagaattctgggaagtttccaactggaggttttaatttgaaaactcttcctgttcttaagcagttggtcctggggtggctgttacaggatctgaattggggaccttctcaggatggaggccccagctccgaagccctgatcatgaatttcaggctgctcctccatgttccgccaccagggtgccatttccctgatgatgagccaagagggacatgtgaggaggagggggccgggaccatctgccttgccgccccaccccttctctgtggccatacccaggggcttctcaaaacggtcacagcagcctcccttaaagctgggcatggggcgtatggtgacctacacctgcaa

SEQ ID NO: 35955 - DNA, 2300 bp, Homo sapien
ctaaatgtttcgaggggcgggggtaaaattgcccccagttgagaaccacttctcctctgttttcctgtccactccacctgccactgtcccagctcaggtccactcctctctcactgtgaccattgtgaaggcctccacattagcccctgccccctcgctgtacatcttaccaggccactctcccaggtctccggccctcgctcccattgccctgaggatgaacgccaagctgcttaagttggcttttaaggccctatgtaatccagcccctgcctgcttcccccgctctcacccacccctattcacaagcgtccttctgcaagccaccctctgctcattcagtctagtgccatatattgaatctgacaccatgctggacactgcagacaatggaaacaaagctcccccaaaacccccgcccgcacccccagggcctgccttcatgctgtgtttgtctcccctggggagagcaagtaaacacatgcagtgaatcctgttagccctaaaaccagggagctgtgaggaaaccagggctggagtaggtgccatggctgagctgtacaggatgggtaggggttatagagggggagagaggaagagagccaacggcaccctggcagtggtgaggcagatgcagtgagaggatggaaggctagggcggtgatttagggctccagcaaaggcagtgagagtgggggtgttgagcgggatagatggtagagagaaaataagctaaacataaatgggtgggctgggtgtggtggctcatgcccttaatcccaacactgtgggaggccaaggagggcagatcacctgaggtcaggagttcgagaccagcctggccaacatggtgaaactccatctctactaaaaatacaaaaattagccaggcacactaacacggtgaaaccctgtctctactgaaaatacaaaaaattagccgggcatggtggcgggcacctgtagtcccagctacttgggaggctgaggcaggagaatggcgtgaacctgggaggcggagcttgcagtgagccgagatcgcgccactgcactccagcctgggcgacagagcaagactccgtcaaaaaaaaaaaaaaaaaaaaaaggcagggtgcggtggcttccacctgtaatcccagcactttgggaggacaagatgggcagatcacgaggtcaagagatcgagaccatcctggccaacatggtgaaaccccttctctactaaaaaaaatagaaaaaattagccgggtgtcacgatgcgtgcctgtagtcccagctactcaggagtctgaggcaggagaattgcttgaacccgagaggcagaggttgcagtgagccgaaaaagctccactgcattccagcctgctccagcctggcaacagagtgagactctgtctcaaaaaataataataataataaataaagtagacaggcgcggtggcaggtgcctgtaatcccagctactcaggaggctgaggcaggcgaatcgcttgaacccagaggcagaggttgcagtgagcagagatcgcgccactgcactccagcctgggcgacagagcgggactccatctcataaaatgaaatgaaatgaaatgaaataaataaaataaaataagataatataaaataaaataaaataaaataaaagggtggactaaacaaggaggcccaggacaatagaggagtccaaatggttcctacttggtcaggaaggtggacagtggggtcatggtgcagactggacacttcccaatcacagactgttcgcctggcaggcatgccctccccttatttcacctgtcaacttcctcctcctgatacaagcccaaatcataaatggtgccttctcctggaagccttctggattcctccctgctggcattgcttgcttccttctctgcactctccaaactatactacagcaacatcatcatctggttcttaactgcgcgggtctgttacggccctcccaccactgactgtgagtttctggaggccagggagctgccttcagcacaggaggccccgcgctccgccgccggtcgacccctgagggcgaggccagagggaacggaaatgtggcacggttcggcagttctcagatgcgagcgcctgcgcaggtacgcacgctccgctggagcctggggtggcctggcagtcgtggccgagacgtgtttgctgcacttcggtgcgcacaggcactgcggtgccaacctcttggttccgccctccccccgcaggcgcccacgcgtgacctcggccgcccacaggccttcgactcttcccggactccaggtccc

SEQ ID NO: 35956 - DNA, 2300 bp, Homo sapien
gctactcgggaggccgaagcaggagaattgcttgaacctgggaggtggaggttgcagtgggctgagattgcgccactgcactccagcctgggcgacagagtgagactccgtctaaaaaaaaaaaaaaaaaaaaaaagggagccagagtctgcactcttggccagtctacagcatggatcctccttgaggagcaattgtgttttctgcagagggtgggaggacagcaagacttgagggtccagtgtgctgggctcaggtctgtagacttctgtgggcagtgaggaggcataggaaggcttcaagcaggaagcaggggagggaactcattggagctgtaccatctgtttcttaaactttggtctttgttgttgttgtttaaccaacagaaactttcttgaaacaaattctaactcagaacgcaggtatataaaatagcttacagtggagctgatttggaagaagcaggtgacaggggcccagagccctcacctctgagacctcctggttggtggagagacagaggctctaagtattcctaggatggggaggggtggggagaaacaaggccatgtgctttagtccagagagacccaaagtggagtgacctccattcctggctgctacacctcggctgagttatggaaccatctatatggatgtcaggggaggaaggaggtggattcctgggtgtggctgtggcacaagttctgagtgtggccactggaggcaagttttcaacttgtccctcttcatcctcacggtctggggaagggaaaaaggcaattgggcccaggctgacagcttgatcagagcctggtgcccagcagaggcctgacatcacaggccttcaataaatgcttatggaatgaaggcatatttttcccttctaacttttggggatgatacaggaggcctgactcctgggagcaagtgaaactgtcccaggggctgccccttctcagtgaggttccagtgacccatcgctgtggctcagttggtgtggggtaataggagaatacccggctaaaaatcagaggcttggttggcttctgcctccagttgccaggaacctgccgtgtgcccttgatgggtggtgttccttctctgggctttggtcatctctttttggcacagtggactggatgaggttttttaaactgcagtttgcaacccatttgggacattaaaaaaaaccagttcagtgggttacaatcagcattaaagcaacaacaagaacacaactgaaatagaatagaaaatatcagcatgcatcaaaggtcataaaagtaagtattgtttggtgatctattgttttgcttatatatagacgaaggtgtggactggtctgctgtaaaacttgttactgtttgccatggtgaaaaaacaaaacaaaactgtaaaacacggtacttagcgatcctggaggtgtccttccctcccacatcgttcctgggggtcttcgtaaaacaaacaaacaaacaaacaaacaaaacaacaacaacaacaaaaaaaccactgcctggggctcttctcctcccagggtcagcagctgtctctttgcttttagctgtctccacccctcccctagcctctcttcttcctgcttcagtcaccgagtcccctcctccctctctcccagggacaaacgcccccccacaactcaggaagtggggttggggggtccgaagggagcaaaagtgatcggatggcggtggcaatgggcaccctatcttaggcgttcaaataaaggactaggaagcaaacacccaagcaccggggaacagaacagaaagtaagcgagcccgggacgcgaatttgagggcaggacttcgggagccagagcctggcggcgctgccgcagcgggtcactcccagggggccggcacccagacttggcatcgttagcgcttgggtgctctgtcaactagcgaaggtaattttcatccctgctttttttttttttttgaaaggaaagacggaaggagccaagagttttggagccaactcctggagagggagcggctgaactgattcggaagttggatctctttgtacacaggaatgcggagagaaaaaaaacaaaacccaccccattgcttcatttcccctccaagcctgagcactttctattgtgcaatgaaaaggcttttcacgttgagaaaaatgaatcccgaatttgctctgcaaagggatgagcgcgcctctgggcgccagcctgctctcagctgggcgcggagaccgcgcggtggccgcagggcggccgcggccagggcgctccagggcgcgccctccgcgagcgg

SEQ ID NO: 35957 - DNA, 2300 bp, Homo sapien
agcagaggcctgacatcacaggccttcaataaatgcttatggaatgaaggcatatttttcccttctaacttttggggatgatacaggaggcctgactcctgggagcaagtgaaactgtcccaggggctgccccttctcagtgaggttccagtgacccatcgctgtggctcagttggtgtggggtaataggagaatacccggctaaaaatcagaggcttggttggcttctgcctccagttgccaggaacctgccgtgtgcccttgatgggtggtgttccttctctgggctttggtcatctctttttggcacagtggactggatgaggttttttaaactgcagtttgcaacccatttgggacattaaaaaaaaccagttcagtgggttacaatcagcattaaagcaacaacaagaacacaactgaaatagaatagaaaatatcagcatgcatcaaaggtcataaaagtaagtattgtttggtgatctattgttttgcttatatatagacgaaggtgtggactggtctgctgtaaaacttgttactgtttgccatggtgaaaaaacaaaacaaaactgtaaaacacggtacttagcgatcctggaggtgtccttccctcccacatcgttcctgggggtcttcgtaaaacaaacaaacaaacaaacaaacaaaacaacaacaacaacaaaaaaaccactgcctggggctcttctcctcccagggtcagcagctgtctctttgcttttagctgtctccacccctcccctagcctctcttcttcctgcttcagtcaccgagtcccctcctccctctctcccagggacaaacgcccccccacaactcaggaagtggggttggggggtccgaagggagcaaaagtgatcggatggcggtggcaatgggcaccctatcttaggcgttcaaataaaggactaggaagcaaacacccaagcaccggggaacagaacagaaagtaagcgagcccgggacgcgaatttgagggcaggacttcgggagccagagcctggcggcgctgccgcagcgggtcactcccagggggccggcacccagacttggcatcgttagcgcttgggtgctctgtcaactagcgaaggtaattttcatccctgctttttttttttttttgaaaggaaagacggaaggagccaagagttttggagccaactcctggagagggagcggctgaactgattcggaagttggatctctttgtacacaggaatgcggagagaaaaaaaacaaaacccaccccattgcttcatttcccctccaagcctgagcactttctattgtgcaatgaaaaggcttttcacgttgagaaaaatgaatcccgaatttgctctgcaaagggatgagcgcgcctctgggcgccagcctgctctcagctgggcgcggagaccgcgcggtggccgcagggcggccgcggccagggcgctccagggcgcgccctccgcgagcggctccggggtgacgcccgccggagagctggactcccccttccgcgggcgcctgcactggctcttagccagccgagggcccgggtgcagatagtccgggaaccccgagggcggagagctccccactacgcctgggcctcccagggatggcagctccgagagccccctagacccggtgccttgcaggacgcctctggagatcaggagggctggcggcgcattcggcgtccgggaggccgggccccggacgcgcgaggagcgcggggcgcgggaaggcaggcgggtgcacatgggtgccggcgggcgagctgcggggggagggggggcggggtgtggcctccccgcctcccgggcgggatttgcatgtgtgtggtggccccagacttcctgctccttctacgctgcaggtacgcgcgggccgggcggggcgggcgggcggcgggcgcgccaagacgtgggcacctcctcacccggaccccgggccccgccgagccgcctcctggctcccgtggccgccagcccgccccggccgcaccgagcgtcgggatccgaggtgggagcgtacccctccccgctccccggacgcctcagtcctccgcactgagcttggccacgcgcccctaggcgccccccacgccctgggccccggagggccgcagccatgagtgaaatgtccagctttcttcacatcggggacatcgtctccctgtacgccgagggctccgtcaatggcttcatcagcactttggggtgagtgagccgagctcgagaggggcgcgggtaaagagggggcgccgtgggccctggtgccagctgcgtgcgtcc

SEQ ID NO: 35958 - DNA, 2300 bp, Homo sapien
cctcacctccttcagatctgggctcaaacaagcctgttcccatggagactggagaccctctctcccatttttattaaaaattgcaaactgcttcctgccacactcagtatgcacctccctgtgtaattgttatccacagcctttatcaccacctggttggctagctagtttacttattttgtttactatcccttagcctgaccccatggaatgttaagtgccgtgagggcacagacgtgtctgttttgctccctgccgtatcctcagcacccaaaccactgtctggtgcagagaggggacacacaaaatacatactgagttaattaattcattttactagctgtgcagtaaagtacacaagaagcaaaagacaaggtccccgcctcaggtagtttaaaatctcattgggaagacaaatcacatactcagaagataaataatataaagaatatgtatcagagccgactggtggtaccagccgtgggtttcgtccgaattcagggaagggagaggtcactgcttggccaatcagagaaggtgtgggagaagcaggaactgctcagagccttgaataattcatagaatttcctgtaagatattagtgaatcagattagctggttgtctcttagcaaagccctgaagggaggggacacaggatggatgaattttgatggcgagagaaagaaagcattgactggggtgatggagccgcagggcagcatggaggttgtgcagctgaagagaggctggcggcagtccccacagcccccatcttgaccggtacacagggccttgtagcgggggaaagaggaagaggccgcagagtccccctcctcagagggtccctgtctgaggaaaaaactcatcctcatccctgacccctccacgcctctcctgggaactccttgtctgggtcacacatgcaggaaagacatgcaaatttgggggccaaagcgtttttcctcacccctctggacaagcccacctggtcattaggtggatgtccatttgtccgagcccacgctggcacagcttctgaagccccgcctctccagctcagcccctccccatgccagtgcccagcagtccacaaagcaaggagtgcaaacagaagccacttagagaagggagggaccggtcagaaggggagcacggattccggaggggaattcaaacaaggctgggaaggaaaacatcccagatgtgcagctgagcagacgacaacggtctgtggaagggactggagcagagaagcaagccctgggcagggctacggaaagcagggagggtcggtcaggagtgaggacttgggaggcaggagatgggaccttgggcattttctcccgggtccgccaggaccagcaaaacaggcatcatctgggaatgctaagctccattctgtgtcccccaagaacctccaagaggtggcaccttgccaccttgccttccttgttttattctccagaagttgagcgcagcccccacctggtgtgtgtagataaagaaggtggccctgggcagatgtttgcagggtcccaccgtgcccccaagctcccctcacccgtgtctctgtgcgtactcattaggcctaagggatcccatgaaggtgatctctggcgacaggggagcaggaggggacgggagggagcgtcgcgtgaagtcattaacagataagcaagaaagctcttatcagatggcctgtcgggagacctggggccagagggagggccgagggccgggacacaagttaggcaagtttgcatggagagggagcctcaccgggcgaggccgcgacctccccatcgctgcgtggtgggagcggttctgggtccgcgcggctccggagagcgtaggtctggcctccctggccccgccccggcccggcccggccccgccccgcgcccgccccgcgcccgccccgcccccagcctggcccggcccgcgagctccgggcgtccggccccggccccggccccgcccccgcccccgcggcgaagcgaaactcgccgtcccacgtgcagccgtctcccacgacgcgccgccgccgccaagggagggccagcgcggcctcgccccggcctgcctccgactgccggccgctgccaggacgccgcgcctccgccagacgcgcccgggggcggggcgggtgatgtgccgctgcgcccgcgctttcctgctctcccccgctcgtctgcccgcggagggcggccccggggtacccctccccacctgatggcaccgacgtccctggccttagcgccccaccccgactcttcctcatggcgggcacctgtgttta

SEQ ID NO: 35959 - DNA, 2300 bp, Homo sapien
cccagacagcagacacacacatagcaagtcctcagctaaaccagaatatatttgcatccagagtgagtgtatgttccagcatgcttaaacatgcgtatattacacacacaccctgcacacaccacacacttgtgcatccagatgatgccccatcacacaatgctaacacccacattacacaccactatgtacacttgacacacaagtcacacatacatgcatgcacatcacatgcacacccagcactcacacacctgccactgggccccaccttgagctgcagcaccagatccatgcggtacttgcacagggggctgatgtcattgaggatcagtgcggtgatgatgtctatgccattggactcgtgagtcacaatgcaagtctggcaggaggcagtgggggacacagggcccaggccctctcagaatagtggcagctccagagacctcagcctctctccctgccccagctggctccatctacccacatgtccacactgccaccctggctgccacttatgccaccaggacagctcacctggttctcatggcaggggccctggcagtactcagtgagggtctccaaggtctggatgacgaggcccacgttgtcctcattgatgtagagccccagcagccccaggccgcccgtggtgctgccgcacatgatgtccaggaactgcagcgtctcgcataccaagttgtagttggttttgttgttctgacagcgcaggaagttctgcggggcacagaagggttgggcacagcacagctacagcacggagagggaggctggcctgggaagcacgatcttgtgtgctgcaggggtaggggaaccaccagccacaaagcagcagtgcccagggcagggcacacctgccatagagggacaccagccacactgcctagtctgcatgccggctggccagcgggggaaggggcaggtgtgtggcgaggcactcacctgcaggtcccggttgtggttctcacacagcagctgcagaaagcgcaggatgggctgcatgatgagcacggatgtgcccatctcactgctctgcacacgttcgctcacctcgtgcccccggcgcaggctggggcccagcgagtagcgggatgaggagccaggtatcgagaaggaggccacgcggcctgtgggcgagacctggtgaggctggagctgcccacccccttggccacccccctgcacatcttatcctgggatccccgtcacgccgtgcctctgcctcagacccctgacctttggtggtggggtcgactggctcgcggtcctcatgtggctggctgcccaggtcattcatgttgactgccaccgtggacttggtctcctgctgggcccgcttcatgcggtcgtgcagcaccttgaagaagcgctctgacttcttgtcactcatcatcaggttgtggaaggatttctggaggtggacagtggccagggaacaacctcagcactgggccctgctcctactcagggcgtggggcaggcacaccacactgctggggccgctggggctgcaggggcctggctgcaggcctgggtgctggtggctagcatccatggccacccatgggcggctccatgccccatatctgctcctgtgtcacgtggtcctttcatcacccccgcatacccctctgccccagccaggcctgagcccgtctcctcaccaccctgcccccatcatgcccactcttctcacctctcagccactgctcaggcctctcctctttcacaccctcctcggccttcagtgcccaactcaaggcccacctcctccaaaaagggagggaggcaaaggagggcatgtccaggccccaggccccccacacctggatctctgtgttgccaccatccagcaggtggatggccaggccgatgctctcctggaagatcttctcgttcttggtgctggtgatgaggtcgcataccaacttggtggccccctccttgtccagccggcactgggtggctgcgattgccgaccagtctgggtccaggcctggaggcgggactcggttgagggagagctggtgtgacaggagagtggaagggagggcccgggggcaggggaaggtgatactgaccagtgcctatggggtcgggaaggtccccccgcgaggtggacttccggttctggaggtagttttgcagcagcatcttgcgcagctggttgccctgggggaggatgggagtgaggccccattgtgggtacagcccaccactgaccactggcctgacgggcttgaccctgagcccctgggtactcctgactggcccaccca

SEQ ID NO: 35960 - DNA, 2300 bp, Homo sapien
cgcagggcacccacaggcaggcaaaggaggccgttataacagggcatcagtgaacagctccagaccgccccaccctcccgcccgtgggtcctcactgcggagcttgcgctgccactccatctcgttgtgcaggaaggaggactggtcgaagaagtcgctcactttgctgccctgctcgtcctgctcagtagtggtgaagagccggtgcttggtttcctccgtcaggaactggcagatgccgggcactgggaacacgatctgctccatgctgcggtcctgccgcacaatctgagcacacacagcacatggtcacgcccggcgcaggctcccacgcccgcccctgctgcccacaggcccacctcgatctgggacgtgtggttctcatagtaggccagggggtcttcctcctcctcctgtgctggcgctgaggacttgagcatctgtgacagctgcttgttgttgaggctgagctggaggtggggagggcgcggaggtcaggccccagcctccacatccaggctggcactcagcccccaccctcccaggccttcgcctagctctgaactacacttcagcgagtgtccccgccaagccagagcaggccaagcccagcccaactaggactgagccttgagaacctggtgccaaagggaggggagtgggagagccatgaccagagaatcccagaggatagcgggggcctcctcagtcctgcccaagtgtagcccgggtcctgcttgaagcttccagacccaccctagacccacctgagccttgcttccatttctgtctgggtttcacccacggctgccagtcccaatcagccccctgagctgtacccccaaattctagcctggctcatattctagggcctcactctgttccaggccacgcccttgggtcaagtgtcctccctgggttccaggccccacccccaccccagtctcggggccagcacccaccatggaagagataccctcggcctcctcctcttgaatgcgcttcaccggcttcagcaggtgctgcagctgtttattgtgcctggagagctgagggaaatggcagcacagtcaccagggtgtggtggctgggggacatggtggctggggggcgacaatggcgactgggggatgatggcagctggggcggggtatggtggccaggggggtgatggccgttgccacgggtggaactggtacctgcagcgccaggatatagatgttatggcccacttcacgtgggctcacctccgagttctcacgctcttcctcctgcaggtaggccttcttgatgacgtccacctggaggggcagtgcctgttccaatgctctcttcctagggcggtagggccagccgggccctcatccccatcccaacacactccacctggttccgcccgcctgcccacctgcccagcctcaccagctcctggggccgcaggctgatgaggattcgctcagcattttcactgtcatgccggctctccatcagagccaggagcagcttggaggcattgtcctgggtggaggggcagagggaggcaggccacagtctcaggacaccatgcccctgacaacttctccctcattcctctccataacagctctcccatccaacaaaaggtcaggtgccatgaccttcccatcctccctccccccggcttaatgagaagcatcctgcacagccagcccacccataggcttgccttcacccccgctgtggcaaacactcagctacccagacagcagacacacacatagcaagtcctcagctaaaccagaatatatttgcatccagagtgagtgtatgttccagcatgcttaaacatgcgtatattacacacacaccctgcacacaccacacacttgtgcatccagatgatgccccatcacacaatgctaacacccacattacacaccactatgtacacttgacacacaagtcacacatacatgcatgcacatcacatgcacacccagcactcacacacctgccactgggccccaccttgagctgcagcaccagatccatgcggtacttgcacagggggctgatgtcattgaggatcagtgcggtgatgatgtctatgccattggactcgtgagtcacaatgcaagtctggcaggaggcagtgggggacacagggcccaggccctctcagaatagtggcagctccagagacctcagcctctctccctgccccagctggctccatctacccacatgtccacactgccaccctggctgccacttatgccaccaggacagctcacctggttctcatggcaggggccctggca

SEQ ID NO: 35961 - DNA, 2300 bp, Homo sapien
tcgtgggcaaccgtggcaccttcatccggggctataaggccatggtcatggacatggaattcctctaccacgtgggctacatcctgaccagtgtcctgggcctctttgctcatgagctgttctacagcatcctggtgaggccttctgggtgggctggggctggatgggggcatggggtggttggggcttcccatgagttgttggcagttccccggcaccagtctgtctgtccagtccttttgctgctgggctgggagcagtgaaattacagagtcttcatctgcctgacccaagcctggccctcaaggccctgatggccactcctggtggccatctgacccctttctcctgtacagtggtggttcaagcctggactctggagctggaccagggctttgcatctcagctgggctactactagctgtgtaactgggcaagtttcttaactgccccatgcctcagtttcctcacctgtaaaatggggataacaacagcccctgcattctaaaataattgtgagatgaaatgagctaatgcatggaaagcacttacactgtttcctggcatgcagcaagtacattttaagagttggctggtattcagccacccgtttcacccctcgtgccttcccctgggccactccctttctgtgaccttagaattccaggtttctcgagaagctcccctgacaggcccacccagcttggatacgactaagtgcagacctccctggaggagccttgggaaactgtctggagcccaggcagccctcagggttccagtggcagccccagtgagagtggccggcccagcccctcaaggtgccatccctatctcaaccccatcctgcagctctttgacctcatctaccgcgaggagacgctgttcaacgtcatcaagagtgtgacccgcaatggccgctccatcctgctgacagccctgctggccctcatcctggtctacctcttctccatcgtcggcttcctcttcctcaaggatgacttcattctcgaggtcgaccggctgcccaacaaccactccacaggtcttggaggcttcctctcctgggcaggttgtggggaatgaggttgggtctcacaaatgtctggcgtcaggaccaggacctgcagcgcttacctcaccaggctcccgtctgcttctcctcttggcttctggggacgtctagctaacaccagtctgcctcgctcttttctggaacacactgagtgggtgggagagccttgggtctctggcccctaaggaaccccttgcttgagggctggagtcccttgaactgtcattcatgttaaacccagtatttgcagaaactgcccgtgtgccaggcctaggggtacagagacccctccctgcccttagtgtgcaacccagtcgggggcagaagcgtgatgacccttcactgtggctggacagtggagggctggcgatccaggaccagggaaggtttcctggaggatgtgacactggggacagagccaggggataaggccaggcactggacctcctgatgatctcatccatatcccctccagccagccccctggggatgccacatggagctgctgcatttgtggacacctgcagtggggacaagatggactgtgtctcagggctctcggtgcctgaggtcctggaaggtgagggtggtgtgtgtgcaggagtctgtgtggggtaggaggagcaggcagcccgggcctcagcacactctccgcttgcagaggacagggagctggacagcacagagcgggcctgtgacactctgttgatgtgcatcgtcactgtcatgaaccatgggctacgcaacggtggtggcgtgggcgacattctccgcaagccctccaaagatgtgagcactcctgcccactcccaaacctgtggggcccaagccactgtccagatcagcaactgtggagagtcctgtccttggcctcgcgtcagatattcagggttgaaccccctcccccgaacttgtatccacttttccctgctttccacacctggccaattccatgatattactgcttagctgccccctcaccctcccattccataaggaaagactttggcaaccaaactttgccccagggctagggatggtgaccactggctttcctagcccacagcaggtgggcagagggcggagctgagtcagctttatcaggaggcctcatgatttggcttgggcagccacattcccgaatgtcaggccttcccctgttgcttgggagtgagaggccgcctccctggccagacagagggtttctggaatgtgtgaggccagg

SEQ ID NO: 35962 - DNA, 2300 bp, Homo sapien
acggggggctgaggctttcttatgaaaaatgcagatggtgggacagtcttttgagaacaaaaattagtccacatggtgatgtagctagagacatataagagaagacttgataaaacaaacacattttaatgggagaaaatattctgaaatcacatagctgtgaagggagtaatatctggaatatacagagaactcctaaaactcaataacaacaacaacaaaaaaaaaacccgattaaaaacaggtaaaggacttgaatagatatttctctgaagatatacaaatggctgataagcacataaaaagatactcaatatcactaatcattagacaaatgcaagtcaaagctacattgagatacagccctcacccattatgatggttactatcaaaaaaccagaaaataacaaatgttggtaaggatgtggagaaattggaacccttgtgcaccggtggtgggagtgcaaaatggtgcagctgctgtggaagacagtatggcagttcctcaaaaaacttaaaatagaattaccatatgatccagcaattccgcttctgggtatataccaaaagaattgaaagcaaggtcttgagatgtctgtacatccatgttcatagcagcattattcacaagagctaaaacatggaggcaacctaagtgtctatcaatggatgtgtaaacaaaatgtggtatatacatgcaacggaatattactcagccttaaaaaggaaggaaattctgacatatgctacaaaatgaatgaaccttgaagtgaaaatattatgctaagcaaaataagccagttgcaaaaatactgcaggattccacttacatgaggtacctagagtagtcaaaatcatacagacaaaatagaatggtcgttgccaggggctggggggagagggggaaatggggatttattgtttaatgagtatggagtttcagttttacaagagttacggagatggtgcgatggctgcacaacattattcagtgctatttcatacccatgaactgtacacttaaaaatggctggctgggcaccgtggctcacgcctgtaatcccagcattttgggaggccgaggcaggtggatcgcctgaggtcaggagttcgagatcagcctggccaacatggtaaaaccctgtccctactaaaaatacaaaacatagccaggcatgatggcgggcgcctgtagtcccagctacttgggaggctgaggcaggagaatcacttgaacccgggaggcggaggttgcgccattcactgaacaccagcctgggcgacagagccacagagcaagactccatctcaaaataaataaataaataaataaaaggttaaggccaggtgtggtggctcacacctgtaatcccagcactttgggaggccaaggtgggaggatcacttgagcccaggagtttgagaccagcatgggccacatagcaagaccttgtctaaaaaaaatggttaagatagtaaattttgttatgtgtattttaccacaatacaaaataataaattgtaaagaaaaaaaaagtttttctagtctgaatcaacacagttggcattgctcatgctagaaaacctgcgcctcccagagaaaaatgtctggcttatgaggggtaggaaggggggaacagaagggatactaacagggactgggcagagaagaacaagaactaggaagcactaaagaaggaattgaggccgagtaccaagggatagtgacaggtacgggggcacccacgaacaacgttcaaacatattttcatccagtaacctgtatttacatgcaaatatattggtttatgcaaaacagcggaggcctcgggggagggttttttagtctcaagcttgtgcagtcattgaaaaagagacgcaaagctgtctctggggtactccacgtccgccttgcccctgggagctgggccggttccaggaggacgaagactgaattagctcggcttgcagagaaaggcgagcagcgcccctacacggagagtagcggtgcgcctacaaagtcgcgcatgcccactccggcctcccgctccactcctaaggcaggcggcgaggcttagtgcgcaagcgccattcgtcggcgccgactcctcccgctaaggcgggaacacgcggggcccaagatggcggccagccggtaccggcgttttcttaagctctgtgaggaatggccagtggacgagaccaaacggggccgggacttgggcgcttacctgcgacagcgggtagcacaggcctttcgggagggagagaatacccaggtgaccggcggggaggcggct

SEQ ID NO: 35963 - DNA, 2300 bp, Homo sapien
ctgagcagatggtcctcatcccctcttgaagcacccgtgagattttcataaggaggtctgactcctctgttaaattatgaggttcctagcaataacgatatgatcctcacgcttccttgtttcctgtataggccttaacactgtgttgtttgtactgggcactcaagaaggaagggagggagtcagggagggagggagggagggaggactgattaatgaaatcacaaacaaatgaatgagctacttagccagattttcaagggcttagcactgtgttgtatgtaccagacactcagtaaatacttggtgagaaggaaggagggagggagggaaggcaggaaggaaagaaggaaagaaggacagaataatgacatcacaaatgaacgatctacttgactagattttcaagtgtttccaccatctgggctcattccatttctcttctactacttccaaccacaaaacccccattccaaatgggttgttctgtctacagactcatgggcatgctggacttttcctttcccccactctccacccgccctcccctcacccatcgcccagcccttctccactcctgtcacccttcagggttcagatggagctccacctccgtcaacagtgttagtgatgcccctgttctgaacgaacatcttcaactgtaaatgatagggttgatcgtctgccccacacaggtgatcctctgtctcacttggtcctgtcttgcatggtttgtgtcagttcatgtgtgttattcttgcctccctatctagaatacaggctccccaagagctgcatcttctccagcatgagccgggagatgagcaaggaatagctgctcagtgtactcttgctgactgccagattatttagggctccctcactctttttgccattttcaagtaaacacagattggagaccaaaaacatacacaccccaccatctcttctttccatgcctttctcctctcctgcttcccagattggagcaactgggtgggctcattcagtttctaaattcattgagtttctgaatctgcagagtcatgcgcaaattttcagatcacagcaacccctcggagtctgttagtccagtaagaatgcgctaaaaccagtagacaactttgttcccccaacttttttttttttaaacaacaaattactttttttagggacatatttaggaggagatgggaacatgggctgggcctcaaatgatttggaggaagaagaaggcctcatacatgaggggtgccatggggtaaaggaatagctgagagagggggcatcacctgggcaagaattgggaccccagccacagagaatagttgtgacacagctaatgacctgggtgggccagcccccaaagacttggattccagctgatcatctctgtgccatcctcgggcaagtcccctcacactgagagctgagaacaggtggagaaatgagaagctaagcagggggtttggacttggttgatgtggttccagattctcaaacaaggaactggcctggaaaaggcagtatttagggctctgttttgtcattagcaaatatttagttttaggctgactcccttttgtcgcccaacatgctctgactcaactctcccaccttgggcacacagcatgcaaatgaatcacatcattgccttggccaaacataatttgggaagtgaacctgcttagaaacccatagagtatgttctaaaattaaacaaaaggttttgttttgttttttttgtttttgtttttttaattatccagtccattctttctttttattagtgtggattttggagtgtggatagtaattatccatgagaataaaaaaattacttaattgtacattgtatgagattcaaataaaaggaccacttctcaggtctggtgcctcccttgcagatacatgcaaatattttattagccaccatttccacccgagttccctgaaggattgtaggaaatcagtgaactgttcttgtggtatatgctagtcgctcataaattggaactaccacacagtgtgatcagaataaacaaatggaaagggtaataaggcacaccaataatcactggtgacctcagcaattttattaacaaatttatttccctaattgggtaacgtatctcagtgcttgactcaagggcatcgtaataggtttccatactgcagaagaaggaattaattagaactgtttgttcttattccatatttacacttgtccaccagtcttgtaaacattgcccctggtttcctccgtcctccaggttcttctgactccccaacccaccccc

SEQ ID NO: 35964 - DNA, 2300 bp, Homo sapien
gaatagggatgtgagtccagcctgatagggagaggagaggtggcgcagggctggggggaaaggaggtcataccctcttccagggccaggtaaccggagcccagcacacagctgggcagggggagggacagagcacacaagaggccatgtgccttccctggtgaaatgtgatcagtcagtcaccctgcaggggggagtcagggggcagggaggggaggatcggatccccaccccactttaaaccaggcttcagggcaccccaggaattcctgttatttctgtggggctcttccctctctgggtgtggggaggcccacgtccatccacacagtggagatgggagaggagctcagccacccgaaggcagctgggcaggtaggtagccccacacaggctgcagcctccccatcacgggaggctttttttttttttttttttttttttggagacagggtctctctgtgtcgcccagctggagcgcagtggcatgatcaattatggcttaccacagcctcagccttctgagctcaagcattcctcctgcctctgcctctgcctctcaaaatgttaggattacaggtgtgagccaccgtgcccagccaccccttgttctcttgccgctaacacatctgctgagcggctcctgctgtgctgagcgttgaagtgggcgtagagggcactgaatggacaatggctggcgggtgagggccaggagaatgggttcagtccacctgccccatcttacctctgtgaaatgagcggtgagggagaaggggccgtcctggaacatgttctccatggacatgtggaaatggagtaagtactacaccaacaggtctggagggaccagaagatgggtaagggggtcctgggggatgagtccgagagaggctgaaccagaccagtgggcaacctgggcccgagtggagcaagcagcatctctggccagagaggaggctgagcccctcatccacatatggagcagcccaggaaaggcaggtggggcaccagtgcccaggggaacttcagccagatgtccagggtagcttgatcttcctaatactggtccagggttacttggacctgaagcctgtcccctgatgaaccctgtcctttgctcccaccccctctctcccggtccaccagcctgattcctgaacatctcaggaactcgccgtctccttccccacactgccccctctcccaaccaggctaggactctcccagaggacagcatctgtctgcccacctttgagagttttaaacacaagcctgagccgactcttcctggcataaagcacctcagttcctcccagaggctgaggacagaggctggtgaggccacctcgtccctgccccatctctccccagtcccactccctgcagcttccacctccctgaccctgctcccacctgcctctgggcctctgggcctctgggcctctgcacagcctctcctgtagctagagcccccttctcaccaccctcccccactcaaccaaatgaccctgtttctccttcagctctcagccggtcagctcctccaggatgccctcctcactctctgcaaagtcctctattctctcaccagacacttatcctggagttgccctctgacttgctgagccccccagctgtaatcccctgacactgggggtgcttggtcagccctagcagggggtctcaaaaaatgcttgttgatggcctgattgtcctcagtctaactgactgttgactgatggaacgtcttgccgcctgactttccttctctggcagccacagtatggggtaagctgcagtgaggttcttgcagagaggatggggcaagaagcccagcagaagggagagcatgaaccccccaacccgagactcacccctttccttttgaattaggaatcaaaaaataaccagggccttggggtgatgggcccttggtgcccaggtcctgacatctacgtgggcagctgagctgaactctcccctgcctcagaccagtcctcctttcctcctcccctcttctctctcctcctctttgtcccctcccttccagcccctctggccctgccccagagcagcagaacacccagctgacagctggacatgccagtccccaccagcccttccccagagggtcaggtgacccttccctccccaggccacggcagcccggccctcccgggcagacctcccgcaccagggctctggtgaacagcaaatgctccacgctgggacgggccattgcctgatgcctgtacatggtgggcactgagagacaagattcctgggccctgccttccatac

SEQ ID NO: 35965 - DNA, 2300 bp, Homo sapien
tgcaccattgcactccagcctgggcaacagagcgagtctgtctcaaaaacaaaacaaaaaaacctcattgccaggttcttctccttctgggatcgaggtttccattaatctatttcttgaatatttattgagtgcctcctgtgggcctggcagtgttctgattgctggggacacagcagtgaatgagccagacagaggcttgtgtagtaactcacctagatacagggataaagtgatttgcccaagatcccagccactgaaggccagagctggtcctgaggatgctgagccctaggcctccacccccacccgtgtgcagcgtcactcctgggaaaacatgggggcgccaggtggcatggtgcccacggggtcctcccacctgccctcatcccttgcctctgtgtccctgcacatcatgggaccctctgttcagactctctgcttgtgtctagaactttctctggggatgggtggagaggctggcctggctgcccggggaggactgttttggaacagttgggtgacttaactgtataaccgctctcccgcgccttccttttgggggagaccgacaggataatggatttgagtccacacacctgcctcagcaaagggattttttttttttttgaggctcaaagtcaatggtgtattaattaagggggaacagctgctaccgcagctcttatgataagtcagtgacaaatggccatgtttaccatcttcttgagtcgagactccggaaggtggcctggagctccttggtggatgtccatggctgagatttgtggggtacagcctccccttccctgcccctgaagcttctttatcggtgtccactgtggcccgagagggccgtctgtcaccgagaaaagacaggtctgcagcccagggagctctctgaagggatttgggcagagaaactgggatctcagcaatcactccagcccacagatgcccttggacaaacccaccgccccatactgtcccttgtgaaataagagctgcttgaaaggggacttggccctgagaagctgaggaaggtggaaagcctgctctgaaatgtctgcagcctgagtgaggccgaggacacacctcggggcctctgcgccaaggcgctctgtgttccagaaaggaagaagctgggctggcaggggccttttgttatttagtttattttgatctcgctcctgctctccaaacagcttcacagaaatagagccttgcattagctcccttctcggcttaaaacaaaacgtggcagagggaaagtctttcatgaggaacagaaaagggaaagacaggctcattttttcccgagttgcgtttccaggtcctttgactatggacccaactgtgtgactctagtgacgaggataacaggctggtgctcactgtgaacgggaaaggtgaccacaacagcccacaagccccatggggcatggcaggactggctgccttcttggggtgactgaccttggggcctctgcaaaaggaaggacagcagtgagatccagaagcacactcagcagccctggcaagggaaccctcatgtgcctgccagaccgcatgggtgggcaatgagtgggcttccctatggttgggcctcagaggagacaaagaagtcggcctcatgaagggacgctaccagctgctgggaagccccatccaacctcaccctgttctttcttcctcctcctcccagggctggtgctgagcacctgaggggaacctctgggtcttgaggggaggcagaaatggagccaaaggaaaaaggccccactagcccccacttctggccacccactgggaccaaggaggcaccctgcatgctgcaatcctcatagccactctgtaagacagggtcatcacacgttacaaatgtggaaactgaggctgtgagagttatgcagcttactcgagaactggtcactgggtggcagaggccagaggtctgggaggaactgcagagcccacgtcctgctgtctctcccaccttcccttccagccacctcccagagctggtgcttaaggagtccacacattgccattccttagacatagctttgggggaagggaaagaaccatgggcaagaaacatccgtttttaataaatagtttattcatccagcagtttcagccctgatactgaagcctgttgcggtgtttcttatttttctggctggagcctgattatgagaacatggcctcaccacggggccagcgctcagattcctgccctgccgatcatccagacatcagaggaaatgagagtattgctcaaatgagggagactggag

SEQ ID NO: 35966 - DNA, 2300 bp, Homo sapien
gggcagctccacctcaagctggataactggatgcatggcacgattaaaatttgttggcttaaaaaaaaaaaaaagctgccctgagtagctgagcaattttcctgtgttagaaaaggcggaggagaatacggattttatcctcagcagcagcgctcactgaagctgctaacacagaagaatgatgacactcaccttttcatgttggggaaggcagcctggagggtggcagagccgctcaggatgaccatattgaaagtgggtcctgagaaatcaggacacttgggatgccagccattccagcatgcagcctcaagagcatgatattctcgccctgggtcacctagctggaagaaggctctggtgtccccacctctgcaggtcctgacacctcctggccagagaccatggtggaggcgccgtggctggggtctggcctcggagagcctggtggttttcattccccatgagcctcacggattccccatgagcctcatggatgccccatgatctttacacttaaacagcttatgtgcctccttgtcaccgaggaaaagtgcaacctcccagattctgtctttcagttcttgccatgcaattgcaaagctagtgattcagtaaacatttccatttctctatgctgggaggtgggaatccaatttacagtttaatctcctgcatgctgagagaggctgtcaaagacctgacagggggacgttgctttagcggtaggggttcaagcctgctgccgtctttaaagctttattcattctaagtagccaatgtgggaaatttctggaaagaatgcagccaggataccaagcctattctataagcaagtagaggccttgcgtccccactttccttcgcttcctcctgtttgaagtggggcttgcactgcctctccttggagctttccaacatgttcagagccctgtgtcctgtttcaggttgaaaggagaagaccagtctgaattggtgacgactgtggacaaggtggtctgcctggaatctgcccacccccgcatgggtgttggctgccgcctgagccgggccttgctcactgctgtcaccaacgtgctcatcttcttctggtgtaagtcctcggccgccttccctccccttctgtgcagtcaagcatactcctaggcatgaatgatgagctatagaaattccaggcccggagggttcatttctgtctagtgaacctgaggtctgtctcataaaacagaggagatgaacaagtcagcctctgccctgggttgtatttacctttggagattggtggcaggaatccgtgaggataactagaaaatgtccttgattcagggcaggggactgtcagatttcctgagcgggagcctggcctgagcaggagctgggccccaccccttctgggctctgcagggatcccagtgtggaccagcttcgagcaggaggcacagcaggggcttggcctacttttactccctgaaaaatataaacatctcctggagagctacagatacctgatgaaagcaagaaggactcagggtgctgcactgaaaggagggcaccagtcttatcccctgacatcgggggccgcctttgagcagagacctcagggcgtctctgaaggcgaaaggccaagtcacagaaaccacggctttccagagatagttggagctacaaatcacagaccgcctcagtgtgcacacagctccctcccctgtgccatcaggcacagaaatcattatcggcagcagcatctcggaatacaaagggccccggcatgtatatatgtatgaaacactgtgttctggttcacaagggaggagatgaaagccccagaatgaggttgggaggagccgagatctggacggctggggatgccgctgtggtgacagccggtgggaggaagatgatcacttaataatctgtcgtccctctgcatttctgtatcttttgtttctcgcatgctggccctgagcctgacacatagtaggtacccaaacccatgtggtggatcccccacagcatccatcacagcatcttgtccatggtgagacccactgccaaatgaagtgtgagggattaacagtgttttgttccctcacaggcttggcttttttgtgggggctcctaattctcctaaaatatcggtggcgaaagttagaagaggaggaacaagccatgtatgagatggtgaagaagattataggtgcgtggccccctggtgaataaagggttgccgacgccagccagagggtccttgccctaaatggtgtgctctctcctgcagacgtggtccaggaccattacgt

SEQ ID NO: 35967 - DNA, 2300 bp, Homo sapien
taagtcacgtaagtcctgagattcctcttgtgagagctatgggcggctgacccggttcatcaggcttagttacactgctgctggccagcgagacactccctggttgtctctcagaaggcatattcagaagccgagtctcaccttctcgcctcctcactcaggcacatcttttataagccttgtgtttgaacaaaacatatttgattcttgctcctctttaagggaggtcctggcatgtgaacaggccttcctgcagctgttcttccttcttggggatgcccactacctaatgctttgggggtctctgttggcatgggaaggggccaagccccaggtgttgtcaggatctgtgtccttcaccctagagggaccctctgaaccaggtggttggctgggcccgggagaggcctcttgcctgtgcaagtagcagatagtctgtgtagtgggccctggtgtcacatctggtcctgatcaccatgtggctgtgggacctcggacaaagtccctgatcctctcagggtcttcatctccctgtctgaccaagggctcttgggtctgtctgttctctacaaatgagagtcaagtgctgtcctctaaaggagggcattctcagcacctctgtgaaatgcccctgaaaatgcatccagaagatgcatcccctactgttttatttggtgaagttattccttgaggccagagataccacctgcattattatgtcctgcccgacgcctggcatccaggaggctctcaaaatcacttgcagttgacataggtgaatatcagcatgtgcgccttgtgttaaatgcgctggacacaagaaccagacagagcagttctatcttaagggatattcaagaggcgcctcttacctgtggggtcagaggacaggtcttaggattgtgaggtcaacccttgtctaaggtttcactgggaaattagggtcgggtggacttctcctgggccctcagtcctcagggtcaatctcatgagcatcagctcttctgcctcctccctcttgaaagtgagagatgagatggtaggggaggcatccatgagcacttggaggagaaacaggtactggggctcctgctcacagcatcataggaattcctctgtacggcccaggtgcttgggatgtcaattctgacctaagagagtgttccaaacctttgtgtctcaaatgtggtccaaggacccatagcatctgcatcacgtgggagctcactagaaattcagaatctcaggtctcatgccaaacccagtgaatcagagtctgtatcttaagatccccaggggatttgagtgcaccctaaagttgagaagcactgctcgaaattgggtcctagtagatatttctcctccatcctaccctccatatgtggtcttgccttatgccctcaagggccctggcacctgttgccctccgacaagcctggggggccgccttgaaggtacatatctcattgagacaggagtgtgcctcacagaggctccctagtagtcctcaaccccttccatgcctctcctgttagggatccgctgtgggctgggcactgtgcaggcccttgcagtgagatgactcagctccaggtcctgcctgcagggcccaaccccggcttggggtctactggaagagacaggccacctacctccctgaccactgggtgatataaaatgtgattagacaagaaccaagaggccagaagttctgggaggcacaatgccttttagctggagcagtcaggagagcgtcacaggaggtagcatctgtgccaggccctgaagcccaggtaagactggttacatgtatgtggggaaggacaaggcaaagcggcaggaaattacatctcgagtgggaagcagcaccttcatggaggaaggggaagatgagagaatgaagtttggaagtgttggttgggccctaccatagatggccttggatgccaggccaccagagcttgatctggcaggcagtgagggccagagaggctttgagcaagggagtatcatgctgagagccaggtgccaggaaggtgaatgcggcagcagcttgagtagcacagttaagcagaatcattttcaagtgttattgacaaaacaactggattgggaaagggagaggaggaaccgaatcgagaggccatctacgtggtccaggcaggcctggcaagggcaggaagagtcctagtgggaaaaggaggatgctagaagccacctgtgtctcaggggacccctggggtcaagatcaactttgaagtaggaggatctggctgtgttaggggaaggcgacaggcttc

SEQ ID NO: 35968 - DNA, 2300 bp, Homo sapien
aaatttgcagttaagtggtcactgggtgccccttggtgcacatccaaaggcctgcctgtaagatcctgcaagacaaggccatccacagccagaagccacaatggaggtaaaagggctgaccatgggtggccaaaggccacaactccaagcacagtgggttctacaccacagggaagacaacagggttctgggggaggggctgtgggccacttgaccctacgtgtgtggagcggcagcagtgtccccaaacacaaggaagctgacaaagcccacattgcgtgccaccactgggggtggctccagttcagtccatatttttaaatcgccctgagatccattgttataaaatagaccataactctgtgaaatgctgtaacgataactttgtttaagcattagtttcaagccctcttagaatacatggggccagtactgatgccgaaaggctcattctttatatattgaaccgcacagctgcaaggagttgcacaaatgttaccaactcatttgtcatgcaaacagtgcttcagaaagaaataaaatactattatgtggtatatgtgttaggcaatcactatatcaaattcatggcattctgtgcaaacacatgcagggaaaaggaaaacaacacttggtgagagaaatcacaccacatgggagcagctaagtcaggggagatggggaggctaacagtggaagctgaccaagccgaggctgtcattttcccagcaattgtggccagtgttgaatacccctgaggtggagcaagtggcaggaatgcaaaacccagacagaggagcatagcattgcccagggtgtcagggaggggagggaataaagtggggaatgggcaagggggctgttgggacagatacggggcagttccagggaggaggggcctgggggaaggggagaatggaatggcaggggtagaaatggatggaacccattgggccggcaataaatgtttgggaatgggagttgagggatgtggaaggaagattataaactggttctatttccagttgccacattcccttgcttcccttaggggtttcctgctaagagccttcatgtaaccaaatcacctgccctgtgggaggctctacacagcactgacactgcaaagatgtgggttaagtataaacacgcatgaacgtgtgccaggcactgtcccaagcaccttagccaaactacctcttctaatcctcacagcaactctattgaggtttactggcaaataggctaacaatgttaattgaatatgatcacacatctaatagttgtgagtagggatttgaaatcgaactgtctggctccaaagcccacaacctaaaccaccagtgaggctgcaagaccgtgtatctctggagtcttctctctcccatgtctccttgtaaaaatcccattacgcagacacaggccctccgcagagaagcctcaactgcccattcgaacccaagggcattttgctcctctgcctccaccatggatgctgcgtctcctccaggctggcgctccttgggggccagtgtctgtcctaaggcagggatcgcacctacttggtgctcagtgtcgcccagttaacaagcccgaagtcgggacagggtcttggagcatgcctggagtgtactctaagacccaaataaaaccggatcacacatcagtccccaagcccagagaggcaaatcatcctgtctctccattcgtggcagtggcttcgttcaccattaagcaattcatctattaaatcaacgctgactttactgaacgcttaccacctgccagaggcagagctagggttggaggactcagagattaataccgcttgatctaacaaacaaagggaagtgggagagcggagagagagagaaaaacaaaacaaaacaaaacaaaacaaaaaatttaatcccccttggaccttcccaccatggcggctctaagagccacgtcagaccgcctcatcatggccgaccaaaggccaagtgcagaccttcccaacatggcgaccgaccttcccatcatggcgcgtggccccgcccgctccgccgcgcctgcgggagggagcagttccgggtgcggtgcgcgccaggggcgggcggggggcggcgtcctggccatggccggcctgtcggacctggaactgcggcgggagctgcaggccctgggcttccagccaggacccatcaccgacaccacccgggatgtctaccgcaacaagctgcgccgcctgcggggcgaggcccggctgcgcgacgaggagcggctgcgggaggaggcccggccgcggggcgaggagc

SEQ ID NO: 35969 - DNA, 2300 bp, Homo sapien
ccccagagcatcccagagcttgagaagctgatagactacttcccaactctcaagggactactttgcccccaccaaggtctgtgaccttgtctttcggtttggttttgttttttttttcagacacagggtctcactctgtttcccaggagtgcagtggcatgatcatggctcactctatcctccatctcccaggctcaaatgatcctcccacttcagcctgccgagtagctgagaccacagcgcatgccatcatatctagctaattgtttttattttttgcagagatgaggtcttgctatgtttcccaagttggtcttgaactcctgggccttaagcaatcctcctgcctcagcctcccaaaagctgggattacaggtgtgagccaccttgcccagcctagcgacctcttcccaaaagcccctcttgaaacagggacagtcagactccaatgaggcccaaggttaagggatggtaactctgctgcaaacccccggcatttggagctttaattcctgatgtaagtctcagacttcagagccacactgcacatctcacaacagccgctggtccagtgtgctggagttctaatgtgggtgctgtacacagagaccctgctggcaggaagcgaggacactgagctgccatctgttttcattaagccttgctgagtagggaaggtagaaattatctgtgttgggtttgaagcactgcaaacatttgtttctgagtggaagggccagagcagacccaaggactggctaggcagggtctcctgggcaagaaatagtgcccctctggatgtgtgaggcagcgtctggatgtgtggggaaggtgctactggccaacgtatgtcgcctgggaaaatggccactgcccacccagaccctcgggattccacacccagactgtaccccacctcagcctctgcctggtccatgaccggtacccagaaaactagacatcttccagagtgatgtttttgccctaacatccccttcaaggtatcatgaagatgcccaatattccatttcctccatcaaatctaaatccttctgcttggttgctaagggtccccacactcagacccgactgagcggctcccagcccacacaggggacctcctgtgacaccattctaagcctgtgtgtgccccaaatctccagaagccctcactcctgccctctgctgcacctggccacgtctggccttcaccctagtataaagacaccttgcagaggagtcacagatgagctatttagcagtgcctccgtttccttatctattgaatgggggaaataaatgcacccacctcacggggttgctgcgtttaatcagaacgttcgtgctcagcatttcctgggtaatgctgcgctctggaattggccccgcccagccccagcaacagcgagccaggtctgactccagatcacattcacctcttccctcttccctctttgaatctttacacatactgtttgaattgcatgattaccatgaaacattgtccaggtaggtgtctttctccccgtttaggctgcagcgtgcagacctcctacactgtcacccctctgcatttcctcggttccttcgcggcatctggccccacacagccttgggtctggactcagtagttttattttcattaatccactgaaatgctgtcacaaactcctgaacactttctttcatgaggggcttcagggggaagactgaagagaagttatctttctaatacagcgctctgacaggccgacagaaaatctgatcactagagcattggcctgcagacgctcaccaatgtcatatatttaaggaacaaaaaaagaaaaggctttgttaaaatgacctctgagaggcagctgagttttcagtggacgggagaatgccatctgggtgggggctagcttccaccgaaccctgactgtcgctgttccttccaggaaagccctggaagcccatagcgtggctagccctgcctggagtttccacgagcttcaagaatccaggctccccctctgagggcccccaaagctgtggtcaaaggttaatgggctccaagggcagctcccagggttgggaggtatataagaacccgtcagatcagccggacaccagaagacaagcagagagactcctccagacccactcagaccacgtgcacgccgtaagtagcccttggagaaagtgggtggggagtggtcagcataagccctaaagcagaacgctggtgcaagccagagccagcctggtccagggccctctgccaccttccagtgcccagccgggcttcgcactgagtg

SEQ ID NO: 35970 - DNA, 2300 bp, Homo sapien
agggattggtccagggttaggcatgtgacccagtcagaccaatcagagcccctctctgggctttttaactggagctggaggagagcaattctttcctggttgatcatgaaaatatgaggacatgaggccagtattcctgcttcatagagacaaacagcctgcgaccaagaaacaaataccaagcaagagaggaagggagtgaaaatggagagggcctgtaggcaaccagacctaccacacgtgtccagacacgccgcggctctgagctccactgacttgcacagactcgggggctgaggcctggccagagacctgcccctaccatcaagggttgccagccttctgcagggcgcccgccaggctctgatgtgcccagggttggggaagaccctggctctgaccctttaaatccagggctgcagagaaggctgttcctgatgctgaagcagcaacactgaccaattcccagcagggcttccgcacagcgcctgggcctgctcacctgtggggaggcgctggccaagggcatccctcgccgctcgctcctacccccgcgggcctcgaacggcgccttcccactgagtcagaggcctaaaataagaagcgtgttccaaaagatgtggcttatgggaaaacttcagccaaatcaattaatgataaaacccttgagcaaacacagctacttttatcattttagaatgttgtgattggagcagcaaatgaaattaaattaaaaacacagagacttcaggtcagaaccccagccgctcttgttggtttttaatctcctattaaacgatatatcttctgatggcttttgtcagcttatttaatgtaataacccaggacatgtggcccactgacctcctcattccccccacatggctaagggggagggtaccgctggcagccaggtccacccacaagcttaaaatggggatgggcaggtgggcaacagtcatggggaacggcaaggggccacagaggaccctggagactgaacttcgctagagctctgtaggcaaacacagggcagtgaggtgccccgaggccgtctgcttagtcccctccattacagatgagtcacctggagcccagaaagcaaaagctttcccaagtcacattcagagccaggattggaacccaggccccctgacagccagcccacagctcagcgtccaggaaaagggctgagtgcagggctgggagtgaggtcctcagttctccaccgcctctcagggcattagtagtggggctcagtctggaagacagaatcagagtcccagtccccaggagatcctggcctgatgggagaggccgttcccatgctcggggacttcccagtgtgatgatggagacacaaccctgccctcaggaaactcccagtgagatggagacacgggcaaatacagatggccaaggaaattgttttggtgacaacaagaaagggtggcttggaatgtatgttggcttcaccaaggaaggcttcctggaggaggtggagaaagaggcaatctcaagacagcttaggccgaggatttgtggcaagagagagaagatgcagtgggtgagggagaagagacacagggtgcattccctctgtaagttgcctgtacccacacgcaggcacacacaaacatactggcctgtgtgcacacacttatgcctatgtgtacatacaaaaccatgcactcgctctccctctccctctccctctccctctcgtctccctctccccactgtctccctctccctctctttccacggtctccctctgatgccgagccgaagctggactgtactgctgccatctcggctcactacaacctccctgcctgattctcctgcctcggcctgcagagtgcctgcgattgcgggcacgcaccgccacgcctgactggttttcgtattttttttgatggagacggggtttcgctgtgttggccgggctggtctccagctcctgaccgcgagtaatccgccagcctcggcctcccgaggtgctgggattgcagacggagtctcgttcactcagtgctcaatggtgcccaggctggagtgcagtggcgtgatctcggctcgctgcaacctccacctcccagccgcctgccttggcctcccaaagtgccgagattgcagcctctgcccggccgccaccccgtctgggaagtgaggagcgtctctgcccggccgcccatctgggatgtgaggagcccctctgcctggctgcccagtctggaaagtgaggagcgtctctgcccagccgccatcccatctaggaagtgaggagcgcctcttcc

SEQ ID NO: 35971 - DNA, 2300 bp, Homo sapien
aacaaatggggccttctcaggggccattctccagtagttaaagctcaaattgatctacttccttggatgcattctaagatttcacttagtttcccaccctttctctaacccactgctgatgcagatcctatttatgtgcctctggttctggttctggacttctttaacatctagtaagtatgtgcattgccagtgccaactatgtgtcagttccatgccaggagctgcaggagggcccagtgagtaatgaggcattccctaccctttagggagtctgcttttgggttggaaaagcagataaactttaagggcacagcactgcctcagcgaccttgcacgtatccacatgtgccacacaggcagtcttgaaccacagctaatctgaatcaaggccacaggagcaaggccttgacatcctgtgatcctcccagaccaccagaggatgggaggctggaagtccttgctctgaggccatctcctactagaaccttctcccctgggaggctaccatgaggcagtttcttatcctctctgggttctagctagagaatatcacaatggaaagaacgactttccaaatttcaggatgaaaaaactgaggcacgaatagtcacactgctggattcaagccctggtacccagaacctttggaactcaggggcagactcaaattttcctctggtttattatgcaaatgaaggcattcctctgggtatcttagtagagagccagttaagaccccaaacttcccctcttccctttgctgacagattgcagcacccctttgctgacagattgcctggtcaggaactgtcccccaaatgtagttgaggactgatagcaaaaagctaatgagaccactggtgctgggtgccttcttggagcacgtccccttcctcttcccctccccaccctcccccatcctgtcatcctatggcagcccctcctgttattatttaatagccctggctggcacctgccccccaactggagttcatcagtgttgaaatctgatagaagcccatccatttttttgcttttctcaacccccaggcccctctctggtgagcagccactgacttctgctctgtaagagcacgctttaatgcattctgagtatcacacattctcctttttgcctcttgccacagaccccaaggcatctccccaagatgaccacagttgtccctgaagaagcagtcacagcaagctcacttcacaggaaccaagctgtgggctgatcctacagacttgaaaagacaactcaaaaaggtataaagttgccagatcctcacccccaaagtgtggcacaatattaacgcctctaggcaggcacgactgcgtgccttccatttggggcgtgagtcctgcctccctgggctgagtggcctccatgccaacatgctctgactaacgtgatgcccctgcaatgcctgcgaccctgctgaggcacagcccacctcctctccctctgggaccaaggggtcggcgaactgagaagttttgggggtctccctccaggtttctcagcctccaggaaagcatctcccggccccgcatcatcccgcgtccccggccgagggcccttctggcaatcaaggcccgtattcaccctcagagagggagttacggttctgccagctccaaccctctaaaggccgcgcggcaggacggaggcagcctttaagaacagcagttactccaaggccgcagcgcgtggacagcgggcgtgtggggagggacctggtggccctctacgccccggccccgccccctcgccccggccccgccccggcccctctccccaccccgcgccaggctgcccctgccaaccccgaggggggaagactgtgctctgaggtcctcggggatggttgttgcgggcctcggcctccctagattccttcccatctccccaacagcaatcctcccagggccatgggccaggaacccctggtggttctgtattctgaggttctgcagacgcagggtgtagtctcctgcgagtccatcttgatttggaaggctgcgggaggaggtggccgagaccccttccctagaccgcgaggcaggacggaggcagccgttaggaacggccccactccaccagccggccccgcgggacggttactctgttcctgaggtaccccccgaggtgggtgtatggggacctccgcctccctagacttctaggccaggggcgaggatcaccttagagggtttccccagacgtccctgatttcacatgtcctgtcctgctggcaggctgcgccttctttctgcgctttggggaatggtgc

SEQ ID NO: 35972 - DNA, 2300 bp, Homo sapien
tccgcactgatcaccaaccactaagccctgcctgcgggagtccaaggaactcactaggtctctgactcaacctctagtgaagagggggtttcccaggagtgaagtacctatgagggttactgccccttctttctggattttggctctgaaagtgtggaataagagagtgcacagtgactcttccacttctcaatccaagagaactccatacagttctgttctattccaatgacctctgatcagaaggaaaatggctattgcaataacatagcactgagagattctgaaagaatcaagccaggcccttttggagatcaaagctttcaggaattaatgctcaggtaattcacggagaaaatgatgtgtgggtaatttctggaatcttttcacctgggcagacacatgactcccaccagagctctcccacctgttgctttgggtgccagccagaaagcattgtccccgcccgggctggattctagccttgggtcaaacgggctacagtgccaatgaagatggtactcagcgaccttggttcaccagcagaacctgagaaaccctcttctacctgaaaggaggagcagccccttgagggcagcacctgccagtgagtgtggagccaggccaccctgtccttacaaaactcttgcaatgtttgatagagagtagacatccgagggtataaagtacttttcctgtgcatcttctcaattcccaggtagtctcagtgagctcgaactattcacccagaaaagacagtatgaactagctttaccctgggcccctgaccaggcctggtggtggcagctccaactccatgcagacaggagctgggctgccctacctggagaagctagccacctactctgcccaggaatgtcttgggtgtccccagaaggcctgctccttccaaagttgaaagcaatggtgatctgctgaagacactggaactccgcaggaaactgctgagcaaaggaggcaaggaaaaggatattcttggaatatccagaaaaccaagtcgggagggagatgcttaagggaagagaaggggctatctcctagggagtggtctagaatcttcccatcactgacacccaacttctgcccattatcggaggtgcatctgtcccttggtgagggacaggtaaggaggactccagcagagcctcagcaaacaagagctgtctgcctgctgcaggggagggtgtatgtgtgacagggagggttggagaaggggctgccttccaccacttgtagtcctaggaatccatggacacccttattgtggctgcgggccagtgttccaggggcccttgtcctggggtgggaggaaggagctgtgaagatgccagcctactagggacaggggtaggaccaggtgtgcagcctggaacaagggacagagggaggaagcagcaccatcagcactttttccttaacacctgggtgtgggtttgggtgtgcatttcttaggcaaagaggcatctcagtgcatgttttaagctgccatctcctccttttaagcctcctagttaatatctgctatgtgaattatttactgggaacagatgttagagtttaaagagcactgagcagagatctttggctaatcaatttattttaacaggtttaagtctttactacacacccaattggagatttccctgccactggaagcctgtgctcctacaagcctgtgttacacatatttccagctcgccccaagcttgtttcctgctctttagcccctccccatcctggccaaagtgcctccttctcttggtatcctatttgatctgcagaagtctaatttgacctggagaaagaatttttcctcctaacatcagtcctcaggttggactaaatggtcactcagtgagatctggccatgtccttctaggctttgagtcatgtttgctgaagccatgccagtaaaatatttctgggattgagaagaagtcagcctgacattttaaacaaacaagggctgcaagactaaaagacccatctctgcctctccccaggggcgtttctcacggggtgggtagggagggcttcgaagcagcctgtgaagtgtgggcagcttgaaacacacgaggcagcaaatccgaacaggcaaaggcctcactctccagtgcagtctgggaggactgatcagggaagaacagatcagggtgaagaacagaaaggtgagctctgatcctggaacttcttccctgcgctctgccagctcccacctcgccaccaccctgggttctggaaccacgccaagcagggcagaaaccgaagtgcttttggaa

SEQ ID NO: 35973 - DNA, 2300 bp, Homo sapien
ccgtgtgtcatcggcagaccggatggacgtctgtcattcatttgcaaaatgtgtgtgtctggggttctgtgtgtcccgcgctcattctagcctgatggaacccttctgtagccctgaacattctttaattcctgcttctgaggtctgtgaggagcccctcaggtgtgggtggggaatgaggccccctctccagccctctttcccagcaggctccctgctcccagtggcctctaaggctctgcatttagctgcctgtgacatccagttatgggcctagtctttttgttctgcaggacactttttgttttgttttgctttgttttgtttttttcattttcaaatattctccaaggcttcctgtggagtttttgctctttaaacagttccttttgatatttttccttaccaatgaccacatttcatcatcattcctcttcctgaaatgaggtattttaggggtatatttggggcccactctgccaccacagcattaaatattattatgtgggcatcgggagcctcaatgccccgtcacagagccctcctactccagggtctgtcactttggagaatgagcccagttcctttcctctctctgtggatttgaaaactctatatttgaggacgctgccaggtgtcttaacaaagagccgcacctcggcgtgtcatccacatgagagagttggcagtcggagccaagagaaggacatttcatcccgagggtgggtgggagtggccatgccagggacgacgcattgaactaatcacccagaaaagtgatgcccctggaaggacagccttctaggaagctttggggacatttcagggcaattaataagatgggatattgtgattaaggaagacacagctttgctgcagctgtttgcttatctacgtacagtagaactgtgtgtttacccgacccgtgggcacctcctagtctcttatcttgctgcagagtttttactctgttgtggccactcaccactgaccaaggccaacgcctgagttcttccactcgccttcatcgatactccacgccaaccactccgtgtcaacacttgcttttctagcctggtggcacttgtggagagattattacatacttgccttttctgctacgccccaggcctgtcagttgtcagattaggcagatcaattttgttgttgcctccctctttttgaatgcctttccatgtcttcctgatcactgattgtcacagggttggtggccatcagaatctcatgcagtttgatgctgatttgtatttttttcctattttggttgaaaaactgccctgattcacgcttcactcccagcagcttagagccattcgtccagcctttgcgtttggtctcagagccccactgtgtcttgcagcttgcaatggaactgaggatgtacaggagagtaggatgaaaacactggggctgaaatgcacatctccaggcatggggtgggaggcatagaatggaactgctgtgtgaccagaaacagcctcaggcctgtggagagggcggcagtggacgcttgctaagtgtggattgatttggagctggagatcctggaatccaggagcaagtgaataaaggggctaaggagatagcgagggggaggccgagagaagcagcctgagaagatgcagacctccatggcggttcaggccagctcagggaggctgagggacgggcattgggcctgggggggcaggggggaaggatgcctgggagatgaggcccacttttggaccacatgtgaccaaaggatcagcaatccagtagaaacctgtcttctgcagccactcttttgtagctctgcaggctgcctactctgggggccttgtctctggctgtggctccaactcctgccctcccctccctacctgctgcctgcctgcctgcaccaaccacagtccatgtcagcccattcccaggcaggcggtaagcacctcttccctggaaactaaggtggacacacactgcctgtctccctctgactgtccccaaatccagtgacctgagctcctgcagccagagcctctcccgacccgttccttatcccagcagctctcagctggtgtggactcacaggccaaccaccacaggctttggaggcacacagaggaccacagaggcagagcctcatttcccgctggatcgtcctctgcccggtgctagggattccatggtgtcattcaagagtgctgcgacattttttattctttggtatctaggaatctgcgacttcccacttttctttctcattctctgtccactctttaaggcctggctggagccct

SEQ ID NO: 35974 - DNA, 2300 bp, Homo sapien
gaggctgtggcttcctgcccctggccggcgagcagacgcaccagcttggccgggatggcagagcttgcagctggcaagtggcattcgggtgtttgtcaggagcctgggcggctggggtcctggcaggaggctgggcaggggcttgccaagggagacccaggaaagccaaggaggccatggggacccccagacttcttcatgtgtgtccccctccccgtatggtcctgtgcctggagcctggggagtggagggctccagcctctgccctgagatacggagtgggcttgttccctgagggctttgtgggctttcatttgattctatctactctcagtatggacccatggattcttactttattcaacgagagagacttggggcacagggtgaggaggcgtgcccctccctaggggagaggttagaagcaggcgtctgcgggagtgttagtcgtgtggcccaggggctgggcacagggatggctggtgggcttggtgtgactttgggtctgtagcagcgtggcctggaatgcacagggtgggctgtggtgatggtggatgttgatctgtgccagtgcgtgcattctgtgactgtgtgtggacacatgtgtgcacacatgtacatgaacccacctaaacaacaggggctgcagaagaggctccggcacatgaaacactgcccctttattctcagtggctgctgcggagtcattgctttgcaaggaaagggaactgtccaggagcggctgcaggaaatgggggcctctccgcctcagggaggctctggacacagaccaggattgcagtcccactgactggctgtgtgaccttggttaggctatttagcaacctgagcctcagtttcctcatctgtgagatggggatattagcaccggctaatgtgtaaggattcattgagactgggcctcgcatggtgccaggcatgcagggggtgctcagtggcctctcgggccgctctggtcttctctggctgcagcaggcaccaagagagcagttgaggcagagattgtgccactgccaggagcttgtgtcatcccaggagagggcctggcttgtgagccagttcctttacccactcccctgagcggacatgctgacaatagggctgtgaaacagagggaacccacgggcacttggtttctcatcctgggggcagcaacaccagtgggcactcaccccagcatgggcaccatgccccatcatgcccatgggcccacaagccccctcaactccacaatcctatccattcactacatgactggatgaaaggtggccgctggagccagatggcccaagttcaaaccccacctcttcccctgactatctttgtgatcctggggaagctacttaacctctctgtgcctcaatttcttcatttataaattggagatatggtgattacactggcctcagatgagtgaatccatgtaaaatttgcagaatagcatttcccatgcattggacactccataaatgttcattagtattacggagctctgcacacccccgccccccgcactcccttctggtctgaatctcttgcagttgcaagaatatcaaaccctcctcagactgcacttgcatctcaagttgcttgtggctcactcacactcccgctgactgagccgtggtcacctaatccttccttcaccagcaaaacgaagcttgcaagatatgccctgaggtgccaggcaagaccatcacgcggatcctcttagaggagcatctcagaaatatgacttaacctaacagtttctccctgtttgagagcaattaactcccttctcctgccttccttcccgctcctggagccaggtggctcatccttcccttccctctcctcccagtccagcctcttcctctgtccatctgtctccccagatggggggaggaatgtcgcaattggcccactttctaagtggaaagaaaccatatggagggtttagctgggaactgagagccggcccggccagtggtgcagccagtggctgcctcccttggctccctctgtgaccccagactgacaggggccccagtcctgcccaagcaccttgctccttctcccccctccccatgagctcctagtaaacatgctcttctctagcacttgggacttcttggtgtcttaggagagacctgaggagctgtgtgtgtgtgtgcacgcacatgtgcgtgtgtgtgcatgcgtgtgtgtgtgttgtgtcctgtggccccaggccagcagggtgcctggcacagagcagccactccttccagagcgtaccctgttctctccagaatgcc

SEQ ID NO: 35975 - DNA, 2300 bp, Homo sapien
ggtagctagagaacctgcagcagccctgttttcttgaaggaatgggcttggcccagaggggaaccactcagctgtccttggagaacttgttagccttgtctcctggctccaggcccttgtgtttttggtgggctcagtgtctaggcaagggcttgtcaactgtttgtcacaaggaggagacacctgggagccagagggtttgagggagggttgtatttctctccatctccatagacaccccggtccaggctgctgtcttctctcacctggaccattgcagtggcctcccgtgggtatccagggctcatcctgcccgtcaagctgtgtctcccatcctctgttttggccttttagtttcttggacctgccatgggcccttggccacagggcctttgtacctgctgcctcttctgtctgggatgtgcttccctcccctcttcacctgggttttgcctacctctcttccaggtgtcagcgtaatgctgccttctaaggggagtgctccattgctaccctggctagatccaggaccttgttccgggctctcatccccatcgcctctcggtcatcacgattttgtgtgtattcgtgtgtgggtccggtgagaggccagctctccttctggactcagcaatacgagcatacggctttgtctgcttttgctcactgtggcctcctggtgcttgccatggcgccaggcacatagagggtgctcaggaggtatattctgaatgtgtccatcatggggtggagccatatcgcctctccccccttgccaggggctagagggagtggaagcttaccatgagtacctgtatgtgggccccttcctgcagacaccaccagagatcaggtcagagcaaggggccgccagtgtccaaggacagccgtgggaggcagccaggaatcaggcaaagatcccctggggtccttctcacccctggcttcggagataccccctgcagcctgagtgctcagcagccagctctaccctagggccatggaggccgtgctgggcagagggaggggccagcctccagccacctgtggtcttggctgaattgctgccacttggcccgtccattcctcagctgcctcatccacaccaggccaggagtttccagattctctttggaaggagaaagtttcccccaacagaatcttgaagaaacctgataatgagaagcaggtgaaagccaactgccgctcaggctcgcctgtttgtagttgtcattaatatttatttgcagaacctgcaagatgacagtgtgggtgccaggcattgtcctaagtcctggggctctagcagtgagcaaggccgacaaatcccctgccctcatgggactgacgtgccagcgggaggcaaacagtcctcactagatgcgtgaatgaaaggtgtggtgttgcagggagtggtgtgtggaaacagccagtgcaaaggccctgaggtgggctcctgcctgctctgttgggaggaacaacatggacgttggagtggctggacagggtgagtgagggggagggtggtaggaagggaggccagggggctaatggtgcaggtcgtgtagaggccttgggagccattgaaagctgtggttttcactctatgagaagggagcctctgttttttctttctttcttttttttttttttgagactgagccttgctctgtctcccaggttggagtgcagtggtgcgatctcagctcactgcaatctccgcctcctgggttcaagtgattctcctgccccagcctcctgagtagctgggattacaggcgccggccaccacccctggctaatttttgtatttttggtagagatggggtttcaccatgttggcaaggttagtctcaaactcctaacctcaggtgatccacctgcctcggcctcccaaagtgctgggattacaggcatgagccaccatgcctggccatgatgggatcctcttaaagagaggacccctgtggtgtcactcaggttttaatcgggttcctctagctgccaggtgggagtgcactgtgcatgtgtgtgggagtggcaagtgtgggaggccggagcccaataggaggctaagggccctgttgtgatagcccagacagagatgctggagctgtggacctgggcggtcctggtggaggaggtgagtcgtggttggattttggatccttttcaagtagagccaacaatatttgctgataaatcaggtttgggatgtgtgagaaaaggactcaaggatttgcccaacactctggcctgcataactggaaggcagagtagcagttacctggcggggacgg

SEQ ID NO: 35976 - DNA, 2300 bp, Homo sapien
acttgcatcagcaactcataccccacctcctgtcactatgcatagccatctaggacagagatctgataaattcattcacaggaaggaatgagtgatgatgacagctccatacaggtgcagctccccgccttgtattttaatggctcttaagccttcctcaaagcactggccttggcccctagtcctaggtccctggctcctggctccaggggagagggtggtattatgaaactttctgtcagcttcgctggggcttcccagtgtggctgacatggcttctagtcctggatgcatcttgatttgctgtgtgactttgggagaattatgtgatacctctgggctaccggttcacctgcagcatggggccagggagaattagtagccatattcttggtttctgaggaggtaatatgaagggagcattttgaggaaggggtgaaatgtgaaatgagggtctagaaggctggagaagctcaggagctgaggctggactctggggcactgcagcttccttccctccccttggcccagaactggagcagtcagggattctgtagggggaatgacgggggagggatgaccctgagaccacggcttggtcttgatggagggaccacatctctggggaagcctcgcaatcccaacacaagctcctcttccaactgcttggggaaactgaggcacagaatggacaagtggcttgctggtcttcatttgacaaacccctggggaagggggccttgggtttggcccccagccaagccctgactcagcttccatcccttctccctgtggcctcctaagtggtggggagggaggttgctggctttgagtggggaggctggggtgagggaagtaaccccggggggaaattagcccaaattagcagtgagaatgaggaagggctggtgttctcttctctactcttgcagataaatatttaatcacaacaacaataatgatgatgatgatcttaataatgtgccagtagctcaggccataacccgagccccgctctcagagggaggaagtgggggtggggagaaagagcagtggagagatggagagatgaagaaagtcagggagggagggagggagggaggatgtgcaagctgaatggaggcctgctcctcatgcaggggctgctgggtttcccctgctctgcctggggtagctgtgtagctggggtggaagcaggagagtacagggtccaccttgcgctccctgattcaggatgaaaatccagaacccccacagcctcagctcctccctggccttcccttggccttcagagtgagcagctcccagcctacaccactgcgttccaggatgatttcttgagggggccttatttgtgttcctgggtctctgagtcccggaagagccaaagtgtctcgggttccagagctgacagcaggaaagctgggctgcagtaggcattgtccaagctttatctgagcttgtaattaaactgcacactccctgcgtgactcaggcaaaatgctctcctgctctgggcctcagtttcctcatctctgtaatgggattgggcccataggacctgtttcttgctctccttcatgtggatgtgttgaggaaggcccctcttccttccaagccagttcgaggctgttcctggggattgtgctctctgatgcccgggctactgatagcagtgggtacaggccttaggaagcttcaaacatgacctaatttctgccatacactctcccatttaagccagatttgagcaatggcggagaggaaaccaagttcaggagatttatggaatcttcggcgataacctctagcatctccttctctcaggctcctgatgagagatgagactagctaatgtcttctttgggcttctgtttgatattctctctctctcttccccttctaaggttggtaggaggagaggattggagctgttttctccttgatgccaagatacgccaagctaggagcattctgccctttccacagtcatccaccgagaacaggcctgcaggacgggacaaggatcagagccttcctgcaaccccggccactgcctgctgtctgtgggcctggactgtgcgggcaactgtgcttggcccgagtgacaaggaggtgggagagggtagcagcatgggctacgcggttggctgccctcagtccccctgctgctgaagctgccctgcccatgcccacccaggccgtggggccaggggcctgccagggctaggagtgggcctgccgttcatgggtctctagggatttccgagatgcctgggaagagaggcttgggctggtgg

SEQ ID NO: 35977 - DNA, 2300 bp, Homo sapien
tttggggggctatgcaaagaggctgggttacggtggctgccattatcctaagggagcctggaaggcagctcacgtcctctcagtgaacagcagtgaccgtcagcaagttacacgtgtgttgtcaagtcagttcctgttattttcttttacaatttttacatttattgcttaaattggccagaggcatcctgctgtttgcagctgaagaatcctagatgcagcagcgtacttcctgccacctggatgaggctggattgcagggcgaggcggaggtgagctggagggagaggtggagatgcttggagctcctgtttcaagccatcccgagtgcaggggcatttctgggaactggacacctttggaattcctttatttatttatttacagacatggtctcactctgtcacccagggtggagtgcagtggtgcaatctcagctcacggcagcctcaacgtcctgtgttccagtgatcctcccacctcagcctcctgagtagctgtgaccacaagcacataccaccatacctggctatttttttttattgtttattttttgtagagacagggtcttcttatgtttctcaggctggtctcaaacttctgggctcaagcgatcctcctgccttggcctcctaaagtgttgggattacaggcatgagccactgcaccccctccatgtatttattgaaacaaaacactttcagagtgaacacacccatgtcatcagcacccaggtgaaggacagaacagcacccaggtgaaggaagaagcccccaggggcccctgcatgtcccttttggtctctacccacttcaaaggtaaccaatattctgacttctctcactataggccggtttttatactttgtagaaatggaatcacatagagtttgtgcatgtctgcttgagtctggcttcttttgctcaacattacctctgagttccccccatgtggatgtgtagatgcagaatatgttttggagttggaagtgacgggacttggagattcatccagtgcccttggacaaaccacttcacatctcccactcagtccctttgtctttcaaatggggcagatggtgacaatacacagctgttagtgctgcagttttcacatcccggtctgttaacggacctggaatagggcagaggccccagggccctctcccccactttgcctgagagggtggggcctgggagcacttgagcttcagttggctccagtgtgtgaaactcacacacctctccctacccacacactccttgacatttgcacttttaacttttaaaatagctcttttcttttcttcctttctttctctctttctttctctctctctttctctctttctttctttcttagatggagtctcgctctgtcgcccaggctggagtgcaatggcgcaatcttggctcactgcaacctccatctcctggatttagcgattctcctgcctcagcctcctgagaagctgggactacgcgcctagttaatttttgtatttttagtagagacggggtttcgccaagctggccaggctggtctcaaactcctgacctcagatgatccaccctcctcggcctcccaaagtgttgggattacaggcatgagccaccgcacccggcctaaaatagctcttttcatggagtgcctgcctgccctggctctccactctgtccctctgtcctcagcgcttgggcccctggcaggacatggctgtattattagtaaaaatattaaaatattgcacaggtaatgacacatgttagtgacaatctctctcagcatatggggctttagtttgcctggacagacatggcacagggctgggcgtagggggttgaagcccaactcctggctaagttctcttagcttctgaagatagagaacgccctatgtacctctggggctgtgatgaagatgaaaggggctaccccctgccagagtctgccgacgctgtgcctataatgcctggcagcgcctgtaatgcctggcatggaggtctcaggcgtggctgcacctggcatcttctgggatagctggagcctgggtcctcccgcacacaatctggtttaggccggcgccgcagctcctgtccgtaatcccagcgctttgctggaggatcgcttgagcccaggaattcaagaccagcctgggcaacatggcgagaccctgtctgtcccaaaacaaaaaaacagattttaattggtttgggatgcggcctggacacagggaaattttaaagctctctaggtaactccaatgtgcgtcgaggttgcgaaccgccggcctgtcacaca

SEQ ID NO: 35978 - DNA, 2300 bp, Homo sapien
agttttccacagcccactcgaggcggaagtccctctcccctccccgtctcaggggcggccacacgtcccacacggacggggagagatgtacccgagagagagggcggacaggaccctctccgcacctccccagccgccaggccgccagcccggtgcccgggcctagcagcctccgcggccttggagagcgcgaagtggaggggcgcgcggctctggggggcagcccgagcccagacctgggtcccaaggtgctggcggggagcctgtgacctgggacggggtgctggaggctgaggaatcgcgcctccatgccacgccgcagaggttcccgcgctcgaaaccgaacgccctccagccaccaccactcacggcctactaagcgcgcgctccgggcccagggcacaaagatggagggagcggcgcgatccacccgccccacccccacccaccagacaaaggggcaggccgcccctcccccagccttcttcgcgggccccgccgccctctgctcccctcccctcgggccgccctttggtgacttcctttcccctccaagggcggccccgggacttctcaggaactgcgtttcacctggacgtggggcggggagccggcgcgcagagggcggcctccgggcccacccctaggccgagccggccccaggcccgcgccctcccctttgaacccgcgctcccggcccctggcgccttcccgcccaggcgcccccgcccccacccggtcaagcacgtgctgcccgggccccgagcgcttcccgccgcacgggtgggggctgggcccaccccccgcccgctccccacccccaccggaaacattcctgccacattcctgcaactgcaaggcccagcccgccgctccccaccccgcctccgcgccgggcccagggctttcctgcgtcccctccaccgccggctcgccccctgaggagggggctgggccagggcctcggctgaccggggaggaagaaggggagcagagaaaaacatgagtcacagccgtgtgtcactggagcgcatttcaattccctgcatcacaggaggtgtggaaggccgcctcggggaccgggcgcgggaggtgcgcccgagaaggccccgggccggcctgcagggcgcgccgctccgcctgcgccctttcctcccccaccgccctccccgccatcttcccctttggcttccttctcgctcggtgcaacaagtctttgttaagccgggcgccgggcgggccaggcgtggcggagatggcctgcgtgctcggcccctgccctcaaagcgcttccaggcgacctctggcccaccttttatttttatttacagtcccaacggaagggcccaggtccccaagtgggcctgcgtatctccagaacaccatctaagtcacctcaaggtatgaagcctcccttgggtgtacctgccaacgagccaatcgttggtttcgctggaaggctccaccttgatcatggctcgctggtggccattaataaaacactttggatttcacaagtttcacgtttgaatttcacaagacttgtatctcaccaatcagccacacgcgggttgacactgaaaggcacatgctgacacctgtccgcccaggggaaatctaccatctctctattttagttagggggcggcgtgtaggccgcggaattctctaacgagcgcgtttctcttcaccccctgggcccgcgtggacccccgtccacccccacacgccctggggggggggccgggcccacacgccctggaagcccctagaggtgactctccctgggacccctgtaccagggaggaaggataccgccacccgtcaccaccccccgccagaagctccttcgtgactcctctgcgcgtgccttcccacacctcctccgtccgggactgcgaggagtgggcggtcgactcgagttcgcagcccaggcctcccacacgcccctccctgccgtcagcacccacccgcgcggcagcggcggcggcggctggcgggcggccgcccttttaaatccccgggctcatttgcatggccccgccccctgagtgacacggctggcgcgggcgggcccgtcccccctgcccctgggtcgctctttttaagctcccctgagccggtgctgcgctcctctaattgggactccgagccggggctatttctggcgctggcgcggctccaagaaggcgtgagttcgcggccgctccggtggcttcttttttttatatctataatttaattaaattatttatttattgaggccgcgcacgggccgtgcccagcttcctgcccctcgc

SEQ ID NO: 35979 - DNA, 2300 bp, Homo sapien
cgtgctgcccgggccccgagcgcttcccgccgcacgggtgggggctgggcccaccccccgcccgctccccacccccaccggaaacattcctgccacattcctgcaactgcaaggcccagcccgccgctccccaccccgcctccgcgccgggcccagggctttcctgcgtcccctccaccgccggctcgccccctgaggagggggctgggccagggcctcggctgaccggggaggaagaaggggagcagagaaaaacatgagtcacagccgtgtgtcactggagcgcatttcaattccctgcatcacaggaggtgtggaaggccgcctcggggaccgggcgcgggaggtgcgcccgagaaggccccgggccggcctgcagggcgcgccgctccgcctgcgccctttcctcccccaccgccctccccgccatcttcccctttggcttccttctcgctcggtgcaacaagtctttgttaagccgggcgccgggcgggccaggcgtggcggagatggcctgcgtgctcggcccctgccctcaaagcgcttccaggcgacctctggcccaccttttatttttatttacagtcccaacggaagggcccaggtccccaagtgggcctgcgtatctccagaacaccatctaagtcacctcaaggtatgaagcctcccttgggtgtacctgccaacgagccaatcgttggtttcgctggaaggctccaccttgatcatggctcgctggtggccattaataaaacactttggatttcacaagtttcacgtttgaatttcacaagacttgtatctcaccaatcagccacacgcgggttgacactgaaaggcacatgctgacacctgtccgcccaggggaaatctaccatctctctattttagttagggggcggcgtgtaggccgcggaattctctaacgagcgcgtttctcttcaccccctgggcccgcgtggacccccgtccacccccacacgccctggggggggggccgggcccacacgccctggaagcccctagaggtgactctccctgggacccctgtaccagggaggaaggataccgccacccgtcaccaccccccgccagaagctccttcgtgactcctctgcgcgtgccttcccacacctcctccgtccgggactgcgaggagtgggcggtcgactcgagttcgcagcccaggcctcccacacgcccctccctgccgtcagcacccacccgcgcggcagcggcggcggcggctggcgggcggccgcccttttaaatccccgggctcatttgcatggccccgccccctgagtgacacggctggcgcgggcgggcccgtcccccctgcccctgggtcgctctttttaagctcccctgagccggtgctgcgctcctctaattgggactccgagccggggctatttctggcgctggcgcggctccaagaaggcgtgagttcgcggccgctccggtggcttcttttttttatatctataatttaattaaattatttatttattgaggccgcgcacgggccgtgcccagcttcctgcccctcgccatccttcgggggagggggaatatttttgtccccccgcctggctgtgacacataaataccccgcgggggcctgggcggcgagcacgcggcggcggcggtctctgagcgcctctgctctctcccggtttcagatccgcatttgctaccagcggcggccgcggcggagccaggccggtcctcagcgcccagcaccgccgctcccggcaacccggagcgcgcaccgcaggccggcggccgagctcgcggtgagtcgtccccggggcccgcggcggcggcggcggaggggggcgcccgcgcccccgcccgcacgtcgcccctcctgcgagccgcccggggctgcagcgcgcgccgccggctttattcccaggccggggcggcgcgagccggcggcgggggagggccgcgcggcgcgggggcgggcggcggggcccggcggcgcggggaggacgcccgcaccccttcccccgcgccgcgggcgccctgcggggggcggggacccgggaaaggcgcgcggtgggggagggggcgcgcagctgcggcgagcgcgagttgtgcacccggcggagcccggaggagcccggcgcacctcgcgcggcggccgctcccgctggagccggagcccgagcccgagcccgggcccgggtgaggggcggggagagacacgggctgcggcgcggcaggagagtggggggtcgggcgccccccgcagctcagggaagttctggaagtgagggagatggggagga

SEQ ID NO: 35980 - DNA, 2300 bp, Homo sapien
gcccctgccctcaaagcgcttccaggcgacctctggcccaccttttatttttatttacagtcccaacggaagggcccaggtccccaagtgggcctgcgtatctccagaacaccatctaagtcacctcaaggtatgaagcctcccttgggtgtacctgccaacgagccaatcgttggtttcgctggaaggctccaccttgatcatggctcgctggtggccattaataaaacactttggatttcacaagtttcacgtttgaatttcacaagacttgtatctcaccaatcagccacacgcgggttgacactgaaaggcacatgctgacacctgtccgcccaggggaaatctaccatctctctattttagttagggggcggcgtgtaggccgcggaattctctaacgagcgcgtttctcttcaccccctgggcccgcgtggacccccgtccacccccacacgccctggggggggggccgggcccacacgccctggaagcccctagaggtgactctccctgggacccctgtaccagggaggaaggataccgccacccgtcaccaccccccgccagaagctccttcgtgactcctctgcgcgtgccttcccacacctcctccgtccgggactgcgaggagtgggcggtcgactcgagttcgcagcccaggcctcccacacgcccctccctgccgtcagcacccacccgcgcggcagcggcggcggcggctggcgggcggccgcccttttaaatccccgggctcatttgcatggccccgccccctgagtgacacggctggcgcgggcgggcccgtcccccctgcccctgggtcgctctttttaagctcccctgagccggtgctgcgctcctctaattgggactccgagccggggctatttctggcgctggcgcggctccaagaaggcgtgagttcgcggccgctccggtggcttcttttttttatatctataatttaattaaattatttatttattgaggccgcgcacgggccgtgcccagcttcctgcccctcgccatccttcgggggagggggaatatttttgtccccccgcctggctgtgacacataaataccccgcgggggcctgggcggcgagcacgcggcggcggcggtctctgagcgcctctgctctctcccggtttcagatccgcatttgctaccagcggcggccgcggcggagccaggccggtcctcagcgcccagcaccgccgctcccggcaacccggagcgcgcaccgcaggccggcggccgagctcgcggtgagtcgtccccggggcccgcggcggcggcggcggaggggggcgcccgcgcccccgcccgcacgtcgcccctcctgcgagccgcccggggctgcagcgcgcgccgccggctttattcccaggccggggcggcgcgagccggcggcgggggagggccgcgcggcgcgggggcgggcggcggggcccggcggcgcggggaggacgcccgcaccccttcccccgcgccgcgggcgccctgcggggggcggggacccgggaaaggcgcgcggtgggggagggggcgcgcagctgcggcgagcgcgagttgtgcacccggcggagcccggaggagcccggcgcacctcgcgcggcggccgctcccgctggagccggagcccgagcccgagcccgggcccgggtgaggggcggggagagacacgggctgcggcgcggcaggagagtggggggtcgggcgccccccgcagctcagggaagttctggaagtgagggagatggggaggaacccccaaattcggccctacgccctctcggcctttctctcgcgccccctccgcagatgaggccggagcgcgggcctgggtttggggcttcaccccgaccccacctctggcctggcccgcgcctcttcagccccaggggccgggcctgccctccgcccccacaaactggtttcgctgctttgctgggctctgttggaactagtccctttgactccccgtttctattttattttcttctggggctttattttgcggggaggggacggagggagggggctttcttcctctcccccgcgcccgcgcgcgccaggtttcctgccccaaggcgggcttgggtgccccctctggcaggaagtggggccgggtgcacccgcgtggcggtgcatgcggtcggggtgcgctgctttcccgcgcctgcaggagcggcctgcgcccctccccccgcgcgccctggccccgggtcccgccggccggcctgcaacggccgggcgcagacacttgcagagtcaccctcgggccgggtctg

SEQ ID NO: 35981 - DNA, 2300 bp, Homo sapien
cgagttcgcagcccaggcctcccacacgcccctccctgccgtcagcacccacccgcgcggcagcggcggcggcggctggcgggcggccgcccttttaaatccccgggctcatttgcatggccccgccccctgagtgacacggctggcgcgggcgggcccgtcccccctgcccctgggtcgctctttttaagctcccctgagccggtgctgcgctcctctaattgggactccgagccggggctatttctggcgctggcgcggctccaagaaggcgtgagttcgcggccgctccggtggcttcttttttttatatctataatttaattaaattatttatttattgaggccgcgcacgggccgtgcccagcttcctgcccctcgccatccttcgggggagggggaatatttttgtccccccgcctggctgtgacacataaataccccgcgggggcctgggcggcgagcacgcggcggcggcggtctctgagcgcctctgctctctcccggtttcagatccgcatttgctaccagcggcggccgcggcggagccaggccggtcctcagcgcccagcaccgccgctcccggcaacccggagcgcgcaccgcaggccggcggccgagctcgcggtgagtcgtccccggggcccgcggcggcggcggcggaggggggcgcccgcgcccccgcccgcacgtcgcccctcctgcgagccgcccggggctgcagcgcgcgccgccggctttattcccaggccggggcggcgcgagccggcggcgggggagggccgcgcggcgcgggggcgggcggcggggcccggcggcgcggggaggacgcccgcaccccttcccccgcgccgcgggcgccctgcggggggcggggacccgggaaaggcgcgcggtgggggagggggcgcgcagctgcggcgagcgcgagttgtgcacccggcggagcccggaggagcccggcgcacctcgcgcggcggccgctcccgctggagccggagcccgagcccgagcccgggcccgggtgaggggcggggagagacacgggctgcggcgcggcaggagagtggggggtcgggcgccccccgcagctcagggaagttctggaagtgagggagatggggaggaacccccaaattcggccctacgccctctcggcctttctctcgcgccccctccgcagatgaggccggagcgcgggcctgggtttggggcttcaccccgaccccacctctggcctggcccgcgcctcttcagccccaggggccgggcctgccctccgcccccacaaactggtttcgctgctttgctgggctctgttggaactagtccctttgactccccgtttctattttattttcttctggggctttattttgcggggaggggacggagggagggggctttcttcctctcccccgcgcccgcgcgcgccaggtttcctgccccaaggcgggcttgggtgccccctctggcaggaagtggggccgggtgcacccgcgtggcggtgcatgcggtcggggtgcgctgctttcccgcgcctgcaggagcggcctgcgcccctccccccgcgcgccctggccccgggtcccgccggccggcctgcaacggccgggcgcagacacttgcagagtcaccctcgggccgggtctggagcctgatgcctcgggggtttagccctagccgctaggcgggtaggcaaagtgtcgggttgaaagggtctccgggaacctacttcttcctgctcgccaacttgctgtgtgaccttaggcaactcaaggcttctctgggctacttttttacgggggacggggaagaaaacaagggaacccccaagataatttcctagggcctttcctgcagagtccttaagtatttgaggagcacagtttgcatgcacagtgtatggaggagacaggcttgaggcccaagcgggcttattacaaagtgagggattggggttaggccctaaatgtagttcctccaagacaggcctctgatgttcagaaacaggtggaaaagacgaacgtttcttggcctcactggaaagggcctcgggccttcatttagttcgtggggggttggctgaggggattaaagggtccccagcagcaagaggtggggggaggcaccagatggtatgagagcttccagggagacccgccaagatctccaggcaggccgggccaggctctctgggattccggactggcttcgcccaactggaaccccctcgatgagggggccccaggcagaccttatatgaggtcagcactcgtttagttgattaattttgatgt

SEQ ID NO: 35982 - DNA, 2300 bp, Homo sapien
cccaagtttggaaagcttttggtcatggtttcttcaaatatttttctgtcctttctttcttctccttttggacctctaattatccatatattaggccacttacggttatcccgcaactcactgatccttttttcatttttctttttttttttttttggatttttttatctttgggttttattttgggtagtttctattgctatgccctcaagttcacttgtcttttcttctgtaatatctaacctgccattaatcctgtccagtgtgattaatcctgtccagtatgatttttttaatctgatattgtagttttcatctctagaagatcactgggatattttcatacattccttgtcttaagtgctgggattacaagtgtgagccacagcacccagccagggtcctttttttttaatttttgagacagagtttcactcttgtcaccagactggagtgcaatggcatgatctcggctcactgcaacctctgcctcctgggttcaagtgattctcctgcctcagtctcctgagtagctggaattacaagctcctgccaccacgcccagctaatttttgtatttttagtagagatggggtttcacctctttggccaggctggtctcgaactcctgacatcaggtgatccaccacctcggcctcccaaagtgctaggattacaggcatgagccaccgcacctggccaccaggttccattttttagtggatgtcagatattataaaaactggatatttttgccttcctataaatcttcttgagcttcattctaaaagttaactgaaaatagttcaatcctttcaggtcttgcttttatggtttgttcagtggatccagagctggaggacacgaggatgagtgaggcattagctgaagtgggcagacaagtccaggcactaaccacagcagcatggatcaggaggcagtcaaaactcgagcatggtagcacaatgtagcctcaaccccaccctagcctcccgcttcctgaaacggtagctgcatgaagagggaaggcagagctgcagttttcccggctatacttggaggtactctcatcagatatgaagcctgaacacagcaagacaccaggcctcaaatgtagctctggggccgctgtcagcagagagctgtccaagaagagaggcccacctgtcatctcatcccaccctgcccttaatgatcaggccaagggccctgagaagtcatctcattgcttgagcatcaattaactcatctgcaaattgcgattgctccacttgccctgcctagctcacaagggtgttctctcttaggagaaaagaaagtaaaatccggccaggcccagtggctcacgcctctaatcccagcactttaggaggctgagacaggtggatcacctgaggtcaggtgttaagagaccatcctggcgaacatgttgaaaccccctctctactaaaaatacaaaaattagccaggcatggtggtgcacacctgtagtcccagctactcgggaggctgaggcaagagaatagcttgaaccagggaggcagagattgcagtgagctgagatcgtgccactgcactccagcctggacgacagagacagactccatctcaaaaaaaaagtaataataataatcctcacacagcttgttttacagacgttaagacaggcgcagagagggtgggcgtgccagggccctcggtagcccagacctgccgtactctaccagccgagcacagcccgaaggccagggaacaaacacagacggaggccgagtgggcccggagcagggtcttgccgcgaagggcctgggctcaacgttagagcgtggcgcgaccctattctggctgcaacgagaggggtgaatgaagtgggcgccggggacctcccagaatcggagctccagacgcgggcgggccaggggccgccggaaaactgcgcgcgccccgccctaccccgtccggccccgcgtcgcgttctcctcccccactgcgcagccctcggctgccccctgccgccgccgggcggaccctgcaagccccgctgtccccgccttcgcaccgcccacccccgcctccggattggcggctccagaaatctccaggccaccggctttccgctaccggattggctgcgtccgggtgctgaggcccggcccatttccccgggtcctttgatcacgcgcctgacggcttttccggggcccgggagccaaccgagggcgttcctgtcggggctgcagcggcgggaggtaaggcatggccaggccggctgggctgcagagcgccggcacgggtccacg

SEQ ID NO: 35983 - DNA, 2300 bp, Homo sapien
caggaaatacctggagaaatcacagtggaatgaatttttgctttaagagaaatgagagttggctgtctctgtaattgataatacagcttcatcctagtcccatctgcatttcagaaaataaccctcatctttacaaaacacaggacacttgtgggacagttaactcaagcagctatggggagggaggagattattgaatggtgattaaataatgcaaatggctcttctgtttcttaaagactgtggaagaggtcagactgcccagttgaggtgggcagttcatactgctcagttgaggtggcagtcatttattctgagtcctgttggatagagcctatctcctcaaggctacagaggcttccaggatatggagctgtgcatgttaatggctcagccttgcctccatcagggcacctgcctaacttggagcaagtgggagagcaccctagagtcatcctctgtgctgtttcgtgagttttgcagcggagacttcaccatccggaggagctgtgtttctgtgtcacttgggatatcacctaaaaatgaaacatttgatattttaaggtataaaaaaaaagtaaattggggaacattggctgcagtccctaaaagatactgttgtctgtgcatcaggttagcttgaggtcaccacaggtcctgggagcccagagagtttaggcatactctcctttggaggccagcagcctttcacaaaccctgcctctaaaagggcggtttcacatttgaccatgtttttgcattagcctcagaaactcttgtctttagctgataacctttgagggatgtgagaagcctagttggagcatctgagaaaatgatacctctcaccttcaaattaatcaaatagtttgtccttctagtccccttataaattaataaatggagggctggtcatggtggctcacgcctgtaatcccagcactttgggaggccgaggcgggtggatcacaaggtcaggagttcaagaccagcctgaccaatatggtgaaaccccatctctactaaaaatacaaaaattagccaggtgtagtggcacgctcctgtagtcccagctactcgggaggctgaggcaggagaatcgcttgaacccaggaggtggatgttgcagtgagccgagatcccgccactgcactgcagcctaggcgacagagcaagactccgtctcaaaaaaaaaaaaaaaaaaaagaaaagggaagggaatcccattttgtgatgatttgggcacactacttgagctgaggctagcagtcacatgattttggctgtctctgacctgaagcttttgaagtaaggttatgtctcttccctgaagctttgtttatagtggtaatttggtgagtttgagctttgagcttgtcttagaaaataagactgtccacctggggaggggagcttatagggaacccgtgttaactcagaatgctgaagaaagtgcttttagccaacaaaagtaagattactatctagaaggtggaaagaagtcattgcttctgttcctccagcagtcagttgactctaggtttcctttggtttatatccccagttcttaatactaaaacttatttgacttcctatcaggaagcacacaaaaaaagcgtcatttaaaaccctggatataggctttaaaggatacaaaaacagcagcattgtcgttttgccaggttcatcaccattttgatgtgctacccatccttccaccctccctttcctgcccccaagcctcccagccaggccagatgtgaagattctattaatcactgtttcagagaacattaattcttgtatagaataattatctactaaattgcttattatctgtgactaccttgcagagaacatctcaacagtgcagtaaaatagctctcctagacttgagcttccagccaggcatttagatcactcttaagcctttgtggaattctgaggaaaaaaagcaagatgcctcaatgccaatgctgggccataagattctactcccctccctgtagggtggggcgcgtggctcagctttggaaaatcattttgccagtaatattgcctgtgaatccctttaagaagtcgtcctgatctgagcctgtctttctgagcactttggtgctgaattgaaaatggtaagctaaagcagtgacagatccacgtagcctctttaacctctttattatcttgccaaaaaaaaagtttctcaggttaaacctttgtctttaacctccctttgttgtggagaaaatgtgtcactaatcagtggtccaagggatatctagctttggttactcagttcc

SEQ ID NO: 35984 - DNA, 2300 bp, Homo sapien
ggtgtattgataatgttgctgtttggtgttaagtgatggggctttttcttctgtttttattgagggtgggggttgggtgtgtaatttgtaagtacttttgtgcatgatctgtccctccctcttcccacccctgcagtcctctgaagagaggccaacagccttcccctgccttggattctgaagtgttcctgtttgtcttatcctggccctggccagacgttttctttgatttttaattttttttttttattaaaagataccagtatgagatgaaaacttccaataatttgtcctataatgtgctgtacagttcagtagagtggtcactttcactgcagtatacatttatctacacattatatatcggacatataatatgtaaataaatgacttctagaaagagaaatttgtttaatttttcaaggtttttttctcttttaatttgggcatttctagaattgagagcctcacaattaacatacctttttgttttcgatgctagtggctgggcaggttgccctgtcctttctctatttcccagtcattgactgtagatatgggaagagtttagctaccttcatagtgctcccaggactcatggcctttccttctttaagctgtatttccctgcccagaaagaaacaggaagaaacctttttttatttttttatttttttttaaccaagcaaggagcaaatggcctcagcccagatctgtaaaaacaatgatagaaattgaattctgccccacatgttgacagtagagttggaactggattcttgggattacttatctaaaaaactggagcatcaggtccatttctgttctgctggtttggaatcttttccgtaatgctatttattgccaacaatggcctctctttgtgtccatatatgccttacaccgtgctgacctgggtatcatccatgtgctctgaagcatccaactttactttgcaggtgcatcaatgtagtcctgtccctgaactgagtaaccgtgttcctgaaaagtacactagggaaattcacctgcttgcttgtctttgtattggcatggcacttgtgattgcaccatggagcatgctcagagctattaaattggtctcccatctcccaccaggatatgaaaggtccatatgggaggccacgtaatcacttattacagtggttacataatacactggctcactgcagactctcttgttttttgatacagtttcgtgctggcttcatttgccaattgtgttgtttagttcggaagtaagagggtcttgagattgaggggtagggagggctacactgactgatccgtggcttaagacaggagattatctctgtactccagtggcatctccttagccaagatgtgaaattaaaatcatagttcgcctcatttaaaaattctaataaagcactcaaactttgaaaagcttttacttttccctcctactaaaagaaatgtatgtacctcatagccctgtgtcatttagtgttcagcacttttgggaacatcagttggtgaactttaaattttgctgtctactcactgggcacggtggctcacacctgtaatcccagcactttgggaggctgaggcaggtggatcacctgaggtcaggagtttgagaccagcctgaccaacatggtgaaaccccgtctctactaaaaatgcagaaattaggtgggcgcctgtaatcccagctacttgggaggctgaggcgagataatcgcttgaacctgggaggcagaggttgcagtgagccgagattgcaccactgtcgtccagcctgggtgataagagtgaaactccatctcaaaaaaaaaaaaaaaaaatttttttttttttttttgctatatactcttagtttacatcctctcccccaatcttcacacacagagccaaagagcagttatattcttgggataccatgatacctctgggaaaggaattatattcccaaggagaggtcccattggataagaacaataccatgggacttgagtctgaatgccaacttactattcacacatccttcttaaaaacgaacacactgtttcttttcctgacctagagcattctaaagttctgttcaaataaataaagggcaaaataaagtagatttaaccaagtgccaggtggaattcaaaaaacacattcttccagataaattctacctttatggtatggatttgaaagtactttgcaggaaaacagtcagtactctttaaaaagggactgcagggctgggtgtagtggctcacacctgtaatcccagcactttgggaggccaaggcaggtgg

SEQ ID NO: 35985 - DNA, 2300 bp, Homo sapien
cccgggttcaagcgattctcctgtctcagcttcctgagcggctgggattacaggcacgcaccaccacgcccggctaatttttgtatttttagtagacacggggtttcactgtgttggtcaggctggtctcgaactcctgacctcagatgatctgcccaccttggcctcccagagtgctgggattacaggcttgagccactgcgcccggccgagtataattttttaaaacaaatttaaatgtactacttacccattatcttcaaggaaaggacagaatcccttggttaatgctccctgaacaaagacaaagtaattattactcagtcaagggatctgggagtaatcttgtgggctcttgaaactaaacatgcccataggctgggagcagtggcttatgcctgtaaccccagtactttgggaggctgaggcagaaggactgcttgagcccaggagttcgaggccagcctgggcaacatggtgaaaccctgtctctacaaaaacatacaaaagttggctggacgtggtagcactccaggctgcatgacaggcgcctgtggtcccagttacttgggaggctgaggtgggagcatcgcttgagcccaggaggtctaggctgcagttgagctggctgagattatgccactgcactccaccttaattgacacagcaagaccctgtctccaaaaaacaatcaatcaaacaaaaaaccccaaacaaacaaaaacatgcccataaaaagtcagggtaaggaattagaaaccaaaagaaaacctccatctatctattcattcaacatttactgaactctaattttcttttcttgaagagaggaaagtttaataggcaaacaaactattaatagcatctggtgtgccctgagtgcttgctatgtgccagggccaagtaggtctctattttgcggaagttaaaatatgatgtaatcgggtggtatgagcattaaaaaaaatgtaattgaggttacaaccaaggtgtatttgctttcaaatccagatctttttgactatgctaaatacaagcaaattcaaaaaggggaattagccggctgctgtggctcacaccagtaatcccagtgctttgggaggccgagggtggatagcttcgaggccaggaattccggaccagcccgggcaacaaaatgttaaataaaaaaattttaaaaaattaaataaaaaaatttaaaaaacaaaaaagggtattaaacaactcacagacagatactgcacaggatttttggtacgtttagggcatctgcatggtacttggtttgttctgggttgctgagaacattcacaggtcatacaccagttttcctttctggagagcttctgtctgtatatcttttcctggagaatctgtttgacatccacaacacacactcctcatttattgccagaaacgatgatgttttatgatttacattatgtgtgtacacacgcacgcacgcgcgcgtgttcctttctggccctcttgtttaccataagaggaagcaattacctttagcatcaataaaagattgcagaataaatatttgttctttgtaatgggcgacatgcaccagcccctaagacatcctgaggttcaggctatcaacgcaaagtgcacacgcctcccatgcgccgtttccttgcagttccaaatcccagatgtctcaggctgcagcttccgttgcctttaactacatcctcctttttccaacaaaccttccccctcaaccccttcgagaccgaccggcagggcccaggggcgggtggcgtgaccttggttcatcctcggccgcggagacgcggcgtgaccttggccaagtccccgcttccccatccgcagacttgcgcggctggaccgctcggtctccgctccggccgctaggcgtcctgcgccgctgttcttatctcccccggcttcctccgcgcaccccaccagttctacgcctacgctgccggcgtagcggtcgcctggagtcgcgcgtccctctcctttcagatgctggtttccaccgcgcgaactgggagggcgcgattcgcgaacgcggcctgcgctgcgagcgcgcggccgtcccgcaggccggtgcagccttacgccgctgacgcatcgcgcccaagatggcggcgcggtcgtcgtcgggggtggcggcggcagagggggcggcggccctggcggcagcggagacggcagccgtgacggtggcagcggcggcgcgggacctgggcctgggggaatgaggcggccgcggcgggccagcggcggagccgtgtagcggagaagctccccctccctgcttc

SEQ ID NO: 35986 - DNA, 2300 bp, Homo sapien
gttaaaggactgaaattgcatagaatatgttcatggggaaaaggacttaaattagaaaacaccataataggatatctagaaaaggctcaaatatttgtaaattaaataatctacttctaagtaacccatgaaacaaaagtcacaaaagataaaatgtttctaactgatatcagtatttatgaggcttaactaaaggaggctgggcgcaatggctcacacctgtagtcccagcactttgggaggctgagaggggcagattgcgtgagtccaggagttggagaccagcctggacaacatggtgaaaccccatcgctgcaaaaaaaaaaaaaaaaagcagtgcttagaaggatataaatagattcaactagtattagaaaggaggaaaagcttaaaatcaatattataaatttccaccttaagatgcaagaaaaggctgagtgcaatggctcacacctgtaatcctagcactttaggaggctgagacacgtagaccacttgagcccaggagtttgagaccagcctaggcaacatagtgaaaccccgtttctatgaaaaatacaaaacttagctgggtatggtggcaccagtagtcccagctactcaggaagctgaggtaggaggatcacttgagcctgagaggcagaggttgcaatgagccaagatcacaccactgcactccagcctgggaaatagagcaagaccctatctcaaaacaaactaataaataaaataagctagaaaaaagtaaacccaaattaagtaggggaagaagttaataaaagaagaaatcaatgaaatataaatcaaacaatagaaacaacaaagccaaaagttgtttctttgaaaagattaattgtaaaaaataaaaatagccaagcatggtggtgtgcacttgtagtcccaactacttgggaggctgaggtgggaggagagcttgagccctggaagcagaggttgcagtgagccaagattgcaccactacactccaacctgggcaacagagcaagaccctatctcaaaaataatagtaatataataataataatatactgacaaatgtatcatattaatgtaagatgtcaacaataaggaaaactgggtgtggagcacatgggaactctactatcttcacaacttttctatagacctaaagctattctaaaataagtctaatcaaaaaaacttgccataaagaaaattccagtgccaggtggtagcattggtgaaatctatcaaaaacccaagaaagaagggatacaaattctacacaagctttttcagaaaacagaggaggaaagaatactttaaacttattttatgaagctgaaataattatgatatgaaaatctgataattacaagaaaaaagttacagacctgtatccttcatgaacacacacacacacacacacacacaaatcatgaagaacatatcaataaatagaatccagcaatatatacagtgaaatatattatgaccaaaaatttaatacaagaatataaagttagtttaactttacaaaaatcagtgaaataaaccacatcaacatcataaaagagaacaactatatgattgtcttgatcctagaaaagcacttgacttttaaataaaattattatttcacagtcaatactctcagcaagctaggaatagaagcaaacattcaccacctgataaaggacacctatgaacaacaggtgaaatggtgaaagaataaatgttttcccattaagatcaaaagcaaggcaagaatatctcctctcactgctattattaagtattgtattagagatcctagctagtgaaataagacatgaaaaataaatagaaggcactgatctcatgggccactcctgagtcctatggcaccctctggagtcagaggtgaaataatccctccagaaccacatggactaatgacaaggaaagagtgattccctaaggaaaaatcagggcagccgccgccgcccgaccgccgggaggatggagttcagctggcagcggagctgtctcagtctttgccgccgcgccggcgagcgccgcccgggaggcagcggctggaggagcggacgggccccgcggggcccgagggcaaggagcagccgcctgccttggcctcccaaagtgccgaaattgcagcctctgcccggccgccaccccgtctgggaagtgaggagtgtctctgcctggccgcccatcgtctgggatgtgaggagcccctctgcctggctgcccagtctggaaagtgaggagcatctccgcccggccgccatcccatctaggaagtgaggagtgcctct

SEQ ID NO: 35987 - DNA, 2300 bp, Homo sapien
ctgcaacctccgcatacggggttcaagcgattctcctgcctcagcctcctaagtagctggaattacaggcgcacgccaacacacctggctaatttttttgtatttttagtagagatggggtttcactatgttggccagctggtcttgaactcctgacctcaggtgaaccgcccaccctggcctcccaaagtgctgggattacaggcttgaactgccgcgcccagcctctttttttttttttttttatttaaatagagccagggtcttgctctgtcacccaggctggactgcaggggcacgaacccggctcactgcaccctccactttcctggctcaagcgatcctcccgcctcagcctcctcaataactgggactacaagcgtgcaccaccacagtcagttaattaaaaaaaaaaattgtagagatgaagtctcaccattgcctaggctagtctggacctcctgggctcaagcagttctcctgcctcagcctcccaaaatgctgagtcaattttttttttttttttgagacagagtctcactgtcgcccaggctgcagtgcagtggcatgatctcggctcactgcaacctccacctcccgggttcaagcgcttctcctgcctcagcctcccgagtagctgggactacaggcgcccgccaccacgccggctaattttttttgtatttttagtagagacagggtttcaccattggctaggctggtctcgaacccctaaccttgtgatctgcccacctcggcctcccaaagtgctgagattataggcgtgagccactgtgcccggcctctgttttttattaaaaaaaaaaaaagtctacttgtgtgagtgcatatgaatttggaaaagtgtataccacaatgttaatagctattttctttggttgatgggattatgtttttagtcttttatcgtcatctgatttatatgttctctctcttttcttgctccaagagcatatatcacttgcataatagattttggccgggaaaaaaagaagaagcgtttctaaaacgacagcccaaaataagtgaccctgtactgatagagcacgcaagctcagaagttcccggcggcggtttcctagtgcgtgcgtgagtccctcaggcggtcaggctccgtggtcagatccgccagttcttcaggcaccgccgaggccaccccaggctccccgcgggtcctggcggggggcgggtccacgccagcccggaagagacgcagcaccgcgcatgctccttcctttccagccccggtaccggaccctgcagccgcagaggtgagtttctgtggcgttcgagttccatcggctcccatccgggctatcctgccgccttagcggctgcttctccccaggatgcgggcagggggcctctctcccactccccacacaccgatttctgagtagcgataggggctggaggcttattttatggggtagggggccgctggtaggcgaagattgtccgagggagagggggaggatgaagccagtgagtggcggagacttgccaggtgagactagcgagacggtgtcccaccgacacgcttttttcttgggaacaggactcccccgactgcctccttgcctggcactggagctctagtttgggggagaagtggtaggtaggagacgagggtgcgaaggccttagccctttggtttggggtctgccgccttcaagaagccggggctttacccctccgggccttccctgcgtaccttatggtacagccgcgagattccgcgctgggtacggtcgctgatggcctccaactgctcccgataatacagggtttgctcctctcccccccattgacctttgtaattgatgagaacttaaggaagtttggcgcgaatgtgcaccactatcctggttttaacatactgtcaacttttccacctgaattgtgtttgggggtggggactgacggagctggcctctgccgaatctgttttgtggagttgagtcttcccaccagcatgttgtctacggttttgtgtgggtcactttaggatcaagaacttgattaccgggccccggcctcgttactcagaagtgctcttgacaatcgtctccttcttgcagatgttgatgcctaagaagaaccggattgccatttatgaactcctttttaaggagggagtcatggtggccaagaaggatgtccacatgcctaagcacccggagctggcagacaagaatgtgcccaaccttcatgtcatgaaggccatgcaggtaggagggtgaggaggaagatgggatggatcttcctccccgggatcc

SEQ ID NO: 35988 - DNA, 2300 bp, Homo sapien
cttttttttttgacagagttttgctctgtcacccaggctggccaggcaatctcggttctgcagccttgacccacgggctcaagcaatcctcaaaactcagattcatgagtagctgggattacagtcacccgccaccatgtccggctaatttttttttttttttttttttttttgagacagaatcttgctctgtcacccaggctggagtgcagtgacgagatcttgactcactgcaacctctgtcttccaggttcaagcgaattctcctgcctcagcctcgtgagtagctgggattacaggtatccaccactatgcccagctaatttttgtatttttagtagagacggggtttcactatgttggtcaagctggtctcgaactcttgacctccggtgaaccgcccacctcggcctcccaaagtgctgggattacaggcctgagccgccgtgcccggtccacttttcttttcttttttttttttttgagacggagtttcgctcttgtcgcccaggctgcagtgcaatggtgcaatctcgactcactgcaagctccacttcccaagttcaagtgattctcctgcttcagcctcccaagtagctgggattacaggcgcccgccaacatgcctggctaatttttgtatttttttttttagtagaaatcggatttcgccatgttggccaggctggtctcgaacgcctgacctcaggtgatccacccgcctcgggctcccaaagtgctgggattataggcgtgagcctctgcgcccggccccactttcctttctttctttttagacggagtgtcgctctgtcgcccaagctctggagtgcagtggagtgatctcggctcactgcaacctccgcatacggggttcaagcgattctcctgcctcagcctcctaagtagctggaattacaggcgcacgccaacacacctggctaatttttttgtatttttagtagagatggggtttcactatgttggccagctggtcttgaactcctgacctcaggtgaaccgcccaccctggcctcccaaagtgctgggattacaggcttgaactgccgcgcccagcctctttttttttttttttttatttaaatagagccagggtcttgctctgtcacccaggctggactgcaggggcacgaacccggctcactgcaccctccactttcctggctcaagcgatcctcccgcctcagcctcctcaataactgggactacaagcgtgcaccaccacagtcagttaattaaaaaaaaaaattgtagagatgaagtctcaccattgcctaggctagtctggacctcctgggctcaagcagttctcctgcctcagcctcccaaaatgctgagtcaattttttttttttttttgagacagagtctcactgtcgcccaggctgcagtgcagtggcatgatctcggctcactgcaacctccacctcccgggttcaagcgcttctcctgcctcagcctcccgagtagctgggactacaggcgcccgccaccacgccggctaattttttttgtatttttagtagagacagggtttcaccattggctaggctggtctcgaacccctaaccttgtgatctgcccacctcggcctcccaaagtgctgagattataggcgtgagccactgtgcccggcctctgttttttattaaaaaaaaaaaaagtctacttgtgtgagtgcatatgaatttggaaaagtgtataccacaatgttaatagctattttctttggttgatgggattatgtttttagtcttttatcgtcatctgatttatatgttctctctcttttcttgctccaagagcatatatcacttgcataatagattttggccgggaaaaaaagaagaagcgtttctaaaacgacagcccaaaataagtgaccctgtactgatagagcacgcaagctcagaagttcccggcggcggtttcctagtgcgtgcgtgagtccctcaggcggtcaggctccgtggtcagatccgccagttcttcaggcaccgccgaggccaccccaggctccccgcgggtcctggcggggggcgggtccacgccagcccggaagagacgcagcaccgcgcatgctccttcctttccagccccggtaccggaccctgcagccgcagaggtgagtttctgtggcgttcgagttccatcggctcccatccgggctatcctgccgccttagcggctgcttctccccaggatgcgggcagggggcctctctcccactccccacacaccgatttctgagtagcgataggggctggaggcttattttatg

SEQ ID NO: 35989 - DNA, 2300 bp, Homo sapien
gaatcccagtaaacctttggcaccctgttggaatgctgcctcctccaggaagccttcctggatggcctaaaccagagccttatactgaccttctccagaacattgtccactcacttagccgcactggtcagccttgacgtacatactaccatctggcctccccagctaggtgttgagttcccccaggctccaacacctaacatgcagtcagtgctcagagaattcttattgcacgaataaatactgcattcaggcattgccctgggtcactggggcatgaatttcagtgcctctcgtgaagtgtgtggagagggaagtcaggaaatataaacatgtgattatcccaggctcaaacaatagggagctctgtggcaaactagagtctgcatgcctacctgaggggctcacattcaaattcagccaccacccccaccccgcaatccctacacatgtaaagggcagggacccattctggtcctgagcaatctcacttcttttcccttcctccggctttatttttatttttatttatttatttttttcttttctttcctttttttttttgagatggagtttcgctctgtcgcccaggctggagtgcagtggcgccatctcggctcactgcaagctccgcctaccgggttcacgccattctcctgcctcagcctccagagtagctgggactacaggggcccgcgaccacgcccggctaattttttgttttagtagagaccgggttccaccgttttagccaggatggtctcgatctcctgacctcgtgttccgcccgcctcggcctcccaaagtgctgggattacaggcgtgagccaccgctcttggctcccgctttatttttctactctgtgcataccactttaaaatacactcttggcccggcgcagtggttcacgcctgtaatctcagcactttgggaggccaaggcgggcagatcacctgagggcgggagttcgagaccagcctgaccaacatggagaaaccccatctctactaaaaatacaaaattagttgggtgtggtgactcgcgcctgtagtcccagctactcgggaggctgaggcaggagaatcgcttgaacccgggaggcggaggttgtggtgagccgagatcgtgccattgcactccagcctgggcaacaagagcgaaactccgtctcaaaacaaaacaaaacaacaacaacaaaaaccaaacaaaacactcttagctgctgatattgagtatctatcttccctcacacatgtgaactatgagatggcagagttttggtctgttctgtcctctgctgcagcccagcccctcatcagtgcctgatacagaacaggccttcaataggtatgtgccccgctcctccctgcagcgtccaggctccaggcagcattcagggctcaagttcggaagagtgaaggccgttgagggtcccctattaggccccaagccccctagagagctccaacgacatggcctggagtttgctttggcgacagccggtcctgctggaactaggacatgagggttagcgatcccgccccatggggtcacagggcagaagctgcgggcaggggtgggcatcagtggggcggtggtgcagggggtgtcgctcccaagtcagctcacacgcacgtcttcaacacacccaccacacaggcacccgcacgcaccaagggacgccgaggctcgggagaggaggaaaggccaaggcgatggggagatggggagagaggcagggagcaacatcccgggctccgagcgcgccagctgggagggctggggaggagggcgcaccggagggctcccggcacgcgcggggccgcgggcagcccccagaagagggagccaggcaagactgctggggcaggggtcggctgaagcagcggggagccggaccccacccgccacccgccacccgccacccccggcgcctgccaaactggttgctgcctccccggcagccgcggcgcgtccacctgcgcagccaccgcgccgccctgcccgcgctaccattggctcgctaaaaatgcctctctaatctgctctgctcggtgcacgcctcctcctcatccttcccccctctccgcctcagctctgaccttcctccttcccgcagccccggcgagatcccagagcgacgcggtggcggcggcagcgccagccccctcctcccccgggaagtcggccgggcttgaggccgggccccagacgtcccgcttcgccccgagtcgccgccgatggtccccggagctcctgcccccaggtaggaggtctggcccttgaatagagggcgggg

SEQ ID NO: 35990 - DNA, 2300 bp, Homo sapien
ggctggtgccgtgtttcccaatcagatctttcttaatggaatcaatgtgaggcactggaaaaggcttggcagaccgagggctcgaatcccagcctatccactggctgcctttgtcattgtggacaaactgctccatctctcagagcctatttcctaatcagtccagtagcctcaccatgcaaggccctgtgacagccaaagactgcaggagagcccttgagacaggcctgggctttccgagaacccactagctcatcatctcctcaagggcagggactctgttttgcccacagctgtatctcagtgtctagaaccatctctgacccatggtaggtgcctagtcagtgtctgttgaatggatgaaatgccccatttctgcatctcaagatgatttttctcttatctcttggcatctctaatactggaatgcttcatgcagctatgtttgagtttcactggcagcagccttgtgattgagaggggtcttggaagtgatgaatacggaagagctatcattattacaagagggccttttgcttaatttgtggtggcttctggttcctttctgttgtatcttccctctctggggagtgtggggtccctgagaattaccctggggcacaggggctgcagtgacccttgcccgaggccctgcagtggtgctgggctgggaatagcatgtcctgtggggcatgctgtgtgtcctgggccccagtccccactctggtctcctgccacccaccacccacactgtccctcctgggggtggcagaagtctagaagcctgtgtgaagcttggaattctcctctctgggagagtcattttactgtgccctgtcataactccaagtaccgatgctagaggggtgagtagggatatgtgtgagccccctaggctgagggggctctaggggggatctagtgtggttttccagaatgagagtgagggagggtgggccctgtctccaaccccaccccatcccccttcagcagcagagctgagacactgctgagatcagattagtgcctgatccccaggtggggcggagcagacaggcaaatcctcccctgggaggccactcattattcagccccttgatcctgacacttctactcccatccctgaaccctgctcatgaggctagcaccagggcttgtgtgtgccgcactgagtttgtgtaggaagggcttgtgtgttacaggttctgaatccatgtagatgtgtgtgcacgtgtcttaaagatgtgcgtatgctgatattagtgtcacagttacgtgtgtgtgtgttataggtgcactgtaggaagatacacagacttgtggaaatgcatgtgtgcaaatatatgtaatgggcgtttgtatctgtaagtgtgttgttggggtgcacatgtcctggacacacgagtgcttagggccacccatgtgtgcgcttgagtggtgtgtggcagccatggcctgtgggagaagtgtcggaactggcatcacaaggtctcggtgccgacagctagcccaggaaccttggactctccaattcttttacagctgtggccctcagcttccaatctgtcaaatgggtatgaagccttatggcacgaggttgtgcatgagcatctctcacactcagcctggcctagaaaaaactcaaaattttgaattttcatcaaatgagagaataaatgattaaacaaatagaaatgcttcacccagcagcaagcgcttagattttaaggacccaagcaaagtgcatggaaaggtgcagctgtctggaaggacgattgggaggtgggatcttggggagaaagggaagaaaggggatggagcagggcttcccagtcgagggcggcggccgagcctgtgtccccaccagcgtctctgtggccgtgaagtgtatgcatgcgtgcccatgttgatgcggcgccgtgcgggaggcgggcatcccctgctgtacatgggagggaggctgtctgtgcagagcattgcccagttgccatagaaacgagcagaaggaggtgggtggctggagaaggaggcgggtcgggatcggggagtggggaggaggcagcggtggagggagctggctcctgcagttctggcgctgctgccttcctgagtgagcggtggagggaaccctagaggacagagcccccagcccggcagcaggccccctctccgcccgccaccacggaggagaaggaggacagccagcccctccagccctggcctggcccagcgggggcagtaagctcctacttgcccccagcttggtgcccacacgggcccaggtaggcatttcgatggct

SEQ ID NO: 35991 - DNA, 2300 bp, Homo sapien
atgacacttctgctttgtcatatagtcacatctagctgcaagggaggctgggatagtcttaattctaggtagccacgtgcgcagctaaaaaccaggccttggccaggtacagtggctcatgcttgtaattccagcactttaggaggccgaggtacaaggattgcttgaggccaggagttcgagaccaccctgggcaacatagagagaccctgtctctacaaaaataaataaaataaaaaataaaaatcaagccttgtttactgaggaaaaggggagaatggacagctatctttgacaccttatccactcaataaacattttttttttgagcttcgctctattgcccaggctagagtacagtggcacgatcttggctcactgcaacctctgcctcctgggttcaagcgattctcctgcttcagcctcccaagtagctgggattacaggtgcctgccaccacgcccagctaattttttgtatgtttagtagagacggggtttcaccacgttgcccaggctggttttgaactcctgatctcaagtgatctgcccaccttggcctcctaaagtgttaggattacaggcgtgagccaccgcacccagcctcaataaacatttattagatattccttgtacttacccacattatagtacttacagtatgattaatagcttagcatctcatgagcatcgaacatacaggcatacagtaggtgcctgttaagcagtggtcattagtattaatgcatcagaatgctgtgatataagccaggcttctgtgagagtggggaggagggaggcgtggccaccagagaagcaggcacaaaaacgcactctaggggaaggagatccacctggaaacgcagcgtgtctttctttattgaccctggagggctggaccattggggattaggagtggtcgagtgtaccatttcaggaccttgtgttacctccccttcctccgctccatcctccctcaaccttctctggggaatgactgataactgatcctcaaccaaggtgccagtgacgataacagccaagtacagggctccctgggggtgcaaagtgcaaccttacgttggagaatgtgggtattggtgaaggtgaggggctagttctaaaggccttgggatcccctgcagccccagaatcctcatgctctcggcagttacacagttactcctgaaacaagagaaaaatcagcattatctagaactttctcccgtcagaatggaggtagcaggtacgtggagcccttctgagatgatttggagaaaggaaggcccagcctccagggacaactctcagcccacctggcaggacatggaggaagccaaaagctggactgtgtggcccccgcagggctcaaggaggtggagggtctggggcagcaagtgcttggtggtgggtacctctgtcctgcgtggcatccctgccatcaccctttggggctatgggagagcaagttgctgctggctggcccccgattacgggcctgggaaagcgagctaggagtccttcctcaccgccactgtgtgacaggtctgcatgaggaccctgtggggcacagagaacacagttcccaccaggtcgtggttggcccacaagcctcgggatccctccccagggttctctgaagctctctccatccctggcctgagtagccagacagcacctcctccaggaagccctcactgatttccctagttggtgcccaccctcagtgccccctcagtcctccatctgggcatgggtggttctggatctccactgctgctcacttgtctgtctctggccctcagctgatccatcttagaaccccagccctggacccactcgacgtatctctggcgccttgcacgtaatatgagctgagtggctatgcagcaaccaatgaacgagtgaatgagcgagtgaatgaatgagtcccctagctgtcagggcatggatcccccagcaaggagggggagacctgcaagggttaatcaggagcctgcctgtggtctgaggtaagcaaggagtgtatttgttcaggtaaataaggaaggattacttataatgggaaatcaggccctggccaactcttcatctcgcggctgtctgacttcctcccagcacattcctgcactctgccgtgtccacactgccccacagacccagtcctccaagcctgctgccagctccctgcaagcccctcaggttgggccttgccacggtgccagcaggcagccctgggctgggggtaggggactccctacaggcacgcagccctgagacctcagagggccaccccttgag

SEQ ID NO: 35992 - DNA, 2300 bp, Homo sapien
cagcctcccatgtagctgggaccatgggtgagcactaccacgtgtgatcaatttttaaattttttgtggcgtggtggtcacaccatgttgcttaggctggtctcgaattcctgggctcaagctatcctcccacctcctcattgaccttaatagctttttatttattacataaaaatgttagggcatagtggctcatgcctgtaatcccaacactttgggaggctaaggcaggagtatctctcaagcccagaagtttgagatcagcccgggcaacacagtgagaccctgtctctaaagaaagttgaaaaaaaaaacattagccgggcatggtggcgcccacctgcagttccgccttcctggggggctgaggtgggaggattgcttgatcccaggagttcaaggctgcagtgagccgtgatcctaccattgcactccagcatgggcaacagaacaagatcttgtctcaaaaaaaaaaaaattgaattatgtagagcgtttaggtgtgggctaagaccttagtactgtacgggattgacagagagttttgaatttttccctgaatcagcattctgatggagtcaccaggttccaataatatctttttttggatccttggtcaacacaattttcatccatggatactgcaagttaaaacactttctagaagtctatggtcctaacatcaaattagttcttgggtcaaatttttaatttttgtgtaaggccccaattgaacttaatgtagaaagggaatgtagcagggtatagtgaatggagtgctaaactgggagtttggaacccactttccagctgtgtaatcttgagtgagtcatttccgctctctccatttcaatgtcttcatctgtagaatggggaggttggactcgacagtctcagttcctttcagttattacattgagatttttataatctttctgtctctattgcattatccaaaagattgggacaaaacatgttcacctctcagtcccaaatgtgcatgactccagaacctaggctttttaagccactgtagtttactctcttggtagtgggacagaggaggtagaatgcgttccctttccaaaacatcctggcccccgacacattactacttattccagctgttattgaaattgtggaaaacacacttcataaggaaccagaaacctgggttctagttttggggctctgtattttttggacaacgcacgtaagcttacttcccttatttgcaaaatagggggctacttgaaggcagaagaccatttctcactcatccccccccacccctccccgccttggatctagcagtgctgggcaattcgcgatatttcaaaaacatttcctaacagaagagggtagacaagatagtctctatgcttcctttctcattctttgacagaccttgaccgggaaggtgtacgatatatacagaaatactttgtcttctattttaaacacagaacaaggcatgctaaattctcatgactttattttgattgggttgttcctgacggagtgggtggaaggttatggatgtttgtatcgagaccttttttatcttccggagacacgatgctaccgttgcataacacaaacagcaccgataaaatgtagtaataggaaagagtgccagggaatcaagactttaaggcagcatcccactgggaaagcagctcttcaaacacgtccttcaagcgcgagtggcagactccttgctgggagggctgagtgcactttgctacttgaccttgccactgtctctcccgggacttcagtttcctcacctgcaaaatggtagagttgttataaacgaaaatccctcaacttctcccgcagccccaggctttaacggctctccttgagggtggggacggggcggagtaatggtctggccagaagcctcccccgccccccacggctggaccatctctttcctccttcctacttttcgctccatcgccccgcagcggtgaggtcacgcggggacgtcacgagtttgtgacgacactaagaggcgggcgtccgggagaggaaggggcggggcctgggcgggcgacgcttgcgcagtgggcgcggcgcgggaggaggcggaggcggcggagtggcgagaggcgagaggcggcggaggcggcggagctggggggggtgggaggggggggagagtgagtgagtggcagagtgagtttacccctatgagactgtgagaggcccggggcctacctcaaaggagcggggtcgcgaagctagctagcagcggcccccctccaggtccccgggcccggcggcgcggcggc

SEQ ID NO: 35993 - DNA, 2300 bp, Homo sapien
ggctgaagtgagctgtgatagaaccactgcattccagcctgggcaacagggcgagaccctctctcaaaaaaaaaaaaaaaaaagtcatagttgatggtagctacttaatattgtcatcccagcaggagacacataatatctggttgttctgccattatgttaagatttaccacggtgttatggtggtaagagccggggcacagttaacttaccccttaggaccaggaagtaatctttgtggtacttactctttctaaaggtcagtttcctcatctgaaatgtgaataaatagggttgttgaacggattaagtaaatcaatgcatttaaagaacctatgacatagtaaacattcaaataaactagcaattattattattatttggttgcaattctaccatcagagaacatagggtagaagaacaaaaacaaaaactccctctcctcaggtcccaacgcttgctaatatttcccttttctaaaaggaggaaggccattttggagtctgacagaccaggctggaagtttggccttattgctagaacaggtgatatctgtggacaagttacttctatcaattttctcctatgtaataattaccttttgtggaggggttagtgtgtatattgtattaaacacttacaaggatcttcacatgtaattcttccttgaatcctacaataattattacctgccgggcgcggtgggtcacgcctgtaatcccagcacttcgggaggccgaggcgggcagattacttgaggtcaggagttgaagaccatcctggttaacacggtgaaaccccgtctctactaaaaatacaaaaaaattagccgggcgtggtggcatgcgcctgtaatcccagctactcgggaggctgaagcaggagaatggcgtgaacccgggaggtggagcttgcagtgaaccgagatagcgccactgcactccagcctgagcgacagagtgagactccgtctcaaaaaacaaaacaaaacaaaaacaaaaataaatttaaaaaagacgagataacctttctctatcctctgtaaagttggactcccctcttccctgcttcactttgctccacctaacccactactataaatatttaccatttttttgagacagggtaccactctgtcacccagcctggagtgcagtggtgcgatcacgactcactatagccacgacctcctgggttcaagcgatcctcccatctcagtctcctgagtagctagctgagaccacaggtgggcgctatcacgtccaatttttttttttttttttgatacggagtctcgctctgtcgcccaggttggagtgcaatggtgcgatctcggctcaccgcaacctccgcctcccgggttcaagccattctcctgcttcagcctcccgagtagctgggattacaggggcccgccaccacgcccagctaacttttgtatttttagtagagaccgggtttcaccaggttggccgggcgtatctcgaactcctgacctcaggcgatccgcccgcctcggcctcccaaagtgctgggattacacgcgtgacccaccgcgccgggccaaagtctggctagtttttaaattttttgtagagacaagagtttcgctatgttgcccagggctggtgtccaactcctgggctcacgtgatcctcccgtctcagcgtcgggagtacctgacattccaggcgcgagccacggcgccggctcctgttggttttagtatctgtcttgttccactagaatctcaaccccacaaggacaagaatttttatctgttttgttcactgctgttttttcagcatttatagcagctccaggcgcgtagcagagaatcattaaatatttatagaaagattaaatacgctcttccggaagcaccgacaaacaagattaaatgagcttggattgaacctcgtagcggcccgtagtactcctccttcccgccatcctatagatgaaaggaagaaaaggaaaagccccgcccctcgctcggctgctggaggcgagggcttcggaagtcttcatgctagtctcgtggggttccgcggtgtcgtcgctggctgtgcgcgtcatttccgggcgtcacgtaacggagtggccaacggcctgcagagcaacatgcccaagtgagtggggccccgaaatctgagggtgatcgtagtcactagttgtggcccccatgcaggagcggagagcgggttctggtttctgaaacctcgagggatgggagagtatctgggccgggtggacggaggcagggagatggagagcgctagacaccccattttagagtg

SEQ ID NO: 35994 - DNA, 2300 bp, Homo sapien
gtatttttagtagagacggggtttctccatgttgaggctggtctcgaactcctgacctcaggtgatctgctcgcctcgatctcccaaagtgctgggattacaggcgtgagccaccacacctggcctccttttgtctttatatgtctcagattcttagaattacaaggaaggataaacacattaatactgttggtgagaatattaactctcctatttcctggtccctaaagaggccatatttttgtaaggaacgaatttttgcattcaacaaaaataactcattcaccaggcgtgatgacgcattcagtgaggatgctgagtctctgagcatgaggtaggttttgccttacatagctgattcagatgtccaatcttctttgctggggtgctccaacaaaggaagcctgaaatgcaaaaattgctgtgaggcccctgtggctgaggaccgaattgggaaaaagcaataatagccgataacattggcaagaaacctcctcttccataggccctattggtccctgttatatattctggtgagaggtgggcagagggacaattaatgatattcagtcctactggaggggagtgggtagtaaagcacccgggccgaggatgatttgcttcccttttatataatattttggggacttctgggaaaaattgaacttactatgactaagggataggcataggaatgcatggtgtgttatttttgagacagtcttgctcagtcgaccaggttggggtgcagttgggtgatctcagctcactgcaacctctgcctcccaggctcaagggatcctcccacctcagcctcccgagtagctgggattacaggcgcgtgccaccacgcccggctaatttctgtattttttgtagagatgagatttcgtcatgttacccaggctgatcttgaactcctgggcccaagcgatccgtctgtctcggcctctcaaagtgctgggattacaggggagagccaccgcggctggcctgattattcattttaaaaatttaacatatatatggtttaccgtgcttagactatctctggaattagggagtaattgttttgagggaaacaattgttttggagcaccctgaatgactgacgggggagacagggagacatggttgaatgtctttggttttatattaaagaatgactacatttaaaatgcaatattagctgggggccagacttcctataaggctgtctcaagaggtttttgtttttctttttttctccaagtttttgcttgaaggcttaagtccggagaactgtcacctttccatctttgccattgggtctacgggtgtcgccggcatgcgggttacacttttaagcatatggatgaaatagagtgcatctaacacttgactgggagtcagaatatttgggttctagtcctgggtggccctaagtaggtgaccttgggaaagctcttatttcccagggcttccgtttccgtatttgcacagtgaagaagctgatctctaaagtcctaggtcattttaacaattgaccgtctcagtttcttctgaccccacatttgggagggagtgcttctgcagtgagccgctcaggtcttgagtaaatacattttgcccatcggttcaggagacgagactaagggaggcaccaagagggtgacgggcgcccccttcccagctctccagcacaaagcccttcgcaggtgaccgcagcggttggttcgcgtgtcccatctatgggtctgtgaggtccttgatactacttttcagtccccagcccgatacctggagtacagctggtgctcaacaaatactgagtgaatgtgtgagggaaataaatgagaggcggacgctggcatccgggagctgcgcaatgatctaacgaatttctgcaaaaattacaactaccccgcctttctcctaggtttcaaggcgactgccgggtgcgaaaggaaccgcacacccctcagaggcgaaagaagcgtttcagacccgagaggcggacgggagcgcggagggaggaagctcgagccagccagccccggcgctgcgcgcgccgccgcccctcaccgcgcgcgcctctggccgccgcaagcaaggccggcgggtggcgcgcgatcttcgcgtcgctctgggcgggcggccgcggcgccgcgctggtgggtgggatcgtggcggagcgccaggcgcccaaagaggggcgagaaagcgccatggcggcggcggcggctgtgtccggtgctcacgccgcggcgaggtgaggggaccgcctcttctccacaactgaggaggccacagctgccggc

SEQ ID NO: 35995 - DNA, 2300 bp, Homo sapien
gatcttgggctaaaatcttttcacttcttcgttgcacaggtgatagctgcaaacattgggtacgccactgtgaggccatggagacccgaggccagtgggcccagaagctggtgatggaatttcagagcaaaatggagaagtggcatgaagagacgggtctgaaaccaccctggcaccttggagtagactctctctttcggagaaaagcaggtgggttatgaggaactggaagactccagttgcttagcctcttgccatttatctttgaataacagtggagataaagcaagaactagctaattatcccagctgtatgtaatggagagacatcagtgacttttttctttacagagacctctttgactccagggatagccacagtgttgatgtcatgtcatcatttctattcagtagactgttgccttggtcttaagaataatatcatttttgagttcatccaggagctagacagtgttaagctctctttcctacatataacattaatgatcttaggatttttactttccttattctattagtaatgagagttgaatgtatctgattctttttcccaccttatttttatttagattctctttccagtcctcgaaagaaccctcttgagagaagcccctctcagggcagacagcctgcctttcagcctccagcatggaaccgcttacgctctagctgcatggtggtacgggtggatgacctggacatccaccaggtgaggacatgaggaaacatggttggaaagaggtggagcagtttacttggaaggcagctggaacagtataaacaaagttttggaatttggggactatttacctcacttctgggaagattaatagtttggtctgtttctttctgagcatggctggtgagatcaggacttgggaattcccccagttttactgtgaatgctctgctttgaacctcccgctgaaaaaactaactcgcgtatagtgcgaggcaggtgtgagaacacctggaatatatgtgaaagacactgtgttccctgtgacagacttcagagggatggtagaggctttatgcttcctaagcagaaatggagggctgctctaagtttgattgttgatactaacaaaaagttgtgattgtttaggtttccaccgctggacagccaagtaaaaagccatctacactcctttcctgcagtcggaaacttcacaacctccctacccaggtctctgccattcatattgagttcacagagtattacttcccagataatcaggagcttccaggtaagcatctaggctggctatttttctgtctagctcatgcttttcccatttgtcagccttggggccactacgtatatttttatttgttgttaggagttttcagtgtttgagttaatttagcacacttttgttaaacactctgccctgtataaatgtgtacctttgctctgttcgtaatatagttaatattaggtagtaagagcctagctattgctttttacaggatgtttcttttcttccctctgctttccagttccttgtcctaatctctacattcagttaaatggtctgacatttactatggatcctgtcagtttgctctggggaaacctcttttgcctggatttataccgcagcttggagcagttcaaagctatctacaagctggaagattcaagtcagaaagatgaacacttggacatccgactagatgcattctggttgaaggtgaggggagagtgtgacttttatcccctgttagtagccacagctgcatttttccaatggatataatccatggttttgctctgtccattttgtggaagtaagaaaatagtttcacagcccaaaggatcttttacatgtgtattaatagtgggatgctgagatactcagatgaccattctgaattgtgtttcattttctctgtgaaggtgagctttccactggaaaagagagagcgggcagagttgcatcgtccccaggcccttgtcttctctgcgtcaggcatgattgccaccaatacacgtcatgctccacattgtagttgttcagacctccagagtctcttccggggttttgctgctgctgagttctttcattccaattatgatcactttcctaaggttccaggtggctttagccttctgcacatgctttttttgcatcatgcctttcagatggattcctgcctgcctcagcctaataccctccctccccagagacctaaggcttcctgggatctctggtctgtccactttacccagatctccttggactttgagggaacagaaaacttcaaaggccata

SEQ ID NO: 35996 - DNA, 2300 bp, Homo sapien
cagacttcagagggatggtagaggctttatgcttcctaagcagaaatggagggctgctctaagtttgattgttgatactaacaaaaagttgtgattgtttaggtttccaccgctggacagccaagtaaaaagccatctacactcctttcctgcagtcggaaacttcacaacctccctacccaggtctctgccattcatattgagttcacagagtattacttcccagataatcaggagcttccaggtaagcatctaggctggctatttttctgtctagctcatgcttttcccatttgtcagccttggggccactacgtatatttttatttgttgttaggagttttcagtgtttgagttaatttagcacacttttgttaaacactctgccctgtataaatgtgtacctttgctctgttcgtaatatagttaatattaggtagtaagagcctagctattgctttttacaggatgtttcttttcttccctctgctttccagttccttgtcctaatctctacattcagttaaatggtctgacatttactatggatcctgtcagtttgctctggggaaacctcttttgcctggatttataccgcagcttggagcagttcaaagctatctacaagctggaagattcaagtcagaaagatgaacacttggacatccgactagatgcattctggttgaaggtgaggggagagtgtgacttttatcccctgttagtagccacagctgcatttttccaatggatataatccatggttttgctctgtccattttgtggaagtaagaaaatagtttcacagcccaaaggatcttttacatgtgtattaatagtgggatgctgagatactcagatgaccattctgaattgtgtttcattttctctgtgaaggtgagctttccactggaaaagagagagcgggcagagttgcatcgtccccaggcccttgtcttctctgcgtcaggcatgattgccaccaatacacgtcatgctccacattgtagttgttcagacctccagagtctcttccggggttttgctgctgctgagttctttcattccaattatgatcactttcctaaggttccaggtggctttagccttctgcacatgctttttttgcatcatgcctttcagatggattcctgcctgcctcagcctaataccctccctccccagagacctaaggcttcctgggatctctggtctgtccactttacccagatctccttggactttgagggaacagaaaacttcaaaggccataccttgaattttgtagcccccttccccctgtccatttgggcctgcctacccctccgctggcagcaagcccaggcacggaagcttcttttggcctcagaggggaggctgaaaccatcagccagttttggaagtcctgtccagtctgaggctcttgcccctgactctatgtcccatccgcggtcaaagactgaacatgacttgaaaagcttatcaggacttacagaagtcatggaaattctgaaagaaggcagtagtggtatggacaacaaagggcctctgacagagctggaggatgtagcagatgttcatatgcttgtacattccccggcccatgtccgcgtgaggcttgaccactaccagtacttggctctgcttcgcctgaaggaggtgctgcagaggcttcaggagcagctgactaaggatacagagtcaatgactgggtctcccctgcagaatcagacagcttgcattggagttctctttcccagtgctgaagtggctctgcttatgcatcctgcacccggtgctgtcgatgctgactctgcaggctcagatagcactagcctcgtagattcagagctatctccttcagaggatcgggaactgaagtctgatgcctcatcagaccagggcccagcaagccctgagaaggtcttggaggaaagtagcattgaaaatcaggatgtatcccaggagaggccacatagcaatggagaactgcaggactcaggtccacttgcccagcagctggcagggaagggccatgaggcagtagagtccctacaggccaagaaactgagcagaacccaagcctccagctcaccagctgcattgaagcccccagctggcagggagactgctgtgaatggacagggtgagctcatccccttgaagaacattgagggagaattgtcaagtgctattcacatgaccaaggatgccaccaaggaggctctacatgccaccatggacctcaccaaggaagctgtgtccctgactaaggatgccttcagtttgggcagagatcg

SEQ ID NO: 35997 - DNA, 2300 bp, Homo sapien
gcatggtggtgtgcgcctgtaatcctagctactcgggaggctgaagcaggagaatcgcgtgaacccaggaggcgcaggttgcagtgggccagagatcgcgccattgttctccagcccgggcgactctcaggttaaatcgtgttcgatataaaagtctatatcgatatagacttttcgatataaaagtctatctccctttgacaggtctgatcgaccctccttcctataaagacaaaagttgtcttaacatctaagaggaaccatattgcggtgaaaggggtgctacgaatcctgggttttagctcttgcactacgtctcagtgtgacattggatcccaatttcctcaccaccaaagccaacgggctattataactcccttagaagtagctttaatccctaaagacaagactaaaaatattaacagtgcttgagcctctggaaccgaaccagcactggagttttgtttggtcgtcccctctcttccccctcaagattaacgatctggagggaattctggtgagttcgagttctcgtaacttgttagggactaaccagaagcccggcgagcagccagtaacacaatctctgggtattccttcagcctcatcagtacatctcttcctacctcgccttcctccgctgcagcttctttcaagtccacatctgcgtctccgtcagtttcctctgggattccatcggtgtcggtagcccccgggtccccgggcacagcggccgtctcatccgactcccctgtctctccacctttgtcggagggcgactcgtgggcatcgtccatcacggataggattggaggggagaggagatcgcggagatgcctgaggcagaagctcggaaacccgagctgcacaggccaggatcttacttcctgtcgtcgcgcagcgatgacatcacccctaccgctctcctgaggggtcattttgaggcgcgcgtagaggactagaggactcattttaactttggtttggcgacagtgggaagcgggaaaattggacgtaaagagctcagactatggatcctcctcgctaggaaaccagcacttgtgaaggagcgcagttttgtttactaaataactttttccttttcgcctgtctaaaaatgcaatgtcagttaatcccttcgttaacccctcagagtaaagttgggggactgggagaaaactcagttccgttgtatggcggtgtcgtggaatgaggctccccgggactggtaaactttcaggcaaggactcaaccttgtatatttcaactggcccgaaaccgcgggcctgtgtgtacatagaattgctagcatttcccctccattccgcaagcaccttaacaacaaaaagtcatatagctcgagcagaatttatccaattcatttattcatccacaactattgactgcctacttcgatttagaaacagtgctagtaccagggaacaaaacacacatagtttctacccaattaaatgatttttttcagttcgccagtactgaagattgaggtttgtttttacaagtctgacacttttctatcagtttggttaatctcattaaaactaagaggaaagcctaaagagaggaaggtgtctcctttgaacgtttcactttaatgaactagttcacgtactgggaggatgaagtggtgaggatatttctgttttaaaattttcttctcttccctcattgagatacgagggggagggcgttttattcacctgggtatgactaggtccccgcacctattacatatttaatttatgcgtgctgaaagaatggacttggaaatgtaggtgcgcgttacatttatctctttgtttctacgctgcctggacgaattaccgtatttcctgtcccaggagctcccaaaacctttggggaaggagcgcacttcgggaggcgcgtacaggtgggcctgtttgtccctttccacctgcataatgggggcccacaaggcgctgtccccatgccccgagaggcgtgtctcggcacagcaaagtccacctgcgctggtccgcggagccccgcccagctaggtgagctagggggcggggcgcgggggcgcggtgacgcgtgacgccggatcccggaagtgacgcgctcgtggggaaaaggcagggagggggtggtgtccccagccggtttggggggtgcgttgcccggagacggaaagtttgggagcccgagcaggctcggctgcagcctcggggagggggtccagcgggtggcggccctggggatggggaaggagcaggagctgctggaggcggcccgcaccgggcacctcccggcggtgg

SEQ ID NO: 35998 - DNA, 2300 bp, Homo sapien
tccagcctggctgacagaacaagtctccgtctcgagggaaaaaaaaaaataaagcgaggtcctgtgtagcctggtggaaggttccaagttcctcagagaagaaaatcaatagaatttcctccagaggagcctcgagattctacaaggcgtaggagtttctgcaggaggtgagggagatctcatatatatatatataagatatacatatttgctcttaattggcttttgtgagctacgatagctggcaccctgtagcgagcgagagtgaaccctggctgtgccatgcggcggaggctgccacctgggcactcccaccattcttcgcagccgggtcagaacgggagaccaggcgagcccggagcagcgtggactcggacctgcgcgccctccggtaccctggcccgcgggccgcctgcctcgccccgggcacgccacaagcccaccccgcccgagtctcaggacccccgatctctctggggacccaagagacgggtgggggagaaagggtctgcaggcagcggcccggccctggcgcgtacccacctgagcagactggagagggggtggctggaagagccgaggccgccgccgccgccgccgctgccgccgccgccgcccccagagccaccgccgccgccgcccccaaagcctgaggagagccgcttcccggacagcagcttctccaccgccgggaggtgcccggtgcgggccgcctccagcagctcctgctccttccccatccccagggccgccacccgctggaccccctccccgaggctgcagccgagcctgctcgggctcccaaactttccgtctccgggcaacgcaccccccaaaccggctggggacaccaccccctccctgccttttccccacgagcgcgtcacttccgggatccggcgtcacgcgtcaccgcgcccccgcgccccgccccctagctcacctagctgggcggggctccgcggaccagcgcaggtggactttgctgtgccgagacacgcctctcggggcatggggacagcgccttgtgggcccccattatgcaggtggaaagggacaaacaggcccacctgtacgcgcctcccgaagtgcgctccttccccaaaggttttgggagctcctgggacaggaaatacggtaattcgtccaggcagcgtagaaacaaagagataaatgtaacgcgcacctacatttccaagtccattctttcagcacgcataaattaaatatgtaataggtgcggggacctagtcatacccaggtgaataaaacgccctccccctcgtatctcaatgagggaagagaagaaaattttaaaacagaaatatcctcaccacttcatcctcccagtacgtgaactagttcattaaagtgaaacgttcaaaggagacaccttcctctctttaggctttcctcttagttttaatgagattaaccaaactgatagaaaagtgtcagacttgtaaaaacaaacctcaatcttcagtactggcgaactgaaaaaaatcatttaattgggtagaaactatgtgtgttttgttccctggtactagcactgtttctaaatcgaagtaggcagtcaatagttgtggatgaataaatgaattggataaattctgctcgagctatatgactttttgttgttaaggtgcttgcggaatggaggggaaatgctagcaattctatgtacacacaggcccgcggtttcgggccagttgaaatatacaaggttgagtccttgcctgaaagtttaccagtcccggggagcctcattccacgacaccgccatacaacggaactgagttttctcccagtcccccaactttactctgaggggttaacgaagggattaactgacattgcatttttagacaggcgaaaaggaaaaagttatttagtaaacaaaactgcgctccttcacaagtgctggtttcctagcgaggaggatccatagtctgagctctttacgtccaattttcccgcttcccactgtcgccaaaccaaagttaaaatgagtcctctagtcctctacgcgcgcctcaaaatgacccctcaggagagcggtaggggtgatgtcatcgctgcgcgacgacaggaagtaagatcctggcctgtgcagctcgggtttccgagcttctgcctcaggcatctccgcgatctcctctcccctccaatcctatccgtgatggacgatgcccacgagtcgccctccgacaaaggtggagagacaggggagtcggatgagacggccgctgtgcccggggacccgggggctaccgacaccgatggaatcccagagg

SEQ ID NO: 35999 - DNA, 2300 bp, Homo sapien
ctcatttttatccattttaaatggaagcttgccaggtatggtggctcacacctgtagtcccagcactttgggaggccaaggcaggaagatcacttgagcccaggagtttgaaaccagcccaggcaacatagtgagaccttatctctacaaaaaagaaaaaatagccaggtacagtggctcatgcctatgatcctagcactctgggaggccaaagtgcacagatcacttgagtccaacagtttgagaccagcctggacaacatgatgaaaccccgcctttacaaaaaataacaaaaaaattagccggctgtggtgttgcacgcctgtagtcccagctactagggaggctgaggtgggtggatcacttgggctcaggaggtcaaggttgcagtgagccgtgatcacaccactgcactccagcctgggcaacagagcaagaccctgcctccaaaaaaaataaaaattaaaaaaaatagcaaggcatggtggcacctacctgtcgtcgtcgtcttagctattcaggagtcttagctattcagtgggaggatcacttgagtccaggagtttgagagcagcctggacaacataacaagacctcttctctgttaaaaaaaaaaaaaaaaaaaaaaagaataataaaaataaaaataaatggaagctttgggaggtctggggagtttcccttgtatcatgctgcccctgctgaaggaggcagcacttgaaacagacatggccagagaaagagatgggggtggagggaggcgttttcttcaaggggcagagccagcctgctctgacactatccttcctccctgtgcctctgggctgctggggccagtgtttagagacacaccctcagtttgctgcaggggtcagattcgtttccctctgccttgctgagctcagggaaggagcttgcagtctggttaacaggcagtcagatgacagcctgagccagcagtcgattctgtggctggaggaagatacctccccgagcccccagctgcccaaggagagatggcgcttgctctgtgctcttctgctgggtgtcagatgcacggctttgtctgccagctgaaggctggctggagaattgtttttccaattgtctgacccaggctccttacttgcacttagaggaaaaagcatccaagccctggtacaaaaggtcctcttttcattcctttggaaaaagagcagtgaatgagctcattatcactgcaacccaaaaaggaggaggaggggaagaagagaaggtggctgctccccactgcctagttctgcccctggccaggtttcctggggaagggggcctggatctggcccatagtggccaaggccagatggctgggacaggtggtccatactgggggcagcgctggagccattggatgctttgaaactagctttctctgctgtggtccagaagagggacaggtgtctgtgccccgtctcatctcctgaacgcagagctctatccaggactgctggactccaagaagcaaaaggccttccatttgggcctaagtgcctgcctcacctttccttcccagaggtttctgtatgcaggcgctctagaaatcatcctcactccccagagcttgtggtcatacagtatcagttatctgttgaatgcttatgatttgccaggcactaccctaggcactcagggtagcatggaacaaagccggcaaagtcttcactctcatggaattgaaattctagcgtgagcaatgagatggccaggtctggcctgtgattgcagcctctccccagtctctgctggtctgggagaactgctggggagtgacatagagatgccttgaaagggaggctcttcagtatttctagcagctaagcccagactgtcaccatctcactcccttcagagcagtacatcggaccctgtgggctggggccagagaaggcctctcttagacctgagcagcagagtcctgataccttgcaggctggtgctggtcctgggaagcatctgaaagagacctggaggtcagaccccactggcgctgtggtgagctggtaaggtttaccccaagcctgactgcctctcctctttgttctttcttccatttcagattgagaaaatcatgagttctattggagaagggattgacttttctcaggaacggcagaagatctcaggtaccgtactaagtggccattttccccacagaaactggcagtctggctcttttctggctcaggctttcctctaacacagaagacagacattcagtgggtgggagaggtcagcttcagaccacgtcatgctcctataat

SEQ ID NO: 36000 - DNA, 2300 bp, Homo sapien
ctactgaatgagattgtgtgcagagcatatagatctgcgatgtaaaagcattctgtaaatcattacagagaaatcagttattaactaagaccccaaagggaagaagtgcatatctcttacttgatctttctactcccctcaacctctaacttttgcttggttggttctgatgactattaatgataaagatcatgaaatgctgtacctgggctgaccctgggaaaactaattttgtctttctctgctacctccttttcctcctgttctggcttcggtcccctccccactctccaccctcccccacccccctctcacactaccatgtgctcctggactgctatttcttcccactgaccctcccagacaattcgaatattaagagaatatttaaacagacaatttaacatatatgaaagaattgttagaggaatttcagacatcagtagggagttttacagcaatgcaatttttgtgggggaaacgaactggtgttattctggaaactttcccagaagtaaaaatgccaaatggaattcctgatttgcatttttaaagagaaatcaataacccagcctaaatatctccctatgtaataaggaagcatcatatttcattgaactctttgctgaagtcatcatgcaacttcctcccacttctggtggttttagggtgaaggctggcctgcttcacagttggcatccctgagggaaatagcaggagagggcgaggaggaggaaggggtaggtttggtatggatgagtctgagatgctctggataaacagtaacttggctaggccactcccctggtatatgcctgggcctcaaggtggaatggactttttttaagcacaaatgcttttgggtgtctttataatttccccctccaaacccaagagttgtgcaagaaacatccacactccacactaacaaggcaaaggttgtttttgtttttttttttttgagacggagttttgctcttgttgcccagtccggagtgcaatggcgtgatctcggctcaccgcaacctctgcctcccaggtttaagcggttctcctgctgcagcctcctgagtagctgggattacaggcatgagccaccacgcccagctaattttgtatttttagtagagacggggtttctccatgttggtcaggctggtctcaaactcctgacctcaggtgatccacccgcctcggcttcccaaagccctgggatgacaggctcgagccaccgcgcctggccttgttttgtttttttgagacagagtctcgctctgttgcccaggctggagtgcagtggcgcaatctcagctcactgcaaccacggcctcccggattcaagcaattctctgcctcagcctcccgaatagctgggaatgcaggcgcccgccaccacgcccggctaatttttgtatttttagtagagtcggggtttcaccatgttggccaggctggactcgaactcctgacaggagatctgctggactcaggtgtcagccaccgcgcccggattcttaccataatactttcatcttttgttttgttttgttactgtacacttttatggtaagaagtcatgacacagtaataaagagagacgggagcaggtgaagaggaaacgcttcctttctattttctcaggcaggggcactccaggtcttcacatcactgcaagggcgacagagtagacttagagtcaagaaaggcaagggctagagcccaggaggcggagggcgacaacgggcggaaccccagtgggcagagcctggccccagccctggcggctcctccgcttctcccacatgtgaggaaagagcgcggcccctgcgcccctgcggcacacgctgtgaaacaaccctcctgggtgtggctcggcttctcggctgtccaaacagcctgaagaaaagccccatgcatgctctggcctcgtctcagcagttccaggccatccttctcgaggggcgggagctgaccggcatgaaccggccgcagcgagccgctcgaggcctggttggcttcgagctcaggagggacgcacgagcctgccgcttccggctctggcggggggggcacgtgccccgtcccgttgccccggcgaccgcggcggtttgttctcaggccccggcctttctcaccgtgcgacgccccaacccgccgctccgccgcggtggtacgctccaggccgccaggccgcgaggcccaccgagcggacgccagtggatgacccgcggcgggggaggaggaggtgacggcctgggagccggaggcgggcctgggccggcgtttcgggcgaggggggc

SEQ ID NO: 36001 - DNA, 2300 bp, Homo sapien
tttgtggccaacagaggcacactcagaatgactcatatccttcagtttgggtttgactttgctcataatgcttggaaactctcaaaggagctaacctcccccgtctcccccaccctcacacaactcaggataaacaagagattcagcttatgaaaaatctgatttttggttgtttcaagaactacttgggcacccccagtcgcccctccccaacttccaggactgtgagcctgctgagggggcccttaggacaaccatggcagggtgattcaatggctcagagaaactgcaaaccatgggatggtggaaggatagtcaccttgaaggcaggaggcatggatttcttctgcttcccacttgctagtgaccctgggcaagtcacgtcacagctctggcctcatttcccttatgttgagtggaagtgccctgaaactctgagaatttgggagtgagggggtgggggagcaaggctttctaatgtctggaactcttaaaacagggaacaaaaccttttgtttcccataggtgctgaccttaatggaaagaatggttgtaaggaggaggaggagatttggggaatgaggagagtggatgggtgtttttaaggtgtattttaggatagattgagaattaagttttggctggatctttatgaggaattgttcagcaggcatctggaaataagcacctggagttaagaagagggattgggactgacaacaggaatagagtcaggagtcatggttgataaatgaaatggtaataatacaagagacatctatcaagtgcttaccataatgctaggaccttggggagcccttcacgtagacatgttcctaccatacacacaacaaccctatgacaaatatgttgtttttacgccactttacagatgaggaaaacttaaatatccccccaaggccatagagtgagtaagtggtaagccagggtcttgaacccagggagtctgacttcagaacccttaacctgacttttctatcaccttctgaagctacagtgctggagaagcatgggagaaaagaaatactagtgaacagaatcttgacaaatacctgtaacaaagtactcctatacttgatcaactgcgacctaaaatcagattctgagaagatgaaggggtgggtcagaaacagagaactatccacttctatctagtgatgttggcagttgggatgactctgcacaagttaaataataatgatacccaaaatatattgagcactcattatatgctaggcactgtactaaaaggacttcacgtatagtatctcatttagttatcttacaaatcctacataaaagctactatagtgcccatttaacaggagaggaaactgaagcttccagaacttaagggacttaaccagctgggaaatctcagggctgggaactcaaagccaagctgtgtgcttccagagacagctcaagatttgcctcccgaaagcagcctttcctgaccgcctctcataacagacatggagtgaaacctcttgacattcctgatttgtttcgtgttaagatactccctggtttgcagttaacgccaatatttgaagtcagtacgtctggaagctgttaaagcgttatcagctgtcttgaactactgtttaagtttattacgtgcaccttcgagttaatttaagacaactagaataagcagtaactaatttttggtccccccgaggcacgcccagctgattcccaccacacccagttccatggagaagcttgattggtccacaggttctgtctcccttacagtgattggttcaaataaaagcacgtgaccaagtcaggccaacgaggcacaaggagaggtcagctgtagcggcttccggcaaagtccctcctctttgtacttcatcaggagttttttggaaagtgagggtccttcctgctccagactttgtcctgctggagtgggaggccgcctgactaccagcttcactaagcgtggagaggcagggagcccctgaagcccaccctcctgcccgagattccccagcatccaaccagtacattcttgttgaagctggtttgttttgggatgcttgccgctccccacccgcgctgaaatgtgggcaccatgagggcacgcaccctgtccgtctccactgctgcacccctagcccttatacatagctgggcacggagagataccttatcatgtagctgaatgatgaacgagtgaagtcatgaatgaacctaatataagctcagagcgtggcggggcggggcggtggggatagctggaaaacaccttaaaataatctaatcca

SEQ ID NO: 36002 - DNA, 2300 bp, Homo sapien
agactcagtccccattcctagatgcgagtccactttgaggaccaaaaagaaagtagcctccgcctgctaaaactgccagctccagggcagactcccttgcagttaaggccttggaggtaagcctaatgaaccaccctacccgcagagacatggactcacatacagacactctcatgtggtcagcacaggggcgaaagctaccccacagaatcatgtctatgtgtataaacacagagacatagagacaggtacaagaggctcctccaaacctgcaccccgcttcaagaggtggtcctgactggtccattctgaacccttcatccttccaactgaggggaagcagaggaaagagaaaggatatttttaaaacaggggcaaaccgcagaaggagcagggtcttccaaccatggatgctgcctcttgactgttcacccactctgtatcttctttccttccattgtaagggaaagaggaaagacctcttgaaaggctatgaagactttcttggagtgtgaggctgtgttcagaatgagaccaggccaggtccagttttctacagggaagatgctgctaggacccagactagcctcacagagccctcagcgtacccaggaggaagaggcaatgaccaagatctcctcaaaggtgattcagttctgagaccttccatattggctgcccacatcagctggggcaaggggaggactttgttggcaatggtgctgtccaccagggagaagagctgagcccttcctttcctagggattcagtggaaaagtaggatggaaacagactcaaacttcttatcctgggatgaagattacttttgaacaagtcatatgtcaatgggcctcagtttcctcagaaaacaagagggtagtggattcactcagtggtggaaagggggcagtgccccaaggaagcctgggggaggagtcctggagaaccttgcatagcatcaaagatgacctttgggatgggagcacatagatcatgggaatggtgtggaggccacagcaaggctgggtcagatgattgaggtccctcccatccttgtcactctaagatgccctccctccttcattccactggcaaaaccctccccttgcagcggttttgcctgctgccaccaattatgtgtagggttggaggacaagtgtaaatttgccatcttttttgcccccaacaagagaatggtttcaaaaaaggagaaagaagtggaggttgccggacggtgtctgtgatctccatgggggcacagagagagagagccgaggagctcccccacggctgggaggggagatggcacgctgccttgctttgctctgcctctgccttctttggacactagtgtagctcctccgggtccctggggggttggagggagggcccctacatcctccttgaggtgggcaaggaggattctatagggggattatgggttatttggggccttcagttcagggtgatttcccggccctctgagtacggatattgccctggctttcagggagggaggtttggtgggttcttccacctaagccactatgtctctggaagattgatttttatgccccgtagttgccttttatctcatcctaccagttttcctctgatgatttcctcttttcctcttggaccagatgagctactcctccacatctgggcaaaaagaggcagttccctgctcttctctcctgctgccactcacccaatctgattccagagtaccctcagcccttcagactattctacaggagtagaagcagggcttatatcaccaggacactgtgaattgaggtgctggtccaattcatattgccttttgccctgtcctcttctgcagggactcagttggacagtaactcaggaagatgacagggaaggaacaacaagatggcacttgcaagtggtactacaaaagcagcagcagcacgtgccatatcataaccagcaggggcaaaatgtccagtgggctctgggcctcctacacgcacctctaaggttgcagtttgctttggggcttcattttccttcagggatgcttctgacatttgtttcattctacttgctcctgaaaatgtctgaggagaagactggcaggggtcagggatcccctagctgatagatcttggttcagtcctgtttagggatccttctgccagggcccaccaggctcaggggtttcccctcccctgcaaagtctccttccatgagcgttgctttttctttctgctcctcagtttccctatatataaaatgagtccaatgaccctacctcgatgggcagtgccatatag

SEQ ID NO: 36003 - DNA, 2300 bp, Homo sapien
agcgtgccatctcccctcccagccgtgggggagctcctcggctctctctctctgtgcccccatggagatcacagacaccgtccggcaacctccacttctttctccttttttgaaaccattctcttgttgggggcaaaaaagatggcaaatttacacttgtcctccaaccctacacataattggtggcagcaggcaaaaccgctgcaaggggagggttttgccagtggaatgaaggagggagggcatcttagagtgacaaggatgggagggacctcaatcatctgacccagccttgctgtggcctccacaccattcccatgatctatgtgctcccatcccaaaggtcatctttgatgctatgcaaggttctccaggactcctcccccaggcttccttggggcactgccccctttccaccactgagtgaatccactaccctcttgttttctgaggaaactgaggcccattgacatatgacttgttcaaaagtaatcttcatcccaggataagaagtttgagtctgtttccatcctacttttccactgaatccctaggaaaggaagggctcagctcttctccctggtggacagcaccattgccaacaaagtcctccccttgccccagctgatgtgggcagccaatatggaaggtctcagaactgaatcacctttgaggagatcttggtcattgcctcttcctcctgggtacgctgagggctctgtgaggctagtctgggtcctagcagcatcttccctgtagaaaactggacctggcctggtctcattctgaacacagcctcacactccaagaaagtcttcatagcctttcaagaggtctttcctctttcccttacaatggaaggaaagaagatacagagtgggtgaacagtcaagaggcagcatccatggttggaagaccctgctccttctgcggtttgcccctgttttaaaaatatcctttctctttcctctgcttcccctcagttggaaggatgaagggttcagaatggaccagtcaggaccacctcttgaagcggggtgcaggtttggaggagcctcttgtacctgtctctatgtctctgtgtttatacacatagacatgattctgtggggtagctttcgcccctgtgctgaccacatgagagtgtctgtatgtgagtccatgtctctgcgggtagggtggttcattaggcttacctccaaggccttaactgcaagggagtctgccctggagctggcagttttagcaggcggaggctactttctttttggtcctcaaagtggactcgcatctaggaatggggactgagtcttgaggttgggggtgtggtaggtgtaaaagttgagaggttgttactcggcctggtgtcggaggcggtgtgttccgaggtcctatgtcccctgtcaggctgtgtcggtggacacgcccgagtgcccgtgtgtccgtgtgtccacgtctgccccagcctccccaacacctcgcaccctctttgtctcgggtggaggtgtgcgttcaaacctggcgccgcacggccgtcctcgcgagcgagcgcggggacgcaccctcgctccccgactctttcctaggggagcgaggacgagtcggagcccggtgctgtttggtctggagccgagcggagcttgcattgatccattgattgcgcgcggtctgcgcctgacctccctgctcccggggaagccgtctccatggagaccaggcccgctcccccatcgccggattgtaaattcctgcaggcagcggcccggcagcctggggagggggccaccgcgcccgggcgcgcagggggagcggccaccgcgccgaggccccatttgaaagaaaaaagggcacgaaaaaggaggtggtggagaaggaggaggaggaggaggaggaggagggggaggaggaagaaaacgaaaaggagcgaggagaggaggagaaagaggaggaggaggagaaaggcgaagaaaaagagcctgagagacggagaaagagcgagagaggaagaaagagaggcagaaagggcgtgtttctggcgctgcgtttcccctcccctttctcaggtccttcgctcgggctctgcgcgctctccggctgcagctctctcccggcgaagctgggaattgggtgggattacacggagcagccccgccgccgccgctggcagaggccggcttggagagggcgggggttcccctccgtcagtcgcccctggcgcccctcgcctcgtcgcactctccgcctcgctctccccgacgtccggccaggaggagccggtagcatcgggagcctcgcgccga

SEQ ID NO: 36004 - DNA, 2300 bp, Homo sapien
atggagcctgagcgaggtggagagtaagtgtagacagaggctcccagcacttagaatcaactggtatgatggttggctgcataggagttgaagggtagaatgaagagctgaacggaaacctgtgagatttgaggcagggtgtttggggatttcagttctcttcttagccccaggaagtttcagagtataaaagcggaggacagataactgtctcaagctaggactctgggtatctataaattggagagaatactggtccatgcatccattcactcagtaaaaataatcacttaaggatttggattcaaaaaggctataatgagtcctgagaatctgcattttaataaaacctaggcaattctatggcccatagatcacacttggatatcaaattgtcttggtgtcaaatctcatctcctttctgtgctcagttgtgggatcacaggagagtaatgcctcccattcagtgatcactcacttgcaggctgctacttaagacactattttgggtttcccagtttccagctggaagtaatctctttctcctctgatctgccccgtaacacaggttctcaaccttgactacacattagaataactggaagagctttagaaaaatactgatggcccggcaccagtccaggctatctgaccagaatctctggggttgtggcttggacatctcctaggagagttgactctgatgtgcagggtggaggaccccctcaccttatctctcatgtcttcagggcatgtaccacattctgctccatgttttttgtttctccttttggctgggctgagtcacctttgagcctccacagctatcattatagtgtctttcacaaacacactcaataaggcgttttcaactgaataacatgtttctctatttcagttcagatttaagggcaccataatattgcctcagaagttggactcttttctatgtccttttttttttttttttttttttgagatagagtctcactgtcgcccaggctggagtgcattagcgcgatctcagctcactgcaacctccgcctccctggttcaagcgattctcctgccacagcctcctgagtagctgggattacaggcacacatcaccacacctggctaatttttgtatttttagtagagatggggtttcatcaaggtcaggctggtctcgaactcctgacctcatgatccacctgccttggcctcccaaagtgctgggattacaggcatgagccaccgcgcctggcatcatctatgtcctttcctaaccatcctcttttttgctagatggtgagtggcctcttccttcaagtatagctgtgtgtgtagcacctattgttagagctagggccaggagacagagggctaaacactggggattagggcctgaagggctgcacttattaggcttcaggtagctggtgccaacctctgccagctctggatgtctccattgttggcagcacaggggccgaggaaaatcatccaggatggaacatttttcctctaaagcttcttggctccatggtgggcaagtggaagcaggcctggtctcaagcagaatcatgacacagatgaagatccctcagatgccccatccccctttcttcctcctttactagtgattgctggaccctgccaccttcccagagaccactgttcccatgccttttcccttaactttccctctaagccttctccgtaaactcattcactttaagttgattattcctaatcaagttaagtgtactacccactctaagggttttttgtttgttttcaaataaaaaaaggagtgtttcgaatgatggagttttagctgtcactgtgaatttagtatttttgagggcagtgggggttccttctgaattcccaaaatcagtgtctgcctactctgaaatcagagagatgtgagacagcacctgtttctggagggggtcactgcctctgttttagagaagaggggattctgcccttggaagcccaccttcaagacaccccttaagaggtgccaacagaggttctcatgtgccccctctgcccctgccagatgtggatgagtgtgtggaggggactgacaactgccacatcgatgctatctgccagaacaccccgaggtcatacaagtgcatctgcaagtctggctacacaggggacggcaaacactgcaaaggtgaggctggaagggcacctggaggagagggacctgtggaagaaggcaaaccagtgccactgccctcagttggccactctccatcacatcaaggctagaaattccactggtcaagtggtggggg

SEQ ID NO: 36005 - DNA, 2300 bp, Homo sapien
tgctcctgggtctggaaggatatttgagccctgactgtgtgtgtgcatgaggtcacaggtgtgttccataaccttcttaccccacattcctcagaccttcccagtgggctctggggaaatgatgtctacccctcgaaaggctgtactggtcaaagggagagtaggatactagttaggaggactgaagctgggttcagatcccagccctgtctcctactagctctgtgatcctggacaagtcacttaatgtctctgtgcctcagttttccatagtgctcgcctcatactgtgttgtgattaaaagagtgattacataaaaagtacttagaacagtgcttggcaaatggaaacactttgtgttaactgttattacagtatagttacccacattatgcattctgtttcccttccttttaattagccaggtctgagggagaatggggggaaagggtggaggaaaaaggcagggtagccatactgaaaatgatgattcattaggtccatatcccctggtcacaaggagtggggacgaggaggactgggctcgttctttgtgtcttttggcccaacagctgcgagaggaggggggaggctagggcagcaggtcagccagccagagttgagaggtttcctgctgggaagaactgttgacaggtatgctaagagtgaagtgaaaggctgccctccctgccccttcccccaaccaggggtgagtagcctgggtcctgtctgccaccagcttggggaacttgacctcaggaaggaagccattcaccagcccccctttcccttactagtgctgaaagctgcctcaggcctgagtctctccagatctctcccagtccagccccttgcctggcccccagccctcccccatcagctacccagcctcactggctctcctggaggtcctccctgcctggcctctttcccagctcctcctcctccctaaagggctgcccgttttcagtgagtccctttagaccctccacctctccttgccccgcacccccccaaccccccgtcctgagggacaggaaagagataacccttacccaccaacctttcagggaatggccatcagctggagactaagggctagcctgttaggtcaaatgcccacctgcccctcctctaggtaattccctgagggcctgttcctagttttggttccaatttgtccccttataagaacactcaatcccagaagagagggtgttactaatggccacagatcccctgaacagggaagaaacagagacaggaaagagagagagagacaggaaagagaaagagaaagagacagagagagatcaagaagaggcaggcccaggactccttgatttttgcatgtctctgtcagtgagggagggatctttctccttgtttgttctcagcctttgatagtatcttttatcctgttttgtcctccttcttcagatatagatgagtgccgcttaaacaacgggggctgtgaccatatttgccgcaacacagtgggcagcttcgaatgcagttgcaagaaaggctataagcttctcatcaatgagaggaactgccagggtgagcagactcagccaaaggtgaaagccttaggagaggttcttgtgggagagcttcaaggaggccagagggctaaagtcttagaaactcaatagatatcacacagagtctctagaggcagtgtcatcctgcaaattagcaaatggtactctttcccctcagcggactagctccatatcaaagcattcagcctggcaaggactgagggatggatttcaccccaattcatatccttggcagagtaggacgtacctaaccacacatggtgggccctgacctaaaggcaccagatcttgcagttcctaattccaaggacttcaaatagagggggcagagaagatggaatggcattgttaaatcactggtcctagagctaggacatgaataggaactcttcagttcaagggggaaagccaaggcccctcacttgggtccttcacctgagcaagggtcaagtgctccaagacagattcagtggcttgaatctttgctcttccagatatagacgagtgttcctttgatcgaacctgtgaccacatatgtgtcaacacaccaggaagcttccagtgtctctgccatcgtggctacctgttgtatggtatcacccactgtgggggtaagctagtaagcttgcacccccagccaccctggccccctcacctcttcaccctccaattgaacaggtccttgtgttggcttgtggctatgggcaatccctggatgcatgcaccatgtct

SEQ ID NO: 36006 - DNA, 2300 bp, Homo sapien
tccgcctcccgagttcaagtgattctcctgcctcagcctcccgagtagctaggactacaggtacgcaccaccatgcccggctaatttttgtatttttagtagagacagggtttcaccatcttggccaggctggtctcgaactcctggcctcgggatccgcctgtctcagcctcccaaagtgctgggattacaagcatgagccactgtgcctgccctgccagatacattaagaatgatgtagaccaagtgtggtggctcatgcctgtaatctcagcactttgggaggccaaggcgggcggatcacgaggtcaggagatcgagaccatcctggctaacaccatgaaaccccgtttctactaaaaattagccaggcatggtggcgcatacctgtagtcccagctactcgggaggctgaggcaggagaattgcttgaacctggaaggggaagttgcagtgagctgagatttcgccactgcagcactccagcctggttgacagagcgagactccgtctcagaaaaaaagaatgatgtaagtcttagtttaagatgtcaaaatttgaaattgtatcctctataagtatttaaattaatgaaggaaaatttaggtatcaacttaaaaatgaacaagaggtacatagctcttcaaaattcttttatgggttcattctaaaaaatgtctgaagatcaccagcctatatgttgagtggaagggataggagagaaactgctagcaatggtcttcaatactgccctccaaaatatcctcaccaattctcctgagaacctgaaattaccttccattaggatcattacttcagattcagacactgtttcccagagctcttgttaaatgtataattgcagaggtgactggccatcagattacgatccgtaaggaatgtgagaaaagacagatatatatatacagagagagctatggaaaaagggtggttggagagggacaaactcaggtacagcctgagttctattccctgcggtatttctaaccctcaattcatattataagaggagctacttaatcttctctctgtatctataaggtactttttctttttctttttttttttctttttttgagacggagtcacactgttgcccgcgctggactgcaatggtgcgatcttggctcactgcaacctccgcctcccgggttcaagcaattctcctgcctcaacctccggagtagctgggattacaggcgcccgccaccacgcccagctaatttttttgtatttttagtagagagggggggtttcactatgttgaccaggctggtctcgaactcctgacctcgtgatccgcccgcctcagcctcccaaagtgctgggattacaggcgtttaagccacggcgcccggcctataagttattttctatgggaaataacttgtcaaacttccaccaaaaaggaatggaaagagggcagcatagtggccaggcagtttatttccatactaggagatacagaagggattaattctaaccgtaggaattctaaccatcaaatgtcactcactggcctacctaaactgaactctggtcccagccagaacaagtcaggaagaggggatgtctaagaccgaaaggggggctttctagttaagctcttcaggcaggagaggaaaaggatgcccgcatccccaaagacacctttagctaccacaagccccaaaccccgtactttgtaactgtgtctagtttacgtcctttaaaaattattcttattaagttaaattgttttcggggcggggaagatacaaaagaaaccagttaaagtctgaaaggatagagaggggaaagtttctcacctcattcttccagccacccagttcctctcctaaaaggcaatctttaccagttccttctctaacgcccctcctttttaatttgattttttaccgaaagctcgctcccttttaattttccctcaggtttctgaaaatttcccaatcgcagcccctcccagcagggaaatagtaaaggggcttggtttttatgttcaacccaaagcaagcctacaaaagggagtagtcggtttcgagcctgacggtggagctgacgcgggaatgagagagaacctgagaagaccgccagggcgccctccctgcggaggcgagtccctcaccgcccctctacatcgtccttttcaataaggagctcttaatacctgcaactgcttccttcaaggggtggctggaagatcagtaggcaaggcctgcggactgcgcaccttaaagcgcttcgggaccgtaagacagtgagtgctgagcgcgcggccg

SEQ ID NO: 36007 - DNA, 2300 bp, Homo sapien
cctccaaaatatcctcaccaattctcctgagaacctgaaattaccttccattaggatcattacttcagattcagacactgtttcccagagctcttgttaaatgtataattgcagaggtgactggccatcagattacgatccgtaaggaatgtgagaaaagacagatatatatatacagagagagctatggaaaaagggtggttggagagggacaaactcaggtacagcctgagttctattccctgcggtatttctaaccctcaattcatattataagaggagctacttaatcttctctctgtatctataaggtactttttctttttctttttttttttctttttttgagacggagtcacactgttgcccgcgctggactgcaatggtgcgatcttggctcactgcaacctccgcctcccgggttcaagcaattctcctgcctcaacctccggagtagctgggattacaggcgcccgccaccacgcccagctaatttttttgtatttttagtagagagggggggtttcactatgttgaccaggctggtctcgaactcctgacctcgtgatccgcccgcctcagcctcccaaagtgctgggattacaggcgtttaagccacggcgcccggcctataagttattttctatgggaaataacttgtcaaacttccaccaaaaaggaatggaaagagggcagcatagtggccaggcagtttatttccatactaggagatacagaagggattaattctaaccgtaggaattctaaccatcaaatgtcactcactggcctacctaaactgaactctggtcccagccagaacaagtcaggaagaggggatgtctaagaccgaaaggggggctttctagttaagctcttcaggcaggagaggaaaaggatgcccgcatccccaaagacacctttagctaccacaagccccaaaccccgtactttgtaactgtgtctagtttacgtcctttaaaaattattcttattaagttaaattgttttcggggcggggaagatacaaaagaaaccagttaaagtctgaaaggatagagaggggaaagtttctcacctcattcttccagccacccagttcctctcctaaaaggcaatctttaccagttccttctctaacgcccctcctttttaatttgattttttaccgaaagctcgctcccttttaattttccctcaggtttctgaaaatttcccaatcgcagcccctcccagcagggaaatagtaaaggggcttggtttttatgttcaacccaaagcaagcctacaaaagggagtagtcggtttcgagcctgacggtggagctgacgcgggaatgagagagaacctgagaagaccgccagggcgccctccctgcggaggcgagtccctcaccgcccctctacatcgtccttttcaataaggagctcttaatacctgcaactgcttccttcaaggggtggctggaagatcagtaggcaaggcctgcggactgcgcaccttaaagcgcttcgggaccgtaagacagtgagtgctgagcgcgcggccgggaagaagcctggaggctctgagctcggaggacagagaccgaagccccagggcctgcgtccctcacaacctgcgcctcctgtcctcccgcgctactcccgaagcgcaccttctcgcccgcaggccgcagaagtgatgacgcaaagccctcggggcctccgccacctcctcacgcttctgctggaccgaatccttggaatggacaggtagcggttcccgattgctatagcgacgacccggctccgagccgcgcccaggccctgacccgggcgtcgtgacgtcagcacgccttccctgggcgctcagcctcgctggccatgcgtcaccccggccttggtgggggcggggctccgaagagctcggttcagatcccggccgcctgggctccaggagccccggaaccaggataagttggatggctgccgcggcgaagcggggggcggggtggaccgtgcccggtattttctatacgggttccggggcccggtagaggcgcgccaagaggaaaggaaagtgcggcggccctggaacctggatatcgcgcgaggcaagctgcgcgcgggcgggcgggctatggcgcaggcgggttgtggggccggcgctggtggcggggcccggtgcatggcggtctgtcggcggagtcgccctcgggggctgtcaggttggtggctgcgggaggagtgggccaaccatgcccagggcgggaggccgggcgggcgcaggaccccgggaaggtcccgagcccggcgtgc

SEQ ID NO: 36008 - DNA, 2300 bp, Homo sapien
acttggcaccagggacttcctgacaccacagtcaattaattcctcaggggcctgtggctgaagaaaaggtgcccagcccccaccactcctcagctgccccccaacctctctatggcagagaggcagggagtggccctgtacatagactgctggggattgggtttgatttgttttgttttttttaattccattttgataatttttttcctgctctgggtggtggtggcacatggatgaatgagtatttaataaaagttccaaatttccacctgggtccctccatcctttcagctctaggcccgggtggcagggttggtcaaatcaggctatcagccctgtctccctggcacaaaccccactcagccttggtgccagagtggtggggctggcctgccagggacacaggtgggaaggaagcccagtataagataaagccctgaggagctgctggtggcttcttgcccacagctgagcaggtgggctccagggtagccaaacaggaccagggtgaccgctgcttccaggctctggctgaatctcaggcctcatgtgattgagctgggggaactcttttcctgccttttcttgtgaaacgtagtcagagcccctccaacccagccacccccaaatcacacagtcagcttctccaagagggcaaagccccaggttagagtgaggctgggggacacctttgccaaggttactgagattcaaggagcagagtctgatgcctctggagctgaagtcttggctctattacccagctctgggggtgcccacctaggtgcctaggactgtgctgtgggatttcaaagccacaatcagaccccactgaaaagtgagttggtgagaccagatcagctccagggggaagaagggatacaggggaaggcacttgatgggaagaagctctgggtttgactctgcctacacaggaacattgcagggattggtggtgcctcttttcctctctctgctgtgatggatatgccccaaccccttcctgcctcctaggattggaaccccctcctctgatccaggcatcctctcccaggatgcctagaaagctcccatttactcttgccaccagctccttgggaagagaggggcgggggcgtgcttccaggcaggaggtattcccagcaccttacttggagggatttttatttggcttagggggtagggggaggtgtcttagaattggcctgagcagatgtcttcaacatctgtgaccaccattcctggtgtgggcgtgtcccagtccttttggacactggatctgaagaaaggaagcactgacatggagggccctgaatcccaagcctgctgctgctgggacccttaaagttgaggtgcaccacaaggctcacccccatgtgtttcaggaagtttccagtgtcttcagggctactggggctagagtgggcagtgctctgagtaccgtttagagccagtgctgaggggatagggagccagcaagtcaagtgccacatcctgacctggagaggtgccctggcccatttccttctccagctttgtgatgttgcctttgtttccttccacttggatggagtcccaccaccatggtaatgttaagtagcaccaaaagctctacccagagcctactatgtgctttacgtccattctcagacattcttacaacacggaggcatttttcctgctttacaaatgaggaaactgctcaaggaggttaagtaacttacccaaggcctcctatgttgaactaggactggacctttactctgtctgaccccaatatcaggatgagcttgctttttccctcagcaagctgcgtctgggagccctggaaggctccagaagcctccgggtctgaggaggcttctaaaagggcctcacatgccccgggagccacgtggatacagaacgagggttcccgctctcggagagttggtccccagttcccatgcagggagtggagcctctgagcactgccagaacaacaggcagggttctcgacagcacagagcctcacgcaatgtgcaggcaggtggtgctctcgctccaccacggcacctctgcggtctctgcagccgtttgcatttcctgaaaccggatcttagtgtcagagccgcccccagccgggcgggcgcctcagccatggccctgcgcaaggaactgctcaagtccatctggtacgcctttaccgcgctggacgtggagaagagtggcaaagtctccaagtcccagctcaaggtgaggggcacccgggacccgggggaggacggcagatgcaccacaccagcccctgccgcctggga

SEQ ID NO: 36009 - DNA, 2300 bp, Homo sapien
ccccgtctgagaagtgaggagaccctctgcctggcaaccaccccgtctgagaagtgaggagcccctccgcccggcagctgccccgtctgagaagtgaggagcctctccgcccggcagccaccccatctgggaagtgaggagcgtctccgcccggcagccaccccgtccgggagggaggtggggggtcagccccccgcccggccagccgccccgtccgggagggaggtaggggggtcagccccccacccggccagccgccccgtctgggaggtgaggggcgcctctgcccggccgcccctactgggaagtgaggagcccctctgcccggccaccaccccgtctgggaggtgtgcccaacagctcattgagaacgggccaggatgacaatggcgactttgtggaatagaaaggcgggaaaggtggggaaaagattgagaaatcggatggttgccgtgtctgtgtagaaagaagtagacatgggagacttctcattttgttctgcactaagaaaaattcttctgccttgggaaaaaaaaaaaaaaaaaacttctgaggggtgagtttaaactgtttgccatgtatcatatgacctcccccagggcccagagtaccctaatgtctttgtactcgtcaatgttttgtgtgggaagggtgcgggcagtccttagggagagctgagtttcctctccagacttctgaactgtggtacgcaacagcctggcaaaagcagaaacccagaggcagagatatttaggagaatataaatccccagatatttgcaaatatgttaagggagggactctgactttcaccgtccatttttacctcaatctcaaagggcaaggaggttgacatctaagttacaaatataatgcacaagcatttcaaaaagtaggggaaaaaaaagaaaaagaaaaagagaagcagaaagaagggggaaaaaatcactcatccctgccaggcacggtggctcacgcctgtaattccagcactttgggaggctaaggtgggaggataacttgagtccaggagttcaagaccagcctgggcaacatggcaaaaccctgtctctactaaaattacaataattagctgggcgtgtggcgcatgcctgtaatcccagctacttgggaggttgaggcaggataatcgcttgaacccgggaggcggaggttgcagcgggctgagattgcgcaactgcactccagcaggggcgacagagtgaaactgtgtctcaaaaaaaaaaaaaaaaaaaaaaatcactcatccagatagctaggtgtggcctaaggagcttgcggcctacggaaggtgtggccgaaggagaggggaggggtcatctttaatgatgatggaggggaggcattggtcatatacctgagagtcaagctttgttcatcgtcagatgaaagccaacttcttccaccagattgcctcccagctgctaggtagtttcctgtggtacatcttaagcggtaggttgggataataggtcccttccaggtcttaaagatgtggattaataagaacagaattttctacaacaataaggaggatgtcccctattttaggtgaataagcgtattgcataagcacatgggaagaaaggttaagaactctaagaccgtaaatttccagttgtagaagcctcttgaaggcggaaagcccttttttgaaaattataggcgatatgatctcctccagtggacctagcactgggttaagagtctctccagacttgtcactgcaagtcacgtaccttttctaggactaagtttcttcactggaagatgaggaggttgcactagatgacctagaaattcccttccagctttaaattccctcttgtgtcacttgctggacttgttctactggacctggcgctcccctgctcctcccttagctgctacgtccgcatcccgcaccagagggcgccacaggctggcccggggcagcgtgcggtgggcggagaggcagaattaggggagtctccaggaggcgtggtgattggccgccgccgggcggaagggggcgtggggagggaaaggccgagcagcgcggtgacgtctcgctggcgggggcggggccgggccgcggagcgtgtgacgctgcggccgccgcggacctggggattaatgggaaaagttttggcaggagcgggagaattctgcggagcctgcgggacggcggcggtggcgccgtaggcagccgggacaggtcagtccgagacgagagaagcggtcaggcaagtggcggagggaagcgccgggcctgggccgaggcggccagcgggactgggg

SEQ ID NO: 36010 - DNA, 2300 bp, Homo sapien
caggaccccaacagttcttaccatggccttctgtaatcaggatcaacttgaggaaaattggggtgaggggaaggagtttctaggtggtaggtctttcccttttagggtttggtgggggggcaaaagtagcaagccctccacccccatgaactgcagcagtgacacagctggggacatggaggaatgggggagggctcctggaatgaggaaggttcaaaccctcttgccagggccttggtttttaactttgctcttttgtagaatgactctgaaagaaaaccaataaaatgcacctaagttatcattgctggtgtctgaagagtggtccgctcatagcccagccccactgccaagtgcaataaggctgcttctgcattcaatctgttgcaatattacttgtcacttagcttctggaaaacttcacagtgcatttttgcattatgaaaatagtaataacctcatgaatcttgtgaaagggactcggggatccaccagggtccttgagccatgtttagaacttttcctccctgttccctttcaggtggccagaatacagaccttggtgggtgggagccacagccactcagagtaaagctgtaggtgaggatgcacagggcattgcaggctttttagcattcttggccctgcctgctattcatcaggtcccactcctctaacagcttgtcattcgaagacccaaaacatcccctgtaaagttagagctgcttacctgaaacagaaggtgtctggaagaaacttctttcttgctattttggcatttgcaaagcagccattatctaagaaatatcactagtctttcccgacatctcccttgaaatcattttggctcaaatggagatcagatcaagctcaagatactcccatggctttccatactattcagagtgaaagcccaactcctttctgtgacctcaggcctcttaagatctgacctggttcccactctgatctcaactcctattactatccagcaagtgccctccgttccagccatgcttttgccccagagcccccccgccctccacagggaggactgaaatggtcttctcacagacttctatctggcttgccaacctcatcttcacattcatcttgcctgaccaccctatttaaaagcacttcgtgctgtgtgtcggtgttatgttctttttgaacacatcacaaacattgtttaattagctttccgtctctccccagttgtgtgacaatgagggccaggatctttgttttgttcccagtatccccagtccctaggtgctcagtaaacatttcctgaatgaagggctgtgtgtggcagcagagctgggacaggaaatacaagctagcccccaaagcaaggtttaggaggcactgtggggctcttctcgcttatttcctacgctttgcagtgatcccacccttggctggaagccaagttctccagcggacttccttaaactgaaccctaggaagtggagccacacctggccccctataaacgacccagagcaaggttactgcttggtctttgggaggaagttcagaagaaagtctttggccgtattaatagtgttaggttttactgtgaccatgtcattctcagggatgtttgtatatcaaatactatttctggagaggactgaaacccaaatgatagcacttttggcctgtggaagagatgaagctaagtggggtggtaaattgtggtcaaattctatggtgaagtccatgacaagcaacatgccgtcagcgtaaatacagcgcgggtcctctagcacaacagaacccctgacatccactccattccactactttggggagtgatgaagaaagggagagggttggggtcgtcagcggcggatccacccctccatcaacccccgcccccgccccgctccaggctccctggcccgacaccgcccacaaactaaccacttgttttgtccacgccccctcccatgggcacgccccaggccttggccccgcccacctactccggctggacttgtgcccggccctgccccttgcgaccggccctcgcgccggcctcacgttcaggctccgcccccggccgcgcctccctccttccctttccgacagcgcgggaacggctgcggcttcgggcggccgggtttctccggtctcccaacgccgaggagagcttgtaacaggcgctggagctggcccgccaccgccgcgtcagggacggcgctggagtcctccgttcccctcagcctctgagctgaggccccacaccagagtagggggcggcgcggcacccgtgccccggcatggcgaca

SEQ ID NO: 36011 - DNA, 2300 bp, Homo sapien
aggaagtccctgaaggccgccttgaaacatttgggcccctgaccatccaccaagggaccaccctcttggtgctccatcaccagcttcctgaagggcatttctttcttcaccaccttgtcttgagccctagcctgaggataaaggctgagcctggccatcccagattgcaactgcctccctgttacaggctgcatagggaatattggcttcccagccagcagggaggctcctgggctaagggagctcagctatattttctttttcatttcttttgtttttgagagaaggtattgctctgtcatccaggctggagtgcagtgatgcgattgatcatggctcactgtaacctctgcctcccaggctcgatcctcccatgtcagcctcccaagtagctgggactacatgcacatgacactatgcccagctaattttttattttgtagataatatgctggtcagggctggtcttgaactcctgagctcaagtgatcttcctgccttggcacccaaagtgttgagatttacaggtgtgagccaccacaccaggccagagctatatttccaaaggctgctggccccaggcacactcctcatcaattctcaggctgcagggacaaactttccgatagggctcagtaggatcaagccgacccagagtgggcatgggatgctccaggaggtctggggtaccagtgggctcagatgaagctcttgtgctcatgtatattatgaccttctgtgtttttgtttctgacttgaataatttatcaatggtgttgaataaaagcaagttcaataatgtctttttcttttttttttttcgagtctgagtctcgcactgtcgcccaggctggaatgcaatggcatgatctcggctcactgcaacctctgcctccccagttcaagcgattctcctgcctcagcctcttgagtagctgggattacaggcgcatgccaccatgacccgctcatttttgtatttttagtagagacgaggctggtctcaaactcctgacctcaggtgatccgcctgcctcccaaagtgctgggattacaggcgtgagccaccacgcctggccaatgtcttattagaagcagtaccttccttcccatgaattctgggtattgagcccatccgcaccccctccacttccctgctcaatgacaaggaacatctttttcctggtgaggggaagggtgtagggtatcttattcaccctctgagggccaaataatgtgtaataccacccaccccatcctataggagctgcccccaccaggcaggggggtaggtgagaatgggcatcttaaaggtgggagtgactcagtctggagttcgggaagggttttgggcagatgaatccgaggagagatctgaagggctctgggggttactgtggctaagaggatgagacccattggacagaggaaagagcagagaagacaccttatgggtgtgcagtgctgtgtgcctgttttacatccttgtattcctgtagcacctggctagacgccttattcatagcagtcacacttaaaacgtagatgttatcaaattaactatcaagtgaaagttcacttaaggactttcccagctcttcccctctgcaggcgttgaaaggacaggaacagaactttccggacacttcccttaccacgagtccacgttagagcaaggtgctgagggagggaggtcgggccaggcttccttttgagaacataagctggtgcggagggcgcgaggggagaggggtttgagggacaagcgtgccggaatccacgctgtcagtgaacatcactgggctgtaccagtacgtgtgactaccgaagctcgagccccgaacccagccgcttccctaggggtccagcagcagcgggcgcgaatcggcacattaccgggggaccgcggggcgctcaggactgcgacaactctgtgggttaccgcgccggcctagcggcccagcgacgccccccagcggccagagaaggccgcgcttctcggggttggcccacccaaccgctctgcgggtaggaccgaggagcaaagcattatcgcgagatcagggccactatttgagcgcatgcgcaagacatgctagtctcttttccggttagcgcggcgtgagaagccatgaggtgagttggtcctgaaagccctatccgcgttcatccgcgccttcaggtgccccgccgagggttcggatcctgtaggccgcgccgcggacccttgcgccacctgcgccgcggggcatttctcaaggcgggtcggcctgcgggtcgcccttcctaccaggtccgat

SEQ ID NO: 36012 - DNA, 2300 bp, Homo sapien
ctgcactccagcctgggtgacagagctaaactccgtctcaaaaaaaaaaaaaaaaagctttaagcaaacattttcccaaagaggctgttctagctttttctcctgcagttaaatatgggtgaactgattggactcacttgtcacaggatgaaactgtatttgctctaagggtggcaggctagagatgagactctagaataaagggttaaacagaatggggatgacccagttaaattttaatttcagataaacagatgatttaagtatgttccatgcaatactaaggacatcctgcatttttatttgctaaatctggcaaccctctagaatctagtcttctaggtcattctagtccaaccttcaagttaacagatcgggagaacttgagacatgttaaatgtacttctcacagccagtcactgccaacatcaggattccaacctggtctgcctgactccacgttgtgtgcctggtatcccactaggagccccaaactgtcacctgctggatgggtgggagggtaccgagccccagtaggtaggaggggtccaggaagcagaaattcctggaggctgcactggacaccgattacatctgtgggcgattagcacacgagccttcagataattgcttttgctttaagctgaagtttcccttttccttctgattgcaaagatcacaggaggttcagaaaatacagaaaagcccaaagaaaagaaaaataaccacaacaagtagctggctggacctgtcttgagaaccaaaattcactgctcatcctcattaggttttatacctttcttaccaagaaagtgctgttaacttcttaaaagctaaaaaagcaaaagctgctcagagtaaaaaccctgtgttcttcatttcagggacagggaaggcttgttttgagaaatgcagcatctcccccgaccccccgactcccacacataccaccgatggactcttgctgttgcccaggctagagtgcagtggtgcgatctcagctcactgcaacctccacctcccaggttcaaacagttctgcctcggcctcccaagtagctgggatcacaggcgtgagccaccgcacccagccaaaatacagcattgttaagcactgcttttatgctttaaaataaccgttctcagccgggggtggtggctcacgcctgtaatcccagaactttgggaggcccagacgggcggatcacaaggtcaggagatggagaccctcctggctaacacggtgaaaccctgtctctactaaaaataccaaaaaactagccgggcatagtggcgggcgcttgtagtcccagctactcgggaggctgaggcagaatggcatgaacccaggaggcggagcttgcagtgagcccagatcacgccacttatactccagcctggggaatggagcgaagactcaaaaaaaaaaaaagcagggatgaacttgttcccctatttaccaaagtcaaactaagctcattttagtcaaaggttaaagcagtactgggtgctagaggcaagaactgccaacagggaaatgcctcagaaaaggagggggcttagcctgcctggggcaaggacctggaatactgttaacaggatctggctggggatggtgactcacacctgtaatcccagcactttgagaggccgaggcagaattgcttgaactgggacccacagattgagatcgcaccattgcgctccagcctgggctacaaactccatttaaaaaaaaaaaacaaggtccattaattatacttttgtactggtttgctgtgccttgttttccttaacatttactcattactaacccaaagcataggatactccacatgtggtcttcttaacacagaaatgctgactaaaatccttattttaaatttacatggaccaatcctgtcaaaaagcttcaatgccgttagcaaccctatcacatatgcaagactgcctgattttgatggcagaaaaacatcctcttccctatagtacccaactatccatcatcaaagtgacaaactacacaactagccatcagcagtgccaaggccctcacttgtcagctgacaaaccaccccccaccctcaatcacaggcagacagagggaactggtaatagaatttattcaaatgtgccttaatataggcgctggggcttgcccatggtgctcttgatatataaggcccggacattctgccagtttttcttgagcaatgacaccaagaagttgacagccaggtgaatgttatacacaagctcatcgtctgtcatcttcacgtgaccaacagctacagccagaca

SEQ ID NO: 36013 - DNA, 2300 bp, Homo sapien
tcccataagtctctgggttcacagggttggaccaacattgagcgagccccaactgcatcctagggatgtgcccccagtgccacctgtcctgtggctgtgggactgctctccagatcacgtttctggtggagcctcgtccacctgagtttgggggtatttttagcaacttcctgtccctatggatcctgggggaggtgctgaggttggggctgggaacctggatcattgaagggagaggtgcccagtgaggctgaggaagggaaccaggggctagtcaaggggtggagctggggtctaaggtgggacttcgtggctggggataggaggaaagactgtggccagaaacaacagagaatttgggaaggaagaatgctgggcttggataaatttgacagggtcctatagttaatcaggtgcgggctctaggcatggcctgtggcagcagcagaaaggcaaggtccctgcccccaggagattatagtgtgactgcaaagccacgtggtgctggtgtggagtgagatagaagaagggatgggtgttgagtaactgagatggtggctgagggttggagccccaaggcaagggacagactgcccccaaggttgagggcactgtctgccaggatgggggtccaaggaggtctcgggccgcccccaccccgtcttgtgtccatagccgactatatcgtgctgcagttcggccgcgtggcggaggacgccttcaccctagactaccggtacccgctgtgcgccctgcaggccttcgccatcgccctctccagtttcgacgggaagctggcctgcgagtgaccccagcagcccctcagcgcccccagagcccgtcagcgtgggggaaaggattcagtggaggctggcagggtccctccagcaaagctcccgcggaaaactgctcctgtgtcggggctgacctctcactgcctctcggtgacctccgtcctctccccagcctggcacaggccgaggcaggaggagcccggacggcgggtaggacggagatgaagaacatctggagttggagccgcacatctggtctcggagctcgcctgcgccgctgtgcccccctcctccccgcgccccagtcacttcctgtccgggagcagtagtcattgttgttttaacctcccctctccccgggaccgcgctagggctccgaggagctggggcgggctaggaggagggggtaggtgatgggggacgagggccaggcacccacatccccaataaagccgcgtccttggccaagcggagcggtggttcctcagcgcgtgcggagaacgaggcggcaggaggcgtccgaggcgcgagctggaagtctcaacccccgtcccactcctgcccaggccccgggcgctcccgcgtcccctccccgcgcccgtcgcgggtcctaccgaaactcggcggccgcacagcgtcgagacgccccccgtgggggcccggggagccggggcgaaagggagggtcccggaggtcggggaagagggagaaagggagaagaaattcgagaaactagccacgcggggagaaccagacaaaccgggtcccggcagggcgggcgcagccgccagggcggagccgggtctggggccccgggagtggggggcaggcccgcgagctggagggtacgctccgccttggcggctcgggactagggtggaggggccgggagccccggggcccgtgcgctccggctctgccgggctcctcgtgacgcggcacccacggcccccggcaccgacgggagccctgcccgcgaggcgagggctccgccctcggccccgccccaggccggagccccaaattccggcgggtgcccgggagcggggcgaggcccggagcgcagggggaggaaggcagctccgcacgggcgggcgaggagcggggcgcccaggcgcgcgccagccggggtggccgggtcgcgaggccgcggggtaggcggcccgagcgcggctggacggccccgcccctcccggccagcaccgccccctgcgcgccccgccccctccttcccgcagcccccacccccgccccggctcctcaacacaaactttccgtcccgctcgctccctcctccgcgctcggcgcctcccgctccagcccggctcattccgcacattccggccagccccctccccacgaccccccttccccggccccccttgcggctccctcgggcccggcggagcggcccggccggagcgcccccgcgagctcggaccaggtaagccgggcggacgccgggaggaggccccgctcgggagaggtggtttggttggtcggctg

SEQ ID NO: 36014 - DNA, 2300 bp, Homo sapien
aataataatgagatcattatcactaatttgggtatttatgtctctactatctgtctctctcacaagcatgtaagctgcacgagggcggggaccacatcatgttgttcatctctgtatgaccattatttagcatagcgcttggcacacaataggtgctcaggaaatacttgttgactgacactcagctgtcagtttcctcacctttaatatcagggtgttttcgtttggttgtttggttgtttggttttgtttttgagacagggtctcactccattgcccaggctggagtgctgtggcactgtcttagctcactgcagcctctgcctcctgggctcaagtcatcctcctgcctcagcctcccaagtagctgggacctcaggcatgtaccacattgctcagctaatttttaaattttttgtagagacaaagtctcactatgttgctcagcctggtcttgagctcctgggctcaagtgatcctcccaaagtgctgggattacaggcataagccactgctccttgccctaatatcagggtgttaatgtctgtctcataaatattattgtgagggtggagtcagaatgggagcaagccacagtaggtggacaataaatgctattattattatatggtcagagccaactgaggactgaggcctctccgaagtggcgacttgaggactgtttagagttggataggtttcatggaatagggagggcgttccgggagggaacagcctgagcaaaggcatggaggacagaactgtaaaggcagtaaggaaacctctgtggctggatgaagagtatggcttgggataaccctgtggttagaaaggcagactggggccagatcagggagagccttgaatgtcaacccaacacatttaaacttaatccttaggcagtagggagccaatgaatgtttttgaacaaaggtggcaaccgaagaaatagtattttagaaagttccatttgatatggatttactgtaattagccaggatcgtgccactgcactccagcctgggtgacaagagcaaaattctgtctaaaacaaaacaaaacaataccacaaaagcatgtcccctatcagtgaaaaaagaaaaagagttaagggtatacctccaatacagacatattcttttttttttttttttttctgagatgtagtcttgctctttttggccaggctggagtgcattggcaagatctcggctcactgcaacctccgcctcccaggttcaagtgcttctcctgcctcagcctccccagtagctgggactacaggtgcccaccacgatgcccagctaattttttatttatttatttatttattttgagacggagtctcactctgttgcccaggcaggagtgcagtggcatgatttccgctcactgcaagctccgcctcccaggtacacgccattctcctgcctcagcctcctgagtagctgggactacaggtgcctgccgccatgcccggctaatttttgcatttttagtagagatgaggtttcaccatgttagccaggatagtctcgatctcctgaccttgtgatccgtctgcctcggcctcccaaagtgctgggattacaggggtgagccaccgcacccggctaatttttgaatttttagtagagactgggtttcactgtgccggccaggctggcctcgaactcctgacctcaaatgatccacctgtctcagcctcccaaagtgctgggattacaggtgtaaaccaccgcacctggctctagttcttattttttgtgagaaataaagataaatacaggatccagtctaatgttttcttccacatcccattgacaaatgactaatcggcccctctcaccccaagcttctgggggcttctcggggcaggtggagctggtggccatcctgcaggctgctggggatctgagaagaactggagttgagattcttcccccagtggcctgggcctagcaggggagggtcgtgggctgtagcacctcccacagcgcggccaggcctccactccttgagcagggggaaggggggtgaagttgagccgagattagcaggagtcgggagggaggctcctagacctgcagagaaaggggtgcgataggcaaaggcaccatgcctctgcgggatgaaaccctccgagaggtgtgggcctctgacaggtctggaaggcccccagttcgtggcacctgaaccctggggggcctagatggagggatggggagtgggtgggatggggagggaaggggaagggagacaggctgatccctttgctaccctcagtgggcatgaagaag

SEQ ID NO: 36015 - DNA, 2300 bp, Homo sapien
ttgcaagatgaaaaagttctggagattggttgcacaacaatgtgaatatacttaaaaatagtgaactgtgcactttaaaatagctaagatggtaaatgcttttttttatccccccacaattaagcgttttttttaaaactcaaggagaaaacattatgtagtcagaatgttctgaagtggtcactatagtctttactataaatgaaactgttaagtgattaaaatgttgtatcttaaaatatgttatataatttttttaaaccagaaaaaagtgtaacattacagaaggaagaaaaagtataatgcattgcttttatactgggctttgtatgcttttaaactttttcacctgcctatagttacatacgtataaaaagcatttaaatttagtaatagctatattatacatttgtatacatatatattcttgttttatattttattacaaatggaataagactcctgaaattgataaattgtgtataagctagtaaaactgaagtccagatcaagtgtaagaataaattgacgtggccaggcacggtggctcacgcctgtaatcccagcactttgggaggctgaggcaggcggatcacgaggtcaggagatcgagaccatcctggctaacacgatgaaactccatctctactaaaaatacaaaaaattagccaggagtggtggctagcgcctgtagtcccagctactcgggaggctgaggcaggagaatggcgtgaacccgggaggcggagcttgcggtgagcagagatagcgccactgcaccccagcctgggcgacagagcgagactccatctcaaaaataaataaataaataaataaataaattgacattatgtattcttggtgtgtttttttttgagacggagtcttgctctgtcgcccaggctggagtgcagtggcgcaatctcggctcactgaaagctccgcctcccgggttcacgccattctcctgcctcagcctcccgagtagctgggactacaggcactcaccaccacgcccggctaattttttgtatttttagtagagacgggatttcaccgtgttagccaggatggtctcaatcctctgacctcgtgatctgcccacctcatcctcccaaagtgctgagattacaggcgtgagccactgcaccggcctattcttggtgtatgttacctatgactgagatcctgaagatgaagaatctttaaaatgtttatgctttgggggttgggcatggtgactcacacctgtaatcccagcacttcgggaggccgaggtgggcagaccacttgaggtcaggagtttgagaccagcctgaccaacgtggtgaaaccctgtctctaccaaaaaatacaaaaattacctaagcgtagtggcacgtgcctgtaatcccagctacttgggagtctgaggcacgagaattgcttgaacccaggaggcagaggttgcaatgagccaagatcgtgccactgcactccagcctgggcaacaaagtgagaccgtgtctcaaaaagaagaaaatatttatgtttttggtccagtaattctacatctaggaatttaacctaaggaaatgtgtagaagcttgcttaaccctctccagactaattgatgctctccattctgtttgcatatatactgaatgatacaactggtttcttgttctgtggtgtggtctcacacattgctcccgtcagtgagtgggccttgtcagtgccctgcagccacagaccactaggaacacacctatagttgaacacgttggttcattacttgtgagggaggatgcacaccatgcgaactgtggagtatctcagtaagagtgttaggaggaatattttataggacttgtgcttgtattaggtgattttggggagtttaagaaagcagagctttctcgattggatgctgttaggatgtggggtgattgatgtttgggtatcttaataaatcttattaggacgtgggccaactagagtagagtgagaccaaagctagaactggtagagaagcagcagtcactcatattagccaggagagggggatgtttggtattttgtgaaaatgctcagtgaccttgtttttttcctctgggcttagacaaaaaaaaaattttttttcttttttgaaatggagctggggtgcagtggcgtgatctcagctcactgcaacctccagctcccaggttcaagcaattcttctgcctcagcctcccaagtagctgggattacaggcgtgagccaccgtgcccggccagacaaaattttgaagtatttttgttttgtctcacttgaacaca

SEQ ID NO: 36016 - DNA, 2300 bp, Homo sapien
tttattttatttatttattattattttttttgagatggagttttgctcttgttgcccaggctggagtgcaatggtgccatctcggctcactgcaacctccgcctcccgggttcaagcgattcttctgcctcagcctcccgagtagctgggattacaggcatgcgtcaccatgcctggctaatttcgtatttttagtaaagatggggtttctccatgttggtcaggctggtctcgaactcccgacctcaggtgatccgcccacctctgtcttccaaagtgctaggattacaggtgtgaaccactgtgccctgcctaatatgtgctattattaagcatagtagatgcttaatcaattggtattagtatgcagaggaattttgatcaactttgtttttctgcgttaatgaacaaatacattgtttcagtgactcccctcggcaactggtaaacagggaagcttctaggcactgaggacagacaaatgactgagacagaacccctgccctcgaggcggtttcagtcttggctttatttgtcttttctgcagacatcatcaccctttttttttttttagaatggagtctcgctcttgttgcccaggctggagtgcaatggtgcgatctcggctcactgcaacctctgttcaagcaattctcctgcctcagcctcctgaatagctgggattacaggcatgcgccaccatgcccggctaattttttaaaattatttttagtagagacggggtttctccatgttggtcaggctcgtctcgaactcccgacctcaggtgatccgcccatctcggcctcccaaagtgctgggattacaggcgtaagccaccgcgcccggcgcccaggcatcatctcttgaaggcagcatggcgatttctggacgaggctcttcataaatgtttgaatgcagtatagtgcaaagagagcaggtttggagccaggagacatgagttctaatctggctatgggatattaggtttccataggtaactattaggtcccacgtgtaactagctatgggacatcaggtttctgtttccttaaaaatgagagagttgattagagattccctaaggcccaggtgcagctcctgcatctctatgggagtaactcagaggtagccatctggttggcagtctacctttcggagttggcggaagaactcagccgttttgtttttgtttttgttttgagatggagtcttgctctgtcaccaggctggagtgcagtggcgtgatctcgactcactacaacctctgcctcccaggttcaagcgattctcctacctcagcctcccgagtagctgggacggcgcgcgccaccaagcccagctaatttttgtatttttagtagagacggggtttcaccatgttggctaggatggtctcgatctcttgacctcgtggtccgcccacctcggccttccaaagtgctgggattacaggcgtgagccaccccacctggccgaactcagccgtaaggcctcttcctgttttaatctcctgggatctcctgcttgaaaggtagcaagccaagagaaagtatggtctttacagtcactgggtgtccagagggaggtgatatctgctaaattggttctcgaggtgggatttccccagtcccgactgggcatcttagacttaatggggttgcttcctagggctaacctggccagctgacctaacaaacagcctggcctgcccctctccggcctctaggtaggccctgtggacagataggaggggcagtgccttcagagagacgatacagatgggaagtcaactagcttgcttaggcattaatttctcgggaggtaagagatgtgagggggtgtcagtttccaccatcccttctctatggcccccacaaagggcaagggccagacacgtgggctggcgtggggaggtggaggagcaaatgatgggggcggggcctcatttgcatggacggcgcgcggccaccaatccggacaggcggatcgacagcccgcgcgccttttgggggcggactgacagccccggggccctatggaaggcgggtcctgcggccggctggggcgggacggcgccgggcgctgccccggggattcgggccggctcgcgggcgctgccagtctcgggcggcggtgtccggcgcgcgggcggcctgctgggcgggctgaagggttagcggagcacgggcaaggcggagagtgacggagtcggcgagcccccgcggcgacaggtaccggcgccatggccacggagatggggcggccggccgcggcgccccgggagccgaacgccctcc

SEQ ID NO: 36017 - DNA, 2300 bp, Homo sapien
gggtggatcacctgaggtcaggagttcaagaccagcctgaccaatatggtgaaaccctgtctctactaaaatgcaaaaattagccgggcatggtggcgttcaactgtagtcccagctactcggggagctgagacaggagaactgcttgaaccggggaggcagaggttgcagtgagccgagactgccccactgcactccagcctgggcaacagagcaagactccatctcaaaaaataaaaaaaaaaaaaggaaaagattaaaggcagctcacaggctcagagggaagccactagttacgccactctcctttccaccttctgccctcctctgtggttttgttctcttactgagcaggcatctgccctcctagcaggcatctgccctcattctactctgcacccaaggttttgcagttggtatttgccacaacctccctgatattaacttggatgtcagcctctcccttccccaccagccaccaccccccgccccccaccaaagattttggggaaatgaaaaatagtggcacttcaaacaaaagggccccagtgagcaccagtaagccaataggcttgatgggactggggagaccaaggcaggagagagaataggaaggatggaaagggaacaccaccaaatgaatgggtcacgaggaacatttgctgccctactgctgtgcaggaggcactgcactaaaccccgtggcctggacatgccatgaatgaactcaggtcccatcacagagagtacacaggttagctagtgtactcactgtgcttggttgaggagtctgaagttgataacatacacaataaatgatgtttgagaaagattattccagcagggtgtgtaggaggaaggaaaaagaaaggacagtgtggcagatgctgtgagaatttgggccaaaggtggactctatggggctggaggggaaagggtgaaggagaaaagtaatgaacaaacaatatcttttgaaataaaagcaacaaagggaagaatttgataagagatcagacataaggatggtgaaggagagaaagcagttaaaaattaatctacctttgcagtgagttttaggactgggagggtcatggtgggcaatggggaggagctggtatgaggggcatgaatatgagttcagtcacttctaggccatgtaagggcaggtgtcctgtaggtgactggacttggagatagggaagtccagaagagcagtgggctgctgtctgagagtgtccctgtcacagcctcgagcaatcactgacctgggatcacggacagatttcaagcatcaggaagaaggtgggagtagatggcagtgaaggtgcctctcgactgggagatgcagtgtgcattggctgggtaagagcctgtgtgggaagcgtgatgtgtgtatgggaagggggtccacggcccaggcctgtgttggcatctttagccacagagggtgccagagatgccaccagatggcaggaggcccaggtgaggcacttcagcagcctgaggtccctcccctaggcccactctcaaaggccctggagcccaggcctatgctgcctgccagggcctttcccggaaccactcctccccgcctgtcctggcactctccaggcacaaagcatccctcagggcactgcgcaggcaccccaggaagctgggacgtgagacaggtccccacccccaggaataaccctgctctgggctgctgtcatcctcacaatggccccacaagacgccaggagacagcatagggacagcataagtccccagtggggaccccaaatgggaccccatttcccctgcatagagggggaaggaggagctttgtggctaggtggcaggatctttattgggtctttattgtggtttgggggtgggggcagaaaagcagggtctcgggcttcaaaacaccacaccacctgcctctccctccctccgaggaggaaatcttcaggggcctagtggttttgaggggagggggcaggaagagactctgaactctgggtcagctgaggacagagataggggagatcctcttgccctatgtccctcttttctcctaggatccccttcctcggctccctactccaccactaccccagaacaaactcctacctctgtttgcaactaagagttacatcccccatgccaagaccttccgaggcgtcccaaaggggtgagatttggggaaaacaggacatgtacacagcagctgtgtgcctggccacacctgtcgggtggggtgaggagagtgcttctcccaggtgggcagagcctgctgcgctcaggctgggggctgg

SEQ ID NO: 36018 - DNA, 2300 bp, Homo sapien
aaccagaagaaatgggccttaggtgtggcaggagggagttaggttgcagccaagaaagaacactttttggaggtctttaaagaacaggtgagccttacctgtgcttaggaagtgagggttgcagaatcggctccatgggatggaggggccagtaactctgggtcccaccctggagaagggcagagcaaggaccttgtcttgagggatttattctcagatccaccaaagtagcctgggaacctaaatgacagttcccatcaggcagccgttttctgctcggagttcagtggagatgcgatggggttgcatggcagtggggaggcttccatgggcttctactcacccctcaccacagggagttcatgtagtcacccaccttggggctaaatagagtgccaggaatgatgacccttgaggagggctgaggacaggaatagaatggccacccaggagtgttgcttgttccctgcctgctgcctagggtgtactgggccaaggctctgagtgggcaggcctggctggccgcagcatcattggagatgctgtttccctacctccttccatcctgggtgcagcccaggacccagagccttctgtcccagttctcccaaaaagggatcagggccaggtaggtgaacacctgttctggtgcagcatgctcagcactggctgtgggcgtggccctagtttggagctggccacttgcctgttctgcaacagagagtggggacagaagttgcggggagaccctggtggggaagagggaagggtctggtctcacctgccccatcctagtggtggggatcaagacctccacaggtgggctcacatcctctggggtggtggcatcttctgactccagaggacctcacaagccgcctcatatccctggggaggctgagaggtgatacttccaaatttagctgaaaggcacagacttacccacattttaatcctggagttttagaatggtaaatccgaatccctttaggttacaaatgcagaaacagactaaggcaaaggcgatccctttctcctccaaggtcactctggttagaagggtctggagccccagttactagatgctgtcattgttctgccgccaagtccttaaagaatggcagaacatgacttaaaccacctgctaagtacaagattctatgctggagatgcaaaggtagctgtcctcaagagcactttgtcaaacaggtaaacttcagggcaacatgcagatgctggaaaagggtggatttgcctcaagagtctgtgcatgctttctaagatactcccctccttttcatcctctgatgcggggagggaaccctacctgaagaaacaccccaaggcccaggggtagatctagggtggagagatcacatatgggagggcccggaaagaaaaggaacagggttgtcaatgggcataccccaaacacctcacccagaaatgccctaaggccccagcccggaaatggacctctgctgccctctaatggtggaaaggcagcctctggagctacctgctggggtccccccttaaagaagaggagatgtgaaggacacttctgccctctccccttttattccccttctgtcttatgcttcatctcctgtggtctctaaagcagaaccttctctttttttttttgaaatggagtcttgctctgtcgcttaggttggagtacagtggcgtgtcagctcactgcaacctcaacctcccaggcttaagcgattctcctgcctcagtcccctgagtagctgggattacatgtgtgcgccacaatgcctggctaatttttttgtatttttaatagagacaaggtttcaccatattggccaggctggtctcgaactgctgacctcaagtgatctgcctgccttggcctcccaaagtgctgggattacaagtgtgggccatggtgcctggccccatctgttctcgagcactcctggctgccccatttcctgaccactgccctccatcccattatctccccagtttcctttgttgcctaggttccaattctggtaccctggttcctgaccctgccagagttctggttccggaaggccccccacaggtgccttgggcctagctctcacctgggcccagggcaacactgaagacatgggcaagagcatcccccaatacctggggcaactggacatccgcaaaagcgtagtcagcctggccacaggcgccggggcgatctacctgctctacaaggccatcaaggctggcataaaatgcaaaccacccctctgtagcaactcacccatctgcatcgcccgtgagtgtcc

SEQ ID NO: 36019 - DNA, 2300 bp, Homo sapien
cagtaatagtaagtaaagtcctttcctgagttctgggagccattctagcaaattagtagatctaaaaagggagttgtgggaacccccgaattcatagcgggccagtcagaagtcagacctatgattggtacctgaagtcggggggaagtcttgggggactcagcccttaacctgtgaagtctgccctaactatggatagtgtctgaactgaattgaattgttgaacacccagccagtgttgggaattggtgtcagaaaaaacgtggcagtggtagggagcttgtggggtagtgggggtccttctctttggggttgagagataccactagtgcctcaattcagtttcatcctgaaattcaaaggccttcatgaccctgctgggaatctgaccaccgttttcccacttatttctgggttacaaattcacacccaaacaaacttctggaacatgaccatttatcctatggcaattaaaggacttaaggactatagacatcctgcatgccccaccacgcatccctgggctcacctggattttgagcctgaattttctgatgccagagaaagctttaagtgtattcagagcttgggttttgacactgttgtccttgtcatccagcatgtagcccagcaacacgatgtcatccgtagtacaagcagaggcctggagtattggggagagatggaagaggcaggagaagcgggtgttctgggcccactgccccccatgtcaccaagatccctccgcacaccccccccccaccgctatcagccagagagaggtcccaggatatagtctggccattccaggggcagggatcggccgtaacccccaggggccaggccggctaggggggacctcctgcttcccttacctcagcctccagcaagtacacacagcgagtgatactgtgcaggatcatgctcttggcatactcatcctgtttgcactccaaagagttgaggagcctccggagctcacctgagtcccgcccgtgccgctctcgctcgactgccaggcctagacagccaccccagcccagttcaggctgtggactcagaagtgatgaaagaatggggttgggaagtaggggacagggacttggggacaaggctgccttgccttttcggagaagccttctcgccatatgcaggaccaccatgtacagttgaacgaatgtttactgcacaagggcaccctatctaatgttgtattgtccataacgtaccatcatagatttgtccatttactctaacaactgtctggcatatggcggtaacaagtagtatttcatcataaccagtatgtggcaatgatattccagcagatggcaataaagagtcttgcagaaggggctcattttcctactctgcacaaaagaacatgtggactagtggaagctctgggcatatagtaagtcctccaatcttccctttccttaaagcctcacgttcctagggcagaaaagggatggggggagctgccgacaccaagtttccaagaagtggaatcctgggagccagaggaaatgtagtatttggagacctgccagatgagtctgaggatccacttgagtgagatccagggaccctgagctagcatctctggcagggccttgcctaggacgctgcagggtgggcttgaggaagatggacaagagaaagacaaaggaaagaggaacttggaggcatcacctttgggccctcccacagcagaggcctcgggagcaggtgcctcctggggcagagccctctccccagggcccggacactcacgggcgatgcagatgggtgagttgctacagaggggtggtttgcattttatgccagccttgatggccttgtagagcaggtagatcgccccggcgcctgtggccaggctgactacgcttttgcggatgtccagttgccccaggtattgggggatgctcttgcccatgtcttcagtgttgccctgggcccaggtgagagctaggcccaaggcacctgtggggggccttccggaaccagaactctggcagggtcaggaaccagggtaccagaattggaacctaggcaacaaaggaaactggggagataatgggatggagggcagtggtcaggaaatggggcagccaggagtgctcgagaacagatggggccaggcaccatggcccacacttgtaatcccagcactttgggaggccaaggcaggcagatcacttgaggtcagcagttcgagaccagcctggccaatatggtgaaaccttgtctctattaaaaatacaaaaaaattagccaggcattgtggcgcacacatg

SEQ ID NO: 36020 - DNA, 2300 bp, Homo sapien
cagggctaagagttacgcagcagaaatgatagtagatgctaaatattccaagactcctttgaatttcccagcctcccttgcagaaggttagagggttgggatcatgtgactagttccagcaggtggtttgtgagtggagaaggcaggtcttccatggagaccttggatgctagtttttttttttttttttgagacagggtctcactctgttgcccatgctggagtgcagtggcacgatcataactcactgcagcttcagcctcccgagtagccaggactacatgcatgtgccaccatgtctggctaatttcttaaattttttttgtagcaatgaggtctcactatattgcccagggctggccttgaactcctgagctcacgagatcctctcagccgggcatggtgactcccactggtaatcccagcactttgcggaggttgcagtgagccgagattgtgccattgcacttcagcctgggcaatagcgtgagactctgtctcaaaaaaaaaaaaaaaaaaaaaaaaaaaaaaaaccaaaaaaacccccaaaacaactgatcctctctccttggcctcccgaagtgctgtgaatacatgcatgagccaccatgcccagccagaggccagtcttatagatggctacaggatggaagaagggtatcttgccccaaatcagactgtacataaagcattattgtgccaagccacgaaattccaggagttctgttgttacagccagtgttaattactctgtgacagctagtgttaatacagggagggctcacggaaataatggatacaaggccctctgagtgcggtgggggctgttattcttggctgttattccccaccaagacaggattcctcggttcatttcttaagcgaaacttcaaaagcagaagcaggctgggagtggtggctcacgtctgtaatcccaccactttgggaggccgaggcaggagaatctcttgagcccatgagttcaagaccagcctggacaacataaggacaacctgtctctataacaaatattaacaatacaaaattaaaaaaaaatagaaattaaaaaaaagcagaagcaggcaggtggggtgaggtggaagcttcatccatagggaagtcctgaggaaggcctgcctcccccggttccaggattgctctgtgcagctctagctctcccttaaccctcctccctattctgagttttcttctcttcccacttctccattttgcccccacatcttgactttcacacaattcacagacaaatccttagacaattaatagaatgattaagactgcaagagatttaagacttagagaccatcttgtcccacctcctggttcttacagaagaggagaatggggcctgcagcgggtgtgagcagcccagagggtggggctggattatcccgaaggtaaggggagaatctggggctgcaagggcagacagagaatcaacatcaggaaggaagctctttttatttcagcatatatgttttgtgccgtttataaaaataaagttttgaggccaggtgcggtggctcacacctgtaatcccagcactttgggaggctgaagcaggaccatcacttgaggccaggagttagagaccagcctgggcgacatggggagacccccgtctctacagaaatttttaaaattatcccggcgtggtggcgcacacctgtagtcccagctactcgggaggctgaggcaggaggatcacttgaacctgggaggcggagatggcagtgagccgagatcacgccactgcactgggcgacagtgcgagactccgtctgtaaaataaataaatacaataaaatagagttttatcttacaataaaaatagagttttatcttacagtttcaagcttctacttggaagtaacacgtatggaggctcccagggcccctacagtctggaatcccgcccgtgcgagcctgagcgcctttcctccctccttcccttccgcaggcgtcctcgccctccacgtccctcctccgccggggtggcctggggcgccgggtcacgtggccggggaagaggttttatcccgcggcccctcggaaccccgccgctgctctgccgcccaggcccatggccgcagccctggcgctcgtggcgggggtcctgtcgggggcggtgctgcccctctggagcgcgcttccgcaatataaaaaggtgagccggggagcgcgcccagccggccgcgaccgcaggagagggtggccccgccgccggggcactggagcccgaaggcgccgggcagcctgaaagggagaggtgggtccgg

SEQ ID NO: 36021 - DNA, 2300 bp, Homo sapien
ctaatttttatattattagtccatgaccatgttggccaggctagtctcaaactcctgacctcaggtgatccacccgcctcggccttccaaagcgctgggattacaggggtgagccaccgcgcatggcctaaagggtctttttattatcaccacttgatctgctctatctcatttagtcctcacaacaaccctatgaggggggttactattactgtccccatttgacagatgaggaaaccgagctggagaggttcattgacttgctgaaggtcacgcagttataagctgtagagacagcccaggtctgtcttactccaggcctggtactcttggttctggtccccaagaagtttaagtccccatccttcctgcatcctggtgactcccgattctcatacccactccctgcagaccaagggagctaccaacatcatctgcccttgccggatgggcttgacgtgcatatccaaggacttgatgtgttcccgccggtgccatatgatttagaggaagatgcaggctggtcactgctcccttggggccataggccctggttgccaccaacttgctccaaatccagctcctgagacattaaagtcacttcctgtccttggcctctgtctgtactttctgggcgaggggacctggtggagattgtaccagtccagggggcaggcaaaaggggagactggaggcatgaatgagcttctaatgggatttggccctgtccggaggtcagggtagaactgcaggaagggaatggcacagggagggtgtggtggagcaggggctgggtctgggaaagggctgattctctggttggagggctgtgtgggagagacgggattgaggaatgtacctggagagtgtatgttggggtgcctatggaggggtgtgtggtagggagagactaggtggaggtatctgaatgttttgcggggcgggttgtggggcacaaaagggtagagatcattagagagttggtgagaatgtgcaaagtataaatgcagaaatgcctgtggtgggaaagggacctggtgcatggatgcctccgctctctcaggtattgtcggttcactgcatggacaaagaaactgaggcccagagaagcgacatgacttgccctaggtcatatcattggggtagcagtgaggcctctttctgctgcaagtatcttaaaaaccaactcaaattggtctaggtgaggaggggatttactggtgatgggaaatgaaagtccagaggtcaggcaacccttaggtagggccagagccagcagctctcaggctgaattccttcccagtagtcacaaacattccaggtgtcacctaataacaggtaggatttattgagcacttcctatgtgccagacactgtgcaaagtgctttctttttcatttaattaaaaaatttaagacagcacccaggctggagtgcagtggctcgatcgcagcgtactgcagcctcaaccccctgggctcaaaagatcctcccacgtcagcctcccaagtaactgggactacaggtgtgtgacaccatgcccggccaattttttttctttttctttttctttttttttttttaatagagacagggcctcactgtattgccctggctggtctcaaactcctgggctcaagtgatcctcctgcctcagcctcccaaagtgctgggattacaagcatgagccactgcgcctggcccaaagtgctttcttaactgtattgactcatctttttgtcacaacagggctatagtaggtgttataattatccctattttacaaacagggtatcgaggctcctaaagtaagggttggaactgagacttgaacccagacaatcctgccccagaggccaggctcttaaccacaaatccaccatgtacatcaatactgtgcctttcagagaaagaaaacatctctgttccacaattttcagcaaacatcctaagatcggttctgattggattggcttagtctgcctgaactaattattgtggtggaatttgctgattggcctagcctgagtattgtgcaggatgggaaaattctgacggggttgggtgctggttttacatggtgttcccacagctgggaggacacccacatggtcggcgtgcaggatatttcgctggaccctagaaaagccaccacgacctgtgggccatgatgctaccccaatggctgctgctgctgttccttctcttcttctttctcttcctcctcaccaggggctcactttctccaacaaaatacaaccttttggtaagaaagctggagagtgcagtcacctccccct

SEQ ID NO: 36022 - DNA, 2300 bp, Homo sapien
ccttttagaagcacatacagtgtcaaagttctctttgctacacttcatttgtaatggaaaaaactccagccttttttctttgcaagcttggctgagaccaactagggacagggctgatggttttcacagctcccttcatggagagaaatcactcctctgattcctttgccagtctccatcttgacttgtgagaagggaatagtgattcccttctctgtggctcacctcacagaggtcctgggggtggggagcaggtagagaaaagagaaggaaggatcagagtgaactcataggaaaaagtgctttcaaacattgagttctataaaagagaggggggatagtgttctttcatcaatggtatttctgcatcgctggaaccaaattggtttttctcattttgagagtctcctggttgttcctccagctatttctctacattccacaccccagggatgtaaaggtgagaggaagggggtcatattacatggctgggcacccaccatgtgccaggcacttccgaaggtgttccacgtgcattgtcttaatcatgacctcaggaagtaggaggcgttatccccctaagataaataaggaaagtgaggttcagggagcttcactttcaataatgtgtctgaggccacgtagctccagtaaatgctgaattttgaagccagcttggtctggatcaaagctgtgcttgaggctgggcacagtggctcacacctgtaatcccaacactttaggaggccgaggtgggaagattgcttgagcccacgagttttagacctgggaggcttagggggaagattgcttgatctcaggaggtggaggctgcagtgagccaagatggcacaactgcacttcggcctaggtgacagagtgagaccttgtctcaaaaaattaaattaaattaaattaaaagctgtgcttgaggcctgggcctctcagtggagctgtcttctacctcctgggatggagaggggaagggcaggggcctctggctgccatgactagtccttcaggaaaagctgctctgttcccatgcctgagcaaactcaggcagctgtgcccttcccagcttcctgaggcccctgctccatctgaggctcatgagacctcttcattctcagccaggactagcgactgctcacgcgcgcacgtggccttgggtagggggcagcgtgagtggaaaccttaactaaaggggtgagtatctgatgctggaattgcagatagtaagtgaggtagaaaggaaaggggagagaggcatttaggaagggcctcctaagggcccttgagtcaggcctgcaggcagcccctggtgtgagggcagggggagggtgccaaagtgaaagcacacacaccctggcctgctgggggttgcagaactgtcagccccagggatctgggcatggcctggaatcccccgaggagactgaaggaaggttgaggggtgggaggctaggatcctcgtccctggagtctgacactgctagacacctgggcttgggtgggccaaaggcaaggcctgactatagtgaggcagagaggccccaagtacacagaatgtaagcaggcactcacaccataggtgcctctcttgccttggattcgtccaggcactgcccaggagctcaagacacaagggcagccacccttacccactgcttatgtggcatatgggaatatacaatataaatatattcttataattgtatataataatgtttatatatatgtaacacataaatgtgtattaattcaaccctcacaactctttaaattatccttagttgacagataagatgaaaggcagaatagttggaacagatagtaagtttgcctcactaataacttgtacacagtccatactcttaaccacgatgcaacacaattatcaccaacacacacacacacacacacacacacacacacacacacacgaaaaaggccaccaggtactcacccagtttccttatcaggaaccgccccacagcagattggccacagctgtgcctctgcccacggccagccctgtgggatgcaggtggatctcgtgaggtcagggccccttttatagccccatcaccacagctggctctgtctcccgccacccacaccagctgtcccactcaccatggagaagatcctgatcctcctgcttgtcgccctctctgtggcctatgcagctcctggcccccgggggatcattatcaacctggtaagagggtcttcaggggaggcgcctcctgagtccccagatgaagacttcctaagcttggaccttgacctctgatgtc

SEQ ID NO: 36023 - DNA, 2300 bp, Homo sapien
gaaggtggaggttgccgtgagccaagttcgcgccactgcactccagtctgggcaacaagagcaaaactctgtctcaaagaacaaaaaacaaaacaaaacaaaaaactagctgggcatggcagtgcatgcctgtaatcccagctacttgggaggctgagacaggaggatcgcttgaaccagggaggcggaggttgctgtgagccaagatcatgccattgcactccagcttgggcaacaagagtgaaactctgtctcaagaaaagtaaaataaaaataaaataaaataaaataaaataaaattgtacatacatcatccaattgtgtaaaggagtatgttcagaagggggaaactgcagagattaacaatggtaataataataatcaccaacatttttgagtactttctctttttttgttaaagcccagactggagtgcagtggtgtgatcatggttcactgcagcctcgacctcctgggctccagtgattctcccacctcaacctcccaagtagctgcgactacaggcaagcaccaccatgcctggctatgcctggctaagttgtgtattttttgtagagacgggagtcttgctatgttgcccaggctagtctagaattcctgagctcaagtgatcggactgcctggcctcccaaagtgctgggattagagaccactaatgtacctttgagcactttaaaaaaaaaattattattattattttttgaaatggagttttgctcttgttgcccaggctggagtgcaatggtgcgatctcagctcactgccacctctgcttcccggggttcaagcaattctcctgtctcagcctcctgagtagctgggaatacaggcacccgccactacgcccggcgtaagtgcatttcctgcatttaatagatggcgaaactgaggctccggaaggaaggttaagtccatggatggttacttagtaagtagctcattcaaatccaggcctgttgaaccccaaagtccatgtttttaagattgtcttgtctttccttagctccggacgttggtgttattattattattatttttttttttttgagacggagtcttgctctgtcacccaggctggagtgcagtggcgcgatctcggctcactgcaagctccgcctcccgagttcacaccattcttctgcctcagcctccccagcagctgggacaacaggcgcgtgctgccacgcccggctaatttttttgtatttttagtagagacggggtttcactgtgttagccaggatggtctcgatctcctgacctcatgatccgcctgccttggccttccaaagtgctgggattacaggcgtaagccccacgcccagtggaattttcctagttctttacactagccatgtatttacctataaaatcaggagaaatatgtatatatataatatattaaaacatatatatatttaaatggggaaatatgtaacaaacaaatagaaacaaggggagaaaggcattgtatttgacaaaacacatatgttcaggtctgagaaggctcataaagaatgttgtctgctatactttgtagttgcttctgttatcacacaatcagtctgcatatacaggcgttttatatatatatttatatagactacatatatacgtatattatatatgtaaatatttcactgtctttgaggacgggggccctgtcttttttatctgtggttttgcttagatgtcctccaacataatcttaacacatagtatgcttttagaaatcgttgactgaatgctaaggacgaaaaaccggtgaccagaaggcaaccaggaaaggctttgctgacctccggagtggtggagttggaggttctgggaaggcgactagggagccaggcaggggcggggtgggatgggatgtggacagcgcttttgcggggggaaagcgtttttgctgctggaattgagcagtaggaatgtgtcagtcacatccccaccttcccaattcttgtcatctcggttcaggaaggtgaacggtgttccgattccccgcggcgggggcctgtagtgggagctctgccccttccccgcctctgctgcaggccccgcccctcgcccggaaccccggggcgctggccgcggtgctgaaacggcgccctccgcggacggaggagggggcggggctctcgggagccgtgagccgggaagagggagacgggcagggcggcgccagcaggccctggtgggcttgggaggaggcaggagactggagacagcctcggctagagcggacacaggcacctggcaagctttccttgaccaaatca

SEQ ID NO: 36024 - DNA, 2300 bp, Homo sapien
gaacaatttatgtagttcaggtgtaggtggggaaagatgaataacactaaaaactaccacaaataaaaatgaaaagtaaattaaaaactagacaagtgtatgaagcaaaaaataaattatctctagtatataacgagtcctgaccaagtcatcaaatacggaagcactccaacagaaagctggacaatttacataaataatcaaaaaatgcaaatacctatgaaaagtttatgacctcaccagtaatccaatatgcaaattataacgatattcctgtggggagggggcagggcacaaactagcgattcataataggcctgttcatacattggtgtatacagaaaaacagtccaaccattctgctagttgtccagataagttaggcaatatttatttatttatttatttatttatttatttattgagacggagtcttgctgttgcccagacaggagtgcagtggcgtgatcttggctcactgcaacctccaaggttcaagtgattctcctgcctcagtctcccaagtagctgggactacaggtgcacgccgccatgcctggctaatttttgtatttttagtagagacagtgtttcaccatattggccaggatggtctcaatctcttgacctcgtgatccacctgccttggcctcccaaaatgctgggattacaggcatgagccaccgcgcccggtggcaatatttattaaaagcctcaaaaatgtgctctctggcccagacagttcaagaatctatccaagaaatgagataagtgtatgaaagcctgtgtaatacatcatgccattgccttaataagagcttatatttctaagtcttctgaattttgcacgtaccgtgcatttataatttgagaaaaacaaccacccctgacaaatcttctggaagaaagtgctattggatgtagggaaaaacaattaaaaaaaaaatgctgaaaaacagtattccaaaaatgttaatttggctgttaattctaccccactcccaatttaaaactagaagcaaaactatgaaccccacaaaatggcaagtgtgcaatttgtacactttcattgcatatttaaattaaaaaagcatactcaaccaatcttttcctccttttactcagggcagagcaatttggacaacaaatgaacagagatttttggaaacatgtaggttattaaataatttgtttattgtacggcatttacaaagaaaacagacaatgccctcagtagaaagaataaaaatgtatttagggctttatttttaactgacagcaaatagaaatcctttagtgagatcgtggcaatttgacagtattataattaagctcaataaaggtacatggggtacctggaagatcaagatctacagctgcctatttccacatctttcaatccatctggctccttaaataggggaaaaagcccttatttggtggagaagcatttccaaaatgaagttacaggttctattaaaacttactgtcacatcaactgttaaaatagggccttttgtgttttgttatttcaccttaatatcaccagaattcctgtaattccacaattgtgattttactatgtagaagataattcagttctagtctattgctttagatgtaaaaacagctgaaaacccaaagtggattagaattgctgaaggatttccctgccgttgtttgatacaatctattctcttgattcttgataggtgcatagaaagcctaacttaaaattctttctacaggaacatgtctgatttcaggagtacccaatgaaggatccgatgaatggctggccagttactcagagtaatatgtttatgagttaaatggattgcataacggcaccacttttcctttgtcactgtggtggataaatgacaaagtagattccaatctcctgtatagaaaggtggttacccaatagcctcactggtggcttgctagcagagcctcaagttgcacctctgtggctttctgtaaattcgagtcctacagccacttcgagaacgctgcaatccccaaggcccacttggtccatgctgaagaagcggctgtgaccccaatcctgcctctcttttgctcttcagtattacttactggaggaatatgtaatattctaggtcaagtctaggagaggctcatcctaaaaaaaaaattgcaaagtcttttctcaattaaaacaaaaaagcctcaagtacatctcaatcatgtcaaaattatggttaaaaattgacattatgtagggaaatagcagcagagaatggctaatcttaaaaaataacgaaccaaccaac

SEQ ID NO: 36025 - DNA, 2300 bp, Homo sapien
gatgaggtttcaccatgttggccaggatggtctcgatctcttaaccttgtgatctgcccgcctcggcctcccaaagtgctgggattacaggcataagccactgtgcctggcccatttattcttttattagacaaatatatgagcacctactaagtgcctaacactgtgtaggcactgagtttacatcaaggaaaacctaagcagggtctctacactcaaacagtttactttggggtgggcagtactttcccaattctgggatttttcctagctatcagctctctccctgtcttttctaaaccacacgcggttatcctgaactcacacaaccctcagagtctagggcttccctgtctgtcctaaccttccttttgttttcaactttacagcagggaatagactgggctgcatccttccttggccaacaggtactgtcttcttttgcaatatactcagacatgctatcattcaggttccatgcaacatatatcaattatctaaatttcaaatttggctaacctgcctttccagcctcaccttccatttcatcccttcagttgttaccagccccaatcctagcccccacctacaggtgtccacgtctgtgcctttttgctcaatgtattttctcattcaggaatgcctgacatctccttctccacctatagaaatcttacatatttcctaatacccagctcaaaaactgccttctctggatgggcttaattacttactttgctcaataagttctgccaaagcccccatgcttgacttgtgctgtactattgccctctcatcttcccttctcaattacttgttcagagcaaaggtcttcagagcttccactctgtccagctgcggtactttacaacatgggttggtaaactaagatctgaaataagaataaccgttgaaacggttgaaaaaagatcaaaagggcctggctcagtggctcacacctgtaattccagcaccttgggaggctgaggtgggaggatcacttgagccctggatgtccaggctgcagtgagccgagatcatgccactgtactccggcctaggcagcagagcaagactgctctctctgtctttctttaaccctcaccttcccttcaaaacctaacaaagaccatgtttaaatcaatagaagaacattttatgacgtgaaaattatatgaaattcaaatttcagtgtccatacataaatctttataggaacacagcccatattttctatgactgcttttgagctccaatggcagagttgagtagctgagaaagagatcttatggtccacaaagcctaaatatttactgtacggcccaaagaaaaactttgctgagcctgctatacaataagggcttcatgattaaataactgggtcgtacaccaagattctgaacatataggcaggccctcttaagtttagtgtctttgtgtaatggaagtaataactattttgcctttaagttgccataaacatcaaatgagataatgcacttagaaaataaaaacaaaaaaaacttataaacaagacagctttatcatgtattgaaggtggtagaataagaaaacattaaacgtttttattctcatttccccttctttcctttacagctttcacttaaacttgaaatttcaagagaaaattcacttttgaagtttttacttttcaagtgataatagggtcacaggttctttccttccagtctttttgtgttgctcccactcccttttctttctcacatgtaatttttttccattttctttaaatagtatctcaactgggctcacaatagctcagggaaggagaaactgggacatgcctgattaatccattttacaggccaggaaactgaggcagatcccagttgcctccgaagctctgactcagcagcatgcagagagccctgccgctctctgcgccttttctaaacaaatagaacaaaactaaccttgccaggtttccaagcttggatctctaacactccttcaacgttcaccccggcgttcctccccgctgcgccccctccctctccttgccgccccctcctcgggagcaggtggtaggctccgcgcccaacgcgcaagcgcgcggcatcgtggggcgggggtggggcgggactgagggcggagtgtgagcgggctcggttttgggccgcggcgggagcgggagtcgccgccactcgagtgcgcaggcgcctggcgattaccggtctcaccatggagcggaaaggtgagcggtggagcggcctccgccacgaggggcaatggtcgccggggcgaggcccgggtcagcg

SEQ ID NO: 36026 - DNA, 2300 bp, Homo sapien
ggagtgcattggcgaggtcttggctctgcaacctctgcctcccaggtgcaaacgattctcctgcctcagcctcccaagtagctgggattacaggcgcctgccactacgcccagctaatttttttgtatttttagtagaggtggggtttcaccatgttggccaggctggtgtcgaactcctgacctcaggtgatctgcctggctcggcctcccaaagtgctgggattacaggtgcgagccaccacgcctggcctaacctagttttatacaacttattttgtgtctgcctgcctttgtttccttaaaaataatcagaagaattttggagaaaaaaagtggcagaaaagaaaaggcctgatatagatttcctgtgctaatgaaaatagttttttctataacatcagcaaaggccaactgaagctagagccagaaattagatccagcaacaggctgacatgtcacctggctggagaggctttggggttacctgtctcagttccacagtgtctgaaatgtttgccatcagagctttctgagtttcagttatggtgatccattttcctgagtacttcctacactactctcatgtgattcagcctttccatatcaggccactcactttagctgtgagtcagctgggatggggaaagaaagaagcaggacgttgattgcattgctattattttcggcaatacatttataaggcaaatagcaatgagtagcgagagggaacccagtgggaaggtgtgttttccccccctacgtaaaaaatacagagaaaaattagagaatcattgctgaatggtcctttggtagattagaatcgagagaccccctcagttcttgcttttctgtgccattgttctgatttgtggttataattttgccccatcccctattcccatcgcagtgaaaatgacactggtttctattatttttattactagtggcttacaaaatagaaatttaccaatagaggatataatgagttcaagactatccagagaccattgggcttatcaaggaaactatgcttcttagttttccacctttattttgacaagtgagaatcactgcttaccaagagacactgagcccaaagtagtcaacccaactgggataggatccagagctgctatatacagccttgactcatgtttgtagctttttctttctttctttctttttgatggcactggagcagagagaaactaaagcaggaaaatgggaagtgattatctttgtgttttttaagatgaagctccactgaagctgctagatgggcagttacccaagcagcaaacaggagagtgaggggtgggaaatttacttacatgggaagtagggctgacactgaggagctactagggcttttctttccttatatttattttttttttgagatggagtctcactctgtcgccaggctggagtgcagtggcgtgatcttggctcactgcaatctccgtctcccgggttcaagcgattctcctctctcagcctcccaagtagctggaattacaggcacacaccaccaagcccagctaatttttgtatttttagtagagacggggtttcaccatgttggccaggatggtctccatcttttgaccttgtgatctgccggcctcagcctcccaatgtgctaggattacaggtgtgagccaccgcacccggccaactacggcttttctaaattgtgcaaggagaggttaaacttaggaggagatgcaaatcagattttaggagaattcagattcatagcacagagcagtggcagtaaagattcaaatgcccaggacaacgtggagcttttcagggagcatctttccattcatttagggagtatttattgagtacctagtatgtgtttagcactttgataagacttgaaaatgtcagttcaacaaaaatacacttggactgaactcaactccttttaagaaaaattgacatgcttctcaccaagcagaaggcctcagttgcagacagggaccaatacgttcctgatggtttctctccaactggctctgtctcctcagtttgcatctctggtaggcgcaggtgtgatgctgctcctgatggtgaagatgggacactttttctacacactgccaaatgtaagtagaactgatcaaataactaagtcaacaacgaccagggctctggattgctccttggtgtgtgtgtgcggggggtaaggggctgggggcgggggggcgggcatctccgaggagaattgcattcggattatccccaatggttgctccagcctatctctagtccctttcattcaagata

SEQ ID NO: 36027 - DNA, 2300 bp, Homo sapien
tcatcctattcgtaccactgtgcttccgtgttctccaagattaggtttctgtcattgccccctgctttctaaggacctgccttgcccaggctccccgaacagctttaaaaatgggttattgtaaaagagagaaatgaatgcattgcattctttttagaggaagtcaatggggccgtggagagagcctggattttggagtcagatggtcaggggaggttgaacctgactccatgcttcctagatgtatgtgaccttgggcaaattaattttgctctctgaggttctagtcttcatctggaaagtggggataagacaaatttgcccattgtgagaattaaattagatgctaatgggtgcctgtcacttaagagttcaaaaatcatcacttctaccccaagacccaagtgcctgggcaggtgttcatcatctgctattctacttcatggagccccctgtacatggagcaattgatgcctgagggtctgcatgttgattgtggctgtggctatggaaactcacatggctttgactctctggagagaaggcacagtcagtctttgctcaagaaagcctggaaaagtgatggaaaatctggtcagaaaaacaaagcatgcatgagatgtaaaacatgcagacagtgcttgctgtcatcagaccctgttcaggcactgaggctgagctctgagagccatcgagcatcttcctgaggcgcaatgccacagaagatggtcctctgatcccaaaacccattcctatgaatgtgcagccaaggggaacacaattattggcaggcctccaaccctctctgagcagctaattttatgggatttggtgtctagtttgtgctcattttgacttaggatttttgttgttgttgttgttgttgttgttgttttgagatggagttttgctcttgttgccctggctggagtgcattggcgaggtcttggctctgcaacctctgcctcccaggtgcaaacgattctcctgcctcagcctcccaagtagctgggattacaggcgcctgccactacgcccagctaatttttttgtatttttagtagaggtggggtttcaccatgttggccaggctggtgtcgaactcctgacctcaggtgatctgcctggctcggcctcccaaagtgctgggattacaggtgcgagccaccacgcctggcctaacctagttttatacaacttattttgtgtctgcctgcctttgtttccttaaaaataatcagaagaattttggagaaaaaaagtggcagaaaagaaaaggcctgatatagatttcctgtgctaatgaaaatagttttttctataacatcagcaaaggccaactgaagctagagccagaaattagatccagcaacaggctgacatgtcacctggctggagaggctttggggttacctgtctcagttccacagtgtctgaaatgtttgccatcagagctttctgagtttcagttatggtgatccattttcctgagtacttcctacactactctcatgtgattcagcctttccatatcaggccactcactttagctgtgagtcagctgggatggggaaagaaagaagcaggacgttgattgcattgctattattttcggcaatacatttataaggcaaatagcaatgagtagcgagagggaacccagtgggaaggtgtgttttccccccctacgtaaaaaatacagagaaaaattagagaatcattgctgaatggtcctttggtagattagaatcgagagaccccctcagttcttgcttttctgtgccattgttctgatttgtggttataattttgccccatcccctattcccatcgcagtgaaaatgacactggtttctattatttttattactagtggcttacaaaatagaaatttaccaatagaggatataatgagttcaagactatccagagaccattgggcttatcaaggaaactatgcttcttagttttccacctttattttgacaagtgagaatcactgcttaccaagagacactgagcccaaagtagtcaacccaactgggataggatccagagctgctatatacagccttgactcatgtttgtagctttttctttctttctttctttttgatggcactggagcagagagaaactaaagcaggaaaatgggaagtgattatctttgtgttttttaagatgaagctccactgaagctgctagatgggcagttacccaagcagcaaacaggagagtgaggggtgggaaatttacttacatgggaagtagggctgacactgaggagctactagggcttt

SEQ ID NO: 36028 - DNA, 2300 bp, Homo sapien
aacctaccctctttttgttttttatttttcttgttgtagagacaaagtgtcgccatgttgcccaggctcatctcaaattcctgagctcaagcgaccctcccacttgagcctcccaaagtgctgagattacaggcatgagccaccacacccaacctaattgtggtttttattataaaagacgaacatctcaaatagtaaaaaagtgtataaattatcaaatattgtccccaacatctaaccccattccccaaaggtaattcctgttaatcatttgaggtctatccttttagatcctgtgtgtataaaattttattatatactatataacataaattttacatatgcatattgacatgtaaaataccttttttattttccttcaggatatgcataatcctgaaaacataaataaattcaatttaattattctcagtaaagataagagtcaaaggccaagaagtttgagctcgatcccactgttttgaaattctcttctcctttgtgaaaagctgcattcctcagaggaatgttaacatctcctgaaaagggctatcaaagcttctaatgaaagaggtttaaaaaggcaaaggcaggccaggcacagtgcgttcatgcctgtaatcccagggttttgggaggccaaaacaggagaatcacttgaggtcaggagttcgagaccagcctaggtaatatagcaagacccccccctccaatctctatcaaaaaaaaaaaaaaaaaaaatgcccagtgtgagcatctgtagtcccagctatttgggaagttgaagcagagaatcccttgtgcccaggagtttgaggttacagtgagctatgattgcaccactgcactccggcctgggcaacagagtgagatcctgtctcataaataaataaataggcaaaggcttgttctgatcaccttgtccctgttttccccaagtcaacctagagagcagtagattctagggcaagaacttaagtgagctgactgctcacaaagaaggaaaggagtagtgtgagctagcacttgttgggagcctctgatcaacatacaaggacccgtgttatcaacttctgttcattagggaaagagagttacaagagttaccaaaggggcctatcttaacttttctattggaaacccttcttttcctggagagtgccattggtgccattgctggattgaagacattctaccccactctggttttctcttctctgcagctaataatgggcgtattgggtttgggcttcattgccacttaccttccggagtctgcaatgagtgcttacctggctgctgtggcacttcatatcatgctgtcccagctgactttcatctttgggattatgattagtttccatgccggtcccatctccttcttctatgtgagtaatttcaactcttacccagagttacaaatgccactcctcttgcctccaaagaaaagtggagctcagtagggagactcccgccccttctgaaaggagacacagcctataggcagctcagtcaagagggtactagaaatattttcctttattggagaattagggtcttgattaattgcagatgccagttagaccatgctttcagttgactaaccatttcagctcagccttttaaactatcatgatatacattaaaatttggcctttaagatattgtatctatcacagttcttctcattacctatcttataacagacatgtatcctaaaacatctaaaggatatacaagactaagtagttcctaaatgtaagaatagggtaggagctaagctacagtatattatttgggaaaactaataactattggcttataaacagaacttctagggcctgttcattatactaaaacatacagtgtattctctccttattcttattgagcattactgtccctctttttacaaaattggccacccccaccatgcttgccctcactgttctagtaatacccataaagacctttgtacccagaaactctacttggggacttctttttgggttaatctacagtgtcaatttctagacttaggcaattactacatccctttctaagcctccgtaattttattttctttcaggacataattaattactgtgtagctctcccaaaagcgaattccaccagcattctagtatttctaactgttgttgttgctctgcgaatcaacaaatgtatcagaatttctttcaatcagtatcccattgagtttcccatggaattatttctggtaggtgtttttgatgtctcaaattcatagtttgcataattttagtattttaaaaaaatgc

SEQ ID NO: 36029 - DNA, 2300 bp, Homo sapien
cctgcatcaaagctgaggctttccaggggctgggctcagtggctcacacctgttatcccagcactttgggaggccgaggcgggtggatcacgaggtcaagcgatagagaccatcctggccaacatggtgaaacctcgtctctactaaaaaaaatacaaaaattagctgggcgtggtggcacgaccctgtagtcccagcttctcgggaggctgaggcaggagaattgcatgaatccaggaggcggaggttgcagtgagctaaaatcgcgccactgcactccagcctggcgtcagagggagactccgtctcaaaaacaaaaacaaaaacaaaaacaaaccgaagctttacattaaaactctcccagttaaacttacatgcagaaaaatcaccctgggagtttaagatgcaagttcccagaactcacagggagtctaattgggtaggtcagaggaggtcttgatcaagagcatgcatttttataatacatcttaggtgattctgattcaggaaagtctctgatatctccctttgagaagcatttaaaaaaccgttacactgaagatttgaaactgactcctatcctgaagagccatcagtgaagaggattttaagcatttaactcaggcctcttcgagtaaggagaatagggcaggagtctcatcgaatttaggcaagtcaactgacctttcctgaacctcagttccagcttctacgagagaattcctgccctgcattcccgactaacagagtcatttgtaaaaaccaaacaagataaatgtgaatgggcaaggcattctaaccccatgcctacatccattatcaacctatgcctatgctaaagcttgttacaatgagcagaagaatcagatcctgtctcattctcttagtttcttgtattagaaataactagatccaagccaggacatttctcaacatttcccgtgattattctattttgtgtcatacacaccttggagggctcagactttgcatatcttgtcccaacatctagcacaatgtctagaacataaaacatgtgtcataaatatttgttgaaaaaattatgaacagtgaccatgatttcaagtggtacagtatcctcagtcctcttcaaggaaagcaatataaaaccaaaaaacagatagtcatgggtgattcatggaaagctgttttggatccaatgtagcttaggctggaattctcttatctacaaaaacatgttgcttgagaatgttccaaactagggaggataggaagctttctaagaagtaatggagggtgaaggggaagtaagagcaaaaacatgattgtgaagacatgagggatggggttggggggatcaagggaatgagggaatggttacaaagggtgaggaggaagcttggaagtaggaatcctcagaaatgcacatttttatcctacaaattgggatgatgaggtgagggtgaatgaaagggtaaagataaagtaagcagtatattcatacactcattcaaccaatgtgtattaaatgcctactaggtgtcaaacacttgcagtttaaaagtgattaaaaactacagttgctgccggtgtggagcttacaatcaatgggagggcaatcattcaacaaaaattaattgaatacttcctatgtccaccacactgctgtaggcactgataataaaacagttaatgaaagggataaaagtccttgccctcataggggtaagatgatttacaaaaaggaatacataaagtgcattataaggtagacattaacacagtcatcaaacaaacaagtgtaaaactgtaactgggccaagcaggaatacaaggtggagtgagagacagtgctagggacagggatagggtgggaggagggtaaagggagtgagtgcagatggcatgtctgcatccagagcagatctgggcaggagggtgtcattcagtggggagagccgggtttgtggggcagacagcctatggttggagacctgggtgaccctcctagcctccatttctttttacctcttctgacctgaggaaggcttaagtcttccggagacgttagtgaattaccgtctgtgcagtacacatgtgacacatgtgcactgctgtatgttcaggacacgaggcctggcaccaaataggccctcgatcaagaatagcaaaacctcggagagagaaggagccttggtatacaggtttaccaaataccaaggggatcccacgactcaggtatgaggagggcgacccaggtaccactttcctggctccctagcccagctgctcatgctcctcttcctcgtcccctcccc

SEQ ID NO: 36030 - DNA, 2300 bp, Homo sapien
ccccttcaccctccattacttcttagaaagcttcctatcctccctagtttggaacattctcaagcaacatgtttttgtagataagagaattccagcctaagctacattggatccaaaacagctttccatgaatcacccatgactatctgttttttggttttatattgctttccttgaagaggactgaggatactgtaccacttgaaatcatggtcactgttcataattttttcaacaaatatttatgacacatgttttatgttctagacattgtgctagatgttgggacaagatatgcaaagtctgagccctccaaggtgtgtatgacacaaaatagaataatcacgggaaatgttgagaaatgtcctggcttggatctagttatttctaatacaagaaactaagagaatgagacaggatctgattcttctgctcattgtaacaagctttagcataggcataggttgataatggatgtaggcatggggttagaatgccttgcccattcacatttatcttgtttggtttttacaaatgactctgttagtcgggaatgcagggcaggaattctctcgtagaagctggaactgaggttcaggaaaggtcagttgacttgcctaaattcgatgagactcctgccctattctccttactcgaagaggcctgagttaaatgcttaaaatcctcttcactgatggctcttcaggataggagtcagtttcaaatcttcagtgtaacggttttttaaatgcttctcaaagggagatatcagagactttcctgaatcagaatcacctaagatgtattataaaaatgcatgctcttgatcaagacctcctctgacctacccaattagactccctgtgagttctgggaacttgcatcttaaactcccagggtgatttttctgcatgtaagtttaactgggagagttttaatgtaaagcttcggtttgtttttgtttttgtttttgtttttgagacggagtctccctctgacgccaggctggagtgcagtggcgcgattttagctcactgcaacctccgcctcctggattcatgcaattctcctgcctcagcctcccgagaagctgggactacagggtcgtgccaccacgcccagctaatttttgtattttttttagtagagacgaggtttcaccatgttggccaggatggtctctatcgcttgacctcgtgatccacccgcctcggcctcccaaagtgctgggataacaggtgtgagccactgagcccagcccctggaaagcctcagctttgatgcagggttaacatttgcctttgggacatatttcgtcagcatctcaaagagtaacccatatgtccttgagcagatgggaatgcaacagccttctggccggaacctgtctctttctttctttctttcttttgagacggagtttcgctcttgttgcccaggctggagtgtaatggcacgatctcggctcaccgcaactccgcctcccgggttcaagcgattctcctgcctcagcctcccgaatagctaagactccaggtgcgcgccactacgcccggttaattttgcatttttagtagagacggggtttctccatgttggtcaggctggtctcgaactcccgacctcaggtgatccgcccgcctcggcctcccaaagtgctgggattacaggcgtgagccaccacgcccggccacttgtctcttttttatgcaagtgttttttggaatttgggggttcaggtgagcaggtgctctgctgctggtaactactcgcagttaaagatcttttgactctttccccgacacgctatttgtcagtgtcgttttccaccacagagccaggtatttgccccgccggccacggtgaggcgcgcgaggcgtgtgctgccagcttctctcttccttccccggtccgccttcgcgcccttaaggagacagtccctgggagtttctgcctttggtctccagttattgttctcttctcgcgagaactgctcctcccatcctcttctctcacgaagccccgcccgcggagaggttccatattgggtaaaatctcggctctcggagagtcccgggagctgttctcgcgagagtactgcgggaggctcccgtttgctggctcttggaaccgcgaccactggagccttagcgggcgcagcagctggaacgggagtactgcgacgcagcccggagtcggccttgtaggggcgaaggtgcagggagatcgcggcgggcgcagtcttgagcgccggagcgcgtccctgcccttagcggggcttgccccagtcgcaggggcac

SEQ ID NO: 36031 - DNA, 2300 bp, Homo sapien
aggaccccaccccaacttcagaatcaaggtaccttgcactggtgccactgatcccaaaggtccaaaactcctgcagcactcacaggcaagcgaccccgttccttaggctctcatggggtctcagggccagagtagggggtgggggagggaaaaggctggggaaaatatcagataccccagggcaggatggactgagggagacatggttggatcagtagacatgtccttatgatgtgggcaaggccatttcctttgaggagcaattctgtcaactctaggccaccgcatagcctcgcagccaagagcagggactctagaatcaggctgtacttgctttcacccagctctgcccttaccagctgtgttaccttgggcaaattacttagcctctctgtacctcgggttcctcatctctaaaatgaggataatcatattactgactcacaggcctcttaccaggattaagtgagttatataaaacacttaatgacgggcacatggcaaacacaagtgtgtattaaatgactcttttacatctaatgggctgactcctccattcattctccacacatttgctgttatattgccatgtgccagaaatgaaaaagacagattgcctgactgaaataatggcaggtgttgttgtgtgatgatggcaccccaccctcatctcagaatgatcttccaggctgtgcctgaggctgcaggactgcccgggagggcttggggcacagagtttgggggctgcagactccctagtgtgggcccccggcttgctgtaagcccctagcaaatttctttccttgttcaatagaccttctttttgacaaagtgaagcaggtggtccccgccccttccacagccccatgcctgggcaagagaggggttggacaagtcaggctgggcatccagagcccttgcagccatctcctccccccacctgcccaccttgctcctcagaggcctttgtggtttgagcaaagaatctccatcaggctgcacaggccaccagacaggtggcaagggccccaattagtcattgtcctcatagagccttaggaagtccacagaaactgtgttcaaaactgcacatttgggccaggtgcggtggctcacttctgtaatccaaacactttgggaggctgaggtgggcggaccacctgaggtcaggagttgaagaccagcctggccaacatggtgaaaccccgtctctactaaaaatacaaaaattagctaggagtggtggtgtgcacctgtagtcccagctactcaggaggctgaggcaagagaattgcttgaacctgggaggcggaggttgcagtgagctgagatggcgccactgcactccagcctaggcaatagagtgagactccatgtcaaaaacaaacaaaaatcctgcacatttgaacctgcgtggatatttggtattatagaattagtgctattaattttaggtttaagaatgtattgtgggccaggcgcggtggctcacgcctgtaatcccaacactttcggaggccgaggcgggtggttcacgaggtcaggagttcaagaccagcctggccaagatggtgaaaccccatctctattaaaaatacaaaaattagccgggtttggtggcaggcacctacaatcctagctaatcgggaggcggaggcagagaattgcttgaacccgggaggcggaggttgcagtgagccgagatggcaactgcactccgacagagtctcaaaaaatatatatatatagtattgtggatacgtacttttaaaaatccttacgttttagagatacaaaaatatttatgaataaaatgatatgacgcctgggttttgcttcaaaacgatggtgggagaggaatgtggatgaaataaaattgattatgagttgtggttgctggggaattggggtcacgggggttcattagaacctcctatcagatgtggttcagaagcctcagacctgggagctggctagaaatgcagaatctcggctccaccccaaacctactgagtcaggatctgtattttaatcaaataaaatgcccaggggattcctgagcacactgaagtgtgagaagcgctggcttactctgttcaattctttcctgcatgtttgacattttccataatgaagaggttgtggggttttgttctgctttcctgtgtgttcacagtcacagggagctcttcctacggagaccggggctggagggaactgggaagcactgcctccccgctcctgcttggacccaccagccccgccgctggcccgcgctcggctgggaggcaccggggtcc

SEQ ID NO: 36032 - DNA, 2300 bp, Homo sapien
ttccatcacagggaactggttacgtgtgcagttatgcttgtagaaaccaattccaaatgtcaaaaattaaagtgagggcaactgtaatgatatcattaaaaaagtagaagttgaaaatggaagagaaacacttaggttgaataaggtcttaatatgaaagctttgaatagaaaaacctgaaaaaaatcacatgcattaggttgacttaaggccttttcaacagcatttaaatcgttgacttacaagtagaaaccaatgcattttctcaaggtatttattcattcattttagtggaaaaagatagctcctgatcacgcaaatgggaattgtgctaaataaattttgagaacatccatcaagaaataaaagttactagtcatatgtataaatgattattatatttcatgttttaatagtttctgttagttttcagactttttttttcttaactacaagtactgtaattgcaatattttcttgcctctggggctttctcttccacaattaatcatctttttcttccacaccttccctccaaatgattattccccctagcttcagaacacttgacattaattcatactatttcatcttcacagctttcaaaacattgtcctgcccttgcttagctccacgagccaccccccttgcatttaaaaaattggttaacagaagcatttttgtactatctctttgccagaagatgctatttacttggaaacaaattagcttccttaatcaaacttttgaatttgaaactctctatatttaaattccttagtataacatctatacttccaaagtagcagtatgttcactttaaacattcagaaaatttggatcctaagactttatccttcatccttctgactctagaatacatgtccttgatcatcagaaccaagaaagaaattgagtctcaccagctacaccacaagtgccagcagaggaaacactttcaaactgtcactcaccttcacatttacaggcagcttatccatacgtcctttataaacatcattatgtattggtgcttaagacttcagtcacatgaggtaagctttccagtttacaggcaaaagggggtggcaatggagcccttttctttatttttttgtttttttagatcaaaacaaaagccagtttggtctgatgctgccatttgtcaagcatcttttagaaagccgcctaatgcattaaattaaccaagtcaggtttaaagtgtttcccatgcccacagtgacagacgagttaccaggcatgcttaagcagactgtcaaacttttgtttactccttttaaacggaaagtcagattttttttttttttttttaaaagatgtgtggtgcggaacaagacgctcacctgtacacaacaaaggcaggtctttcccggctgtcctcactgggggaggggatggacaatcgctagacctttgtcctcaggtcctgggcatgggggttaggggagacgcgactttctgggagtcgtgcaggcacctgcagtcaagaaactacatattggttttgacctcaatgactgccctggcttaacctttggagaggccctttagttcggggagggggcttgctgctccaaaccgtagccacgtcacccacaaggactggggaggaaatgactgaccgctcaagagtcagggacccctgtctctcccaactagacccgaacgtccacagccctcttatcgggctcgccccgtggcgggcagggccgtggtgcgcagggatcgcggcgggcgcagacccggtctcttgctcggtgtccccgccgcgcccgcaccgccaccgtgaggccgagccggggatggtgccccgtggcggcggcggcggcgcctccgcgctcctctccgcaccgccccggccgccgccgcgccaggcacgggcggggggatttttttcccgtttccccctctttcgcgctctcgctcctgttcagcgggagagcccgcagagtcagggagggagcgagggaaggggtggaggtggcggggggaggccggaggggcggatcctgcctgggggctgatccctccctcccctcggccgggctccgtggcggcagcggcagcagcggcggctccattccccctcctcccccgggagcggcggcggcggccgggccggggccccagcgcgggccgggagggggcacggcggaggccacggaggcaggcgcgggagaagaccgcgctccgcttcccgggccgcgccgacctgctcggcggcctgcccgcccgcgcccaggggccccgaacggtggggccgggcaggcggctgaggt

SEQ ID NO: 36033 - DNA, 2300 bp, Homo sapien
gattctcataaggagcatgcaacctagatccctcacatgcgcagttcacagtagggttcgcgctcctatgagaatccaaagcagccgctgatctgacaggaggcagagctcaggtggtaatgctcgcttgcccgccactcacctcttgctgtatggcctggttcttaacaggccacagtctgcggcctgggggttgggaacccctgatccaggatacaccaactagtacatttccaggcagaaacaaaccctagaagctctgagagtggctccaagagatctctgaagttatagtggcctgtctaggaccttcattcgaccgaaggccaagatgatctgggcagtatctgaggtaaactctcaatgcattctgttacctcaaaagtctctcccagaacactcatatctagtctatccttgtacagccaagagaaagtcctagtttcccccatcattctctggatgacaagctcataaggagctgcggtaggcagttaccaaggctgtcaccaccaggagagacctttggggatacagggccccatggtgtgggcagacttggaaggatatgaacaaagagaagatttcaaagagaaaaacaattcatcgccttggttgcagggtctaccatctatataaagtagagacggtgataataaaagcactttttccaaactacaaagccctcttacttttaatatttctcacaactaccttaggagatggtgtagctattatcatctacacagaagctcagaaagatgtcactcaacgtaaagctagtaagtgataacgctacaatttgaacccaggtcttccgatgctcaattcctctcagtgggaattaagaacaccacagaggtgctatggtctggtacaaaacgaggctctggggcaatctaggttctaatcttggccctctgtgacctagagaaagtcccttaagctctctatgcctccatactccatcagtaaaatgagggtaacacaatctagctctctaggtgctacttgttaataaggtattattaacatctttacttgaaaggccttccaatcccaaagtgtgactgaaacaaacaaaaaaccaatttggctgaggagcagtgccaggcgggctggcacacaccccatttggagccaaaggaaacagaatcatcgcagcaattctgtccgggttccagaggcccttggctactggattccttacaaatgccaagtccctgggggcagacagggccaacagacctgcttcatcacccacccctccaaaggcaccgaggccctagaagaggtgagaacatctgcctccacaccgaccccaaacagcgcagacaggcggtgcggcgcccactttcatgaaagccgctccatcttctccttccccacctgccacctcctcggctgctcaagcatctctcgaccatgcaagactctacacagacgtgttttgtcccacccacgcctccagacaccggggagaaactctagagggggaagggactgctgatgagggaaatgaaaagagtttcgcccacaaggagcttacagtctagacgagttttttggcgggagtttctcaacctacacagcccttcccacatacacacctccaaaatatctccaacaacccccgcccccccagatttcccctcggcaccccctgacccctcgctcacccaccccatccaggtccccgaagaatgaggagcttctgcaattagactgtatcccctgcacctcacacaagatactcaggagacaaggaggaccccagccaaggctcctgctcctttaagggggcacctcttccagaagaatcttgacccctcggagaagaaaggagggaaataacatctcctcagaggggaggggcgagcgcaccagagacagcctgacgtggagtccgaccctcagacagagaaagcgagcgccagcgaatgagcggggcggagaggcgagaacccattggctgcgtcacctgcccgtcagagggacccaggggacctagggccgctcaaggggcgggactctcgtctggccaggccaattggaaggcgtggcgggggcggggcttagcggctcggaatccagggctggggggggagacaagatggcggctgcgggagggggtcctcgcttctcagctcccccgctcacccgccttctccttccctgccgccgccctcgctccaggagagagctttcgcaccgcccccgccctgctcggaaagccccccgcttctccggtttccccccgtgcagtccctggtccccgaaggccccgatgcccccgcccc

SEQ ID NO: 36034 - DNA, 2300 bp, Homo sapien
agctagattgtgttaccctcattttactgatggagtatggaggcatagagagcttaagggactttctctaggtcacagagggccaagattagaacctagattgccccagagcctcgttttgtaccagaccatagcacctctgtggtgttcttaattcccactgagaggaattgagcatcggaagacctgggttcaaattgtagcgttatcacttactagctttacgttgagtgacatctttctgagcttctgtgtagatgataatagctacaccatctcctaaggtagttgtgagaaatattaaaagtaagagggctttgtagtttggaaaaagtgcttttattatcaccgtctctactttatatagatggtagaccctgcaaccaaggcgatgaattgtttttctctttgaaatcttctctttgttcatatccttccaagtctgcccacaccatggggccctgtatccccaaaggtctctcctggtggtgacagccttggtaactgcctaccgcagctccttatgagcttgtcatccagagaatgatgggggaaactaggactttctcttggctgtacaaggatagactagatatgagtgttctgggagagacttttgaggtaacagaatgcattgagagtttacctcagatactgcccagatcatcttggccttcggtcgaatgaaggtcctagacaggccactataacttcagagatctcttggagccactctcagagcttctagggtttgtttctgcctggaaatgtactagttggtgtatcctggatcaggggttcccaacccccaggccgcagactgtggcctgttaagaaccaggccatacagcaagaggtgagtggcgggcaagcgagcattaccacctgagctctgcctcctgtcagatcagcggctgctttggattctcataggagcgcgaaccctactgtgaactgcgcatgtgagggatctaggttgcatgctccttatgagaatctgactaatgcctgatgatctgaggtggaacagtgttcaccacccaccctcatctgtggaaaaattgtcttccacgaaaccagtccctggtgccaaaaaggctggggactgctgtcctggatggtgtcttttgtagggaataccctgcatactgtagtttgaagcccttagaccatgtatcatagatatttcagatgccttcaccccttcacctctaggcagggtcaaggagtagggtttctgatcgtggtaagaggtattgggagaagactctagtgacttttgatcctctgatggggcccattgttcacgtacagagcttgacagtggatgcttttcttgttttcttttctaaaccgttaactacatgtgttttccatagttagctgtcgcccagctttatgtacatcattagaacattagatctttccccatgttacactgtaataatctgtttacttttctgtcttttgagttagacagggctccttgagggcagggatcatgtgtgtttgatttcttctttcattcaactaatacttattgagtggttacttaggagctaagcactgctccaggaactggggatgcagcagtgaacaagacaaacaaaaattcttcccctcatggagcttatattctagtggaaggaaggaaacaataaacatagtagtaggtaaattatgtagcatggtataagatgatgaatgttaaagggaaaaataaagcagaatgaaaggtagattgctggtggaggaaaaggatttgcaattttagataaagtggtcagagaaggtctcactgagaagtgttgttcacttgaagaaatgaaagactcaaaggaagtgaaggagcaagccatgtggatgcctgaggggcaagttgttcagacagagggaaaagccagtcctcttggtggatgcttgatcatatgggaggatgaatgggtgcataagggcatccaactcatagtctcctggccttctctccttaggcctgtcccctcagttcccaggtgccatgaggaagcctcgtcggaagtcccggcagaatgccgagggccggcgttccccgtccccctacagtctcaagtgctcacccacccgggagaccctgacatatgcccaggcccagcggattgtcgaggtagacattgatggacgcctgcatcgtatcagcatctatgacccactcaaaatcattactgaagatgagctaactgcccaggatatcaccgaatgcaatagtaacaaggaaaacagtgaacagcctcagttccctggcaagtccaagaaaccctcat

SEQ ID NO: 36035 - DNA, 2300 bp, Homo sapien
ccaattgtggtggctgttagccattagcaactggagttgctgcatgtttaatgttttctgctcctaatttctcttattttaactctttagttctttctccccctttacctgttctattctttctgtctttaagtgttcccacactgctgctccagagatgaagcaaagctttatgtgagtctggtgccttctgcattctgtctgatctcacttttgccttttataactaaactcctgaagtataagcctgtatctggcccgccttgaaccttttggtccacctgctccactgaagcctcccctaaaacatcagctaccttctcccaggaagtctttccttatattctcacctgattgatcattgggctgcatttgacaccacaaatgactttgtctaagagcttctctgtgataccacttccggctgcttctacctctctgactgtaccctatgctgatcccacttcttgctctttaatggtaacattcccagtggctctgctatctgctcgtttgcttggagaacatgtccaatctcataattgacaataactgtaatagcagctccagactttttgtcttgtcctcatcccttttttctgccatcagtccctcagggatgtttccatgtggatgttgttaatttgtaactcaaatattggaaattaattatcttttttcctctcagtaaacttatttccccatcattatggctctcccctccctcctggactcatatcaaaagttccccaccttggagttacttttgactctttactccctaagggccatttttaatcatcctttaagctgctttgggggctttatcaacatgggtttttgtcttcattctgcagctctcctgctcatccatgccctcttaatctcagcaatagctttctaggtgatctccagcctctaattctttctttgatcttcaactggtagtttcttattcacatgctgttgggatcctccatggccaagaggttgtagagggagggtgctgcctacatctgggcaggtgtgcttggcatggacattggtggggatctgtcctttggggaaaggcctagttcttgattttataagcttggctttggggcaggaatgtctgactgtggagaggagcaaggcctaggtgagcaatgtcctgctcttccattctcttacttcctcttccagaatatactcctctttctaggcaggcgaagttaaggctcttttgccttacatttgaagcttcttattagctgtatcctggatcttccttggcttttatagttctccagcatctctgttctggccagcctgtttcacttactaagcaaagaatcactaattctgcctctatatttctgcccctttcatccctttggttccagaagagaccttccttactactttgcccatccatgtctgtcacctacctgtatgttaaactctagtaagagtcttcaccaggaagcttctctgatctaacctccacctactcagatcttctattttgtatcctcttagcattttatttccagtttatattattagtttgtattatctttatgctaatatgcccttgtgcttcaagctctaggtctcttcccttcccctgactccaactgtaattttttctagggcaggaatcgtgatttgtttgttgttgttttaccagagtatattcaggcttatagtaagaaccttgctttgttttctagccaagtgaaagctctagggtgaaattcttttcacccctgaggtcagttttcttatgaaattctttctgacccagagggccatagctgctctctggcatacctggggatagggggaagcagtcccagatcctactccagcaaaggttattgctttataatgaagaaacagtgctgtaatactggggcagctcaggaggaaggcatggggtagagaggggtggaagggctcttggaactgtgggtcaaggaaggggacaagacttttacctgctgcagccccgtgaggcttgaacagggagaggacttttgcaagaaggaggttcctagtccctcttctcttccctcctgtagcgagagcaggatgagaagacaagtgcagtgaaggaggagctgaagtattggcagaagctccggcatgacttggagcgggcgcggctgctgattgagctgattcggaagagagagaagctcaaacgagagcaggtaaggaggagcccccagccctagggccctagttcaaggccactttctcccactattagtctagtattgggaaatctgggagcccctgccttatgctaggtt

SEQ ID NO: 36036 - DNA, 2300 bp, Homo sapien
agcagaggcaggaggataggttgagtccaggagtttgagatgagccagggcaacaaagcaagacctgttctccacaaaaaggggaaaaaaaaaagatgtttctttctctttctccaaattctaattcagtggtcagccttagcacaaccccttttctagcaggccagtagcctgagtttcctcctcatagcctgggcagctcatgccatatttaccatggatggccatggaggacatctcaggaccttcttcaagggttcaaaatgtctgtgctgtcccaggcatgatcccacagctgaacttctcatctcatctctggttcagagaaatgagagagagaagaaggcctggtcctggggaagtaggcaggcctgttttgatatagccaaaaggtggaaattttctatagtcttaatttgtggcttcccaacttttcacattagggcatatgtagaaaatagcatttgtacagcatactactgtaagtatatgaagctacttgccacttgcgggggcaagcctggaggccctggtgaccccatgctgacccagatgctccaagggctgatggaatcagtatctcagcacactgggaaattctggttcaagcacattttacatcatcattgtgtcccttggactaagtcagacctgggttcaaatcctatctctattcttttctagacagatgaccttagactagtaactccttcatcatgctgtctctaaacctcagattccatatacatttttttaatttgtattttttttcttttagtccttggtgatccttgttctgatccatatttgtaaaatggggataataatttctgtttcagggttatcgtgatgattaattgaggtaatacaagtacagagttagtgtggcataatggccaagagcactcactgtagaatcactgggactgaatcccaactctgctccttattagctatgactttaggccagttacttagtttcctctagtttcctcctagttccttagttacttggtttcctctttgtaaaatacctcatctgttcctacctcatatactcatttattttacataaaatgcttagaacattacctggcatttagtaagggctatagaagtgttaatgattataattgtaatgataattattattgttactgtaaattttagtatgatgtttggtacataggaaacaataataaaatagtagctgttggtgtcattattcctaggctaaaggttgggtgatagcttctcatatactggtcagcttaatattctatgaaaatttgttgtacaagattggtaaaagtcaaactatcaagaaaaagtttcagtacatctttgcaggggatgttctgatctgatctcaccccaccttccccacaggtcaaagtccagcaggctgccatggagctggagctgatgccattcaatgttctgttgaggacaacactggacctgctgcaggagaaggatcctgcacacatcttcgcagaaccagtcaacttgagtgaggcaagttccccctactttccaagtagtaaattcttcttgaactggaacagggtctgagtaggctaggaaggagttgggccacagggtgtacaaaaccaggggtaggagggtgggtctggcaaagctagtagacttgcccttgatgaggggtcagcaggccagggtgggccaggactgtaggtctttgagttagcctggcatggccaaatcagaaattgaggaggccaagagtattggtgaagggtgtgtctgtttggctagtaaatggttgttgtaattgtacaggttttatatgtttaggttccagattacctggaattcatatccaagccaatggatttttctactatgaggcggaagctggagtcccacctgtaccgcaccttggaggagtttgaggaggactttaaccttatagttaccaactgcatgaagtataatgctaaagacacaattttccaccgagcagctgtccgcctgcgggacctgggaggggccatcctacggcacgcccggcggcaggcagagaacatcggctatgaccccgagaggggcactcacctgcccgagtcacccaaattggaagacttttaccgcttctcctgggaagacggtgagaggcctggatgggtggggaggagaggggccaggaggaggcacaggaacagagtctacagagtgagggatcagggtggtccttggggctataggtagactccaggagcaaagctgagggtgagcacagactgaggtatacctttgtggctagaatagttctaagg

SEQ ID NO: 36037 - DNA, 2300 bp, Homo sapien
gaaggaaagaccctgggcttttgagccacctcatggtttttaccccatctggctgaatctacaggcccatctcaagtagagaggccagactataaaagatagttggtttccacagtttttcttgatcttgagaaaagacaaaaaaataaaaataaaaaagaagaaaagacagccagggaagtgactctcagaaacccaggaaccttataagctaagctgcttctcattcttctccttcactggggatggaattgtctccctcatacctgccttcggatccgagcctatagcttgggagggcctgtcacgcacacagtcgaaaaggctggaagttacttccaatggataggggcccaaattgtaggtaacagcccattttattttaggttggcagagaatggagacatagttgagagatcacatttgacatcagagggcttttatgtccattgtgactcctctggactccccgtatgacagtcagcatgccatttgtatccctacttctggggctgtggcagtacagagttgtgcccagtaggccaacagcatcacctagaaaaaaaaaaaaaaaaaaaaaaggtgtagcctcacctcccatagattcagttagggatgtctgggctttggcttggaagtctcaatttttaaaagtttcggccgggcgcggtggctcacgcctgtaatcccagcactttgggaggccgaggcgggtggatcatgaggtcaggagatcgagaccatcctggctaacaaggtgaaaccccgtctctactaaaaatacaaaaaattagccgggcgcggtggcgggcgcctgtagtcccagctactggggaggctgaggcaggagaatggcgtgaacccgggaagcggagcttgcagtgagccgagattgcgccactgtagtccgcagtccggcctgggcgacagagcgagactccgtctcaaaaaaaaaaaaaaagtttcaaggtggtaggtgagcacacatgtttggcaaccactgatttaacttacttggtctcgtttttcacatttgtgaactttttctgcctgctgtacttgttcttacttgggtgatgtgaaataaaatcgattgacagatgagaaaactcttgagtccagtgagaattgtagatacctaatctgtcaagctgagacttaacctatttattgattaagcatgtggctttctttgtgtagagcaatggtttgcaatcctcacttcattagactcacttggtaagctttaaaaaacaaaataccctatctttacaaatttggtttcagttggtatgggatggagcctaggcattggaatttttaagaaacttcctatgtgattcttatacatagccagggttgagaactactagtgtagataaaacttacttctcctggggatgggtacagtggctcatccctgtaatctcagcactttgggaggcagaggcagggggattgtttgaggccaggagtttgagaccagcctgggcaacacagtaagaccctgtctctacaaaaatttttttgaaaaattagcctagccaagtgtggtggtgtgtgcttatagacctagctactttggaggctgaggcaggataatcacttgagcccaggagtttgtggttgcagtgagctgtgatcagaccactgcactccagcctggtcaacagagcaagatcctgtctctgaaaaaaaaaaaaaacctaatcctcctttctctttgcttcagatctaagaccttgaatgcatctcaagccttataacagccaatgcttttggtccttggttgtcagtgtcagtatctagcttgtaggagcagactctttctaaaatgttcaagcagattctctttttttctaatagatgactccaaactgcctcctccgccaaccctggagcccactgggcctgcaccttccttgtctgagcaagaatcccccccggagccccctactctgaaacccattaatgatagcaaacctccaagcaggttcctaaagcccagaaaggtggaagaagatgagctcttggaaaaatcaccactgcagctagggaatgagcctttgcaacgcttgctcagtgacaatggcatcaacagactatccctcatggcccctgacaccccggccggtaccccacttagtggtgtgggtcgccgcacatcagtcctcttcaagaaggccaagaatggggttaagctacagagaagcccagacagggtcctggagaatggcgaggaccatggtgtggcaggctctcctgcctctccagccagcatcgaggaagagcgccactcc

SEQ ID NO: 36038 - DNA, 2300 bp, Homo sapien
gcagggagggctgctcttggcttttgctctttgtgtccctcatgtacttttatgtggtgactttggactgtgtggccagcacttgcttttctgtcttcttgcctgacattttgttttcaacaataccttcccatctcgtctggccaaaacttttctgtgttaggggagtaagttggtatatagaggcaagagcttaaggcctggatttaggcatacctgcactcaaatccccaatttcttactagctgtgtaacgacaggaaaattaattaacttctctgagcctgtttccttattcttaatatggggtttctgatacctaccttgcagggttctaagaactagaaataccctttataaagcacttggcatatagcagtagatggtagcagttactgtcatcctgtcagttgaatcaggcttagccatacagtgctgagaacactgcattaaaagaatgaaagatcctgctgttgggaagtagctctgtacatgaggcccatccaacctgagggggcctgttgcttggagatactgctagaatcctgtctctcaccatcccagttgcctggcactcagggatacttctatacaaccttagttgaatctcacaaaaagaggtgttgatccttcgtaagtgaggcacccaagacacagatggcttcagtgatttaaattgtggtcataatgttagaggcagagccaggtcagaggatagacattgtggctcagacacctgctcttataggagggacttgcctcacagttttctagttacggtgtctgtaatctacagctttcaaatcaggtgcctggcccatctctgtacacctcttggctcagctgttagaattataggacttttagtgtggctagcaattggataaaggccaggcacagtgactcattcctgtaatcccagcactttgggaggctgaggcagaaggattacttgagcccaggagctcgagaccagcctgagcaacatggcaagaccctgtttctgcaaagttaaaaagttagctgggcatagggctcattcatgcctgtggtcacacctactcaggaggttgaggcaggggatcacttgaacccatgctattgaggctccagtgaaccttgtttacaccactgcactccgcctgggcaacagagcgagaccctatctcaaaaaatagaaaaataaattggatagataggagagtggaagccttcacttcaaggtcatatacctgggatgaccaaacagccttcattcgcctctgaagggctccccactataaacagaccttctctcatacatactgaatagtaagtaagtaaggtattatcttcacttcaccaaaggagaggtcaagagacctcaaagcaagagaaaaggaacctgtgtttcagagcccagcctagaaccccaggttctgactctccctcccaggaagttccgggctgctttagttccgctgaagagtgcccccatcctcactttggattagccctgtgagatatctcagggtgtggttgacaaagggcccttatccatctctagtctctcttgacaccacccccaaagaatcaaactagctgttgccagctgtgtgatgcataggttatgtgagtctttatctgaagaggcaaggtggttgggctcctgaaaaaggcagagaaggctacctgataatcgaggtttgaaattagaagcagatccaaggacttgtgagccagccagggtaggagaagtcttagtatctccctgtgtagccaaatgacagtagctgagtgagctgtgtgctatggtttccttaaacaaaaagcagaaggatgggaaggaaattgcagtgtctgctccttgccctagccagcaatatttccccccaaacttttatcttgatcagatcttctctatcacccaagacccatttctcacagggaaaggaatagccatcctctccactcgtcactgagccctcctgaggtggctgcctcaccctgtagcatgtgttgggaagggggatttctgcactcagactcactgtgtgtgtccttggcaggcatgaccaacggctttggaaaacacaccgaaagcgggtctgactctgaatgtagtttgggtctcagtggtggactggcatttgaagcttgcaggtaagaacacattcccaaagctttgtcagcagctctgctacccctccttttactctccattcagctacagattgaacctcttcctgcttacctttttctctcttcccccactcctgctatttcctgaggcctcttatctgtaactctgggagttcctag

SEQ ID NO: 36039 - DNA, 2300 bp, Homo sapien
aattccattgcatggagatagtatgattattttcattggactattttatttattaataataattattattgttttctaatttaattttattttttgagacagggtctcattctgttgcccaggctggagtgcagtggtgcaatcatggctcactgcagcctcaacctccagggctcaagaaacgatcctcctacctcagcctcccaattagctgggactacaagcatgagccatcacacctggctaatttttaaaacttcttttatagagacaaggtctcactatgttgcccaggctggtcttgaactctcaacctcaataatcctccggcctcaggctcccaaagggtggctcatgcctgctgggattacaggcatgagccactgtgcttggcctcagtgctggcctcagttttggggttctaggaacagagctggtgcaaatgttcttaattgtttcttttggtgtgtgttggggggaatggcgggggttgggtaagaacttctccagggcatttgcaaggccattgggaaagtacattgtcaacttcagtagataatgccaaaattttaaaaagtggttataaccattcgcacacccactagtagtttgagcattcccctcactccacttcttcaccaacacctgcaattatcagcttttttttttttgtagatggatctgtgtgaaattgtaactcactgtggttttagttttcatttccctggttatgcatgctgccttttttttacttaaaatatgtcttggtgactgttccgtatcagagcagtgaggacttcctcctcctttcttggctggaaagtgttccatcgtcatatggaaatcttgtggtcgatttaacccgttccctattgatagacgctgtgtgggctccagccttttgcagtcgactctgcgatgcataacttcgtgtatagatagcagtctgcagctgcacgtgggggtgtgtgcatgtaggtttttcacaggaacctcctgaaatgcttagaagaaaaggaaagatagtgtttgctcccccggccctgtgcctccctattttcaacaaattcccttaattccatgagtgccccagggtcagaatggtatccaccctgtcctgtttgcaccgtaccatctcttctctcagatgatgatgttcatctcccacccgcttcccttcgagccacccccacctcatagactcctcaggaattgtctctacccggcatctctcactttttctttcttttttcttcctttctctctttctctttcttccttccttcctttccttccttccttcatttccttcccttccttccttccctttctttctgtttctctctctctctccccctcccttcctcccttccttttctttccttctttctttctttccttttttttttttttttttgatcagggttcttgctctgtcacccaggctggagggcagtggtgcgatcatggctcactgtagcctcaaactcctggactcaagcgatcctcttgcctcagcctgccaaatagctaggactgcagctgctcgccgccatacccagctatattttttgtagagacagggtctcgctatgttgccttggctggtctcaaactcctaggctcaagaaatcctcccccctcagcttcccaagtcactgccagacatctttcttattgacatccccatctcgagaatccaagttagtattaactgagggattagactttgccttgccctgaaagagagaaaaacaaactgaccaccactctagagactgtttagtctcaaaagtcggcgcagtaacacacacacacacacacacacacacacacaaccaaccaaccaaaaaaaaaacaggtaaaggcagacaaattccaacccatcccctatgtgctgtgccctgggcaaaccctctgacatccttcagactcagcttcttcctctatgaaaagggacaataacacttacctcttgtgggtgtggggcagatgagggccaatgttaataaaccactcacattcatgcactcactaatcaaagctttcattgttatcaaggataattctaattcaagtaagctatgaagatggcatgacagacacaaaatcagccagggggagcccacattggagggcagtccacaatggaaggcttcttggaggaggagatgattgagctgcttctactaaggtaggcatcgtttaggcaagtgggaaaatgttcatgaatgcatggtggggggtggtgcgaagattcttgaaggagagatctacaaaatcagaagcatggagagtga

SEQ ID NO: 36040 - DNA, 2300 bp, Homo sapien
ctatgtaccagatattctttggctgctagggcagagcagcagggacatagcccctgtccccgtggggtcaacatgctggtggagggagtcagaggtaataaaataagcaagtaagacacacagtagagcaggcagagttggcggagaactggatctaactgggttggggttttgccaagcaagtacagtccaacttggagtgtggagggaagggtatagaaaaggtagggactagaataactaaccctggaatttaggctgggaaaggagggagtagggatttgaaagcgggtgaggtcagtagtctgtggggccctgaggggcgatggctccaaggcacgagccggaaagaggtttgacagtggcttctctggagggctcaagcttgaccaggaaactgagtgccgagccctggaagatcactggggagaggaggtcaaagaactgggaggccagggcaccatcggcgggctggtaagtggatggtgaaaccaccaggcagggggcaggaggagctggagagaggacgcgagatgggagctaaaatcctaaaatccgcagggagtgcggaaagcagtgacagcagtgagcgcggggaggctggtcctgagtctgggatggggcgatggcgttcaagaagacatatttaagagtactatgtaattttacgtgtgggaagaaccttttgtttttgtaattagaactacagaaagggacagagctgtttatgtcatgaaaagcaggcctgagcattagaagactgagaaacacctgggaggatcttgtttcaacagagctcaaagccgtggcaaaaggacggagctcgaattgtgcaattgtgagtgactcgaagctgggtgggaaagcgtctagtttcttatgcataaaggaccttcctgttgtctctgaaatcataccaagtagatgccaccatttcagcagaggcttgaattatactgataatgacaagttatcagtatcatataactaatgtaattgattgataggaggagttaaggacacgggatctggccgggcaccatggctcacacctgtaattccagcactttgggaggccaaggtgggcggatcacttgagttcaagagttcaagatcggcctgggcaacatggccaggcaacatgtaaaaatacaaaatttagctgggtgtggtggtgggcgcacctgtaatcccaactacttgggaggctgagatgggagaatcatttgaacctgggaggtggagggtgcagtgaactgtgattgtaccactgcactccagcctgggtgacagagtaagacctcgtcaaaaaaaaaaatccaaaaatgtgggatctgtttaaaccctggctctgctccctgctactcattaccctcatctgtgcagcaggggtgataccagccctcacccctctgtttctgagaagtagatgagcgtgtatgtgcacagagacctgcctgcagtgttgtgaggactcacaaaatgttggctagatatcctaatctttctcatgtttgttggcaaacaaaaacaggctgagatggccctgtgccattcgtatatctgtgtgtggaataacagacagtataaagctgaaaagcaggtccctccctggctaattgcatttcagcagccgctgggaggcagtgtggcggggggcggggagtgaaactgtgcggggagtcagggagcctgggtttcctcctcagccaatgaggccaaggccaaatcaggatgtccctgagcccctgtttgcctacctgtaacgtggggatgacggttcctgccaggtacccacaaggctgttgtgaggactgaatgaggaaatgctccttgaagataaatgacaatgccacagaagagcggatgcagctcccctgtgctgagtactcacctactgtgtgctgggcacaggggcagagccacccacccctccctgcagcagtgcctggaaggcaggaccagcatcctgatagccagagttgagacagagtttaagggcctgccaggcataactccctcgccaggcatagaaataaaggaacatcttgagttctttcaagggaagttccaggcacctagctagccctgagagtaaatgaacaacatgataagcaagaaggaaataatagcttttcaaaaaaaatagccaaggaagttagagtcacaaaatacttggttccctattgaaacttaagataacatcttaatatatgttcctgagttgtttttcagaaacccaggcccccagcaaatggaaaatgccatccactggcacagagacttcagttgggagccga

SEQ ID NO: 36041 - DNA, 2300 bp, Homo sapien
aactctgtacgcattaaacaacttcctattcccttctgcttgcttgtatgatttttctctgtgtgtttctctcttcccaactactttatggactccatgagggctgggccaggctgggcatattcaccttggaataagaaagaacacatacaatacacacagggcctggaagaagtggttgacacaatagtttcattaaataaatgaaaaatatgtaatattatttaacatttgtttgaaggctgagtgacttcttggactaataaattctaaatttagtgctgagacagtgtctgtcacatagctggatccaaaacctgttgacagaatgaatgaagcattaataactctgttgcccgtaataaaacattggccctttattgagcccttacaagtaccaggcactgttaatacacagaaagaaagatgtctggcactccatacatttccttccttcctttccttctctttcttccttcctttccttctctttctttgtttctttctttctttctttttccttccttccttccttccttccttccttccttcctccctccctccctccctttcttcctttctttccttctttttttccttcctttccttcctttcttcttttttcctttgagacaggatctcactctgttgcctaggctggagtgcagtagcacgatcatggctcactgcagccttgacctcctgggctcaagcaatcctcctgcctcagcctcctgagtagctgagactacaggcatgtgccaccatgcctggctaatttttaaaatttttagtagagataagatctcactatgttgtccaggctggtcttgaacttctgggctcaagcaatcctcctaccttggtctcccacagtgctgggattacagatgtgagccaccatgcctggccttcttcttttctttgtaagcattatcgcatttggcccaactaccctctgagatgactacttgttttataagtgagcacaagctcagtgacatcatgtcccctgctgtggttacacagctggcaggtgtctccagatggggctgactccaaagtttggtgcttccatatatattttgtgatgcctccctgtgttaatgaaccaaaacagaatttcttaatatttttttctttttttttctttttttttttttttttttttttgagacagagtctcactctgtcacccaggctggagtgcagtggcacgatctcagctcactacaacttctgcctcctgggttcaagtgattttcctgcctcagccttccaagtagctgggattacaagtgtctgccaccatacctggctaatttttgtatttttagtagagatggagtttcgccatgttggccaggctggtctcgaactcctgacctcaggtgatccgcctgcctcagcctcccaaattgctgggattacaggtgtgagccaccgtgcccggcctttgctttcattttaataaaacatgtttttcttttctgattataaacatgtatttacactctattttttaaaataaggcattacagaaagtggaaatctgactttttaagacttcttagaatgttctctcaagatccatggcaacccttcccgggcatagcagatctggaacacgtggctcttgtgggctcttccttctgggttgtctccaggtcaagggatgtatgtatcccatcgctgacctttctttctaggtacctccctccccactaatcttcaaagataactgagggatgttgtaaaggcaataaagccacctcgactttctccccctaacctgcatttcccattaagtcttgttttcaactctacaggtggggttttccccagccagaccttaggttattttctgagctttggtttcttactggggtttgggtgcaataaggaagttgacaagtgaaactgttttttccagggtagctgagctaagcctcttatcattggaggagcggggagcagtcctgggatgggtggtaacaggtggaggaaggtgagccagcccatggctctctggattggctgccatgagctcagttcctgggagatactgtatatatggacggccaaagcatcttctgagacactcagaaaattgccagcaccaaagtagtggcatcttctccctgggagagctgggtctgacttctcactggacacaacttccagctgacagggagcagagcctaacacagagacctcttgtctgaagatcccagcccagggtgttcaggacagaagcgatttctgtggtccaaggttggttgaacaataccctctccttt

SEQ ID NO: 36042 - DNA, 2300 bp, Homo sapien
tataaatactaattaatacatacatacatacatacacacacacacacacacacacgtatatttacatacaagaggtagcatgtaatacacactgttttgtaccttgatttttttacttagcgtgggtgttcaggcactgttctgggtgttttataaaagttaacttacttattcataacaaccttatgggataggtattattatttgctcttttttactgttaaaaaattgaggcagtagttagtagagggaggcagtagagtggttaacacaaacttgctcaagggcacacagccagtaaatgacatggctgggattccaaaccaggcaggtgttcctaagtctagattattatccactatgccatactgcctcttggagagcttgccatgatccacagagaactccataaagtgttgtattgtattcagttaaatgaatgtacataatttggctgggtgtggtggctcacatctgtaatcccagtgatttgggagctgaggtgggagatcactggagcccaggagttggaggttaaggtgggctttgatggcaccactgcactccagcctgggcgacagagtgagaccctgtctctaaaaaaaaaaaaaaaatagaaaattaaaattaaaagaaatgaatgtgcattagtttatcaagcctccttttgtggacacctgagttatttctcatactttgctattataaaccatgattaaataagtaactatgtatactttggatatttgttgaataaatttctggtaggcagattgctgggtgaaaggaaaatgcatttgtaaatttgccagaccccgctgtggggttgcaccactttacctcagcttttccagcagattatgttagtaaacttttaaatttttgccaaatttatgggtaaaaatttctatctcagaataactttaatttgcacatttaaaatagtgagtttgtctgagcatctttttctttctctgctgcccaggctggagtgcagtggcacagtcacggctcactgcagcctccaactctcaggctcaagcgatcttccatcctcagcctcctgaatagctggggctacaggtgtagccccaccatgcccggctaattttttaaattttcagtaaagacaggatctcaccatgttgttcagactggtgtccaactcctgggctcaagcgatcctcccaccttggcatcccaaagtgctgggattacaggcatgagccactgcaccctgggcatctttttgtatattcaggagccatttggcatttccttttatgtggactgtttattcatatcctttgctcatttttttttcctactgggtttctggccttgttcttactggtttcttattgctggcctagagcttgtgatgatataccagtgctaagcctactttgtaacagcgtctacaccctcagattttcagcagaaggttgttaatgcttttctttccttttcttcggtgtcttctggtttgtttttatgcgcacaacctctcttgagacagggggagctgagacagatggaaagggtgatgggtgggcaggcaccaaccccggagcacccagaggcccaggaaaaggtgtcagtcgggatctccgagtagtctggccctgctcaggagagcacagccgctctgatggtggtgcgacggttccggacctgtggggcctcagcggggccaaacggcaggccgagacagtatcggggccgggaaggtcactcacccctaaagggagaggcaccatgcgaggccccttcctatcctatgtgcggagactcacagggtccttcctggtcctgggctcgggaccgtgagagacgcagttggttccgagttcaggactaggggtccccttagatcctcagatcctgcagaatcccggctctgccccagtgggagccaaggccaggtcgccagagggactgtccgccggctggaggctgtgtgcaggacccacgcctcccaggctagcgagcgggcagcgccccggtgctgcgctcccacggggccggcccctgccctgccctgccctgctcctagcccgcagcggcgcaagtggaaccgcatcccgctctttcgttttcgtttcccggaaggatagcgattaccggagcgcctcgcgcgcctgcccgcctgcggaggacccgggcgcacacgccttggcgcttctcgaaagagatttcctcccacgcgaccttccagttctcggagccaggttaggggtttggcggaggaggactgcggggcgcgggcctagggccccagcagccacagccaggggagc

SEQ ID NO: 36043 - DNA, 2300 bp, Homo sapien
tattcctgctcatattggtttgtagactttgattatacatagcattgactttgtccttccaaagggaaatgtctccattttttagtctgtcgcaggcagtgcatatttatttctattattacttaggttctggctgactagccctaaaactgtctttttaaaatttattttgaataggtttttatttatatgattcaaaaatcaaaacaaggccaggcacagtggctcacgcctgtaatcccagcactttgggaggccgaggtgggcagatcacgaggtcaagagattgagaccattgtggccagcatggtgaaaccctgtctctactaaaaatacaaaaattaggtgggtgtggtagcacgcacctgtagtcccagctactcgggaggctgaggcaggagaatcgcttgaacccaggaggcggaggttgcagtgagccgagatcatgccactgcactccagcctggcgacagagcaagaccccatctcagaaaaaaaaaaaaaaatcacaaccatgtgaaaaggtttacaacaaaaaccctttctattattttctactctaaattccagttatgcttattagtttttatgtatccttccagaggttctttgtataaatactaattaatacatacatacatacatacacacacacacacacacacacgtatatttacatacaagaggtagcatgtaatacacactgttttgtaccttgatttttttacttagcgtgggtgttcaggcactgttctgggtgttttataaaagttaacttacttattcataacaaccttatgggataggtattattatttgctcttttttactgttaaaaaattgaggcagtagttagtagagggaggcagtagagtggttaacacaaacttgctcaagggcacacagccagtaaatgacatggctgggattccaaaccaggcaggtgttcctaagtctagattattatccactatgccatactgcctcttggagagcttgccatgatccacagagaactccataaagtgttgtattgtattcagttaaatgaatgtacataatttggctgggtgtggtggctcacatctgtaatcccagtgatttgggagctgaggtgggagatcactggagcccaggagttggaggttaaggtgggctttgatggcaccactgcactccagcctgggcgacagagtgagaccctgtctctaaaaaaaaaaaaaaaatagaaaattaaaattaaaagaaatgaatgtgcattagtttatcaagcctccttttgtggacacctgagttatttctcatactttgctattataaaccatgattaaataagtaactatgtatactttggatatttgttgaataaatttctggtaggcagattgctgggtgaaaggaaaatgcatttgtaaatttgccagaccccgctgtggggttgcaccactttacctcagcttttccagcagattatgttagtaaacttttaaatttttgccaaatttatgggtaaaaatttctatctcagaataactttaatttgcacatttaaaatagtgagtttgtctgagcatctttttctttctctgctgcccaggctggagtgcagtggcacagtcacggctcactgcagcctccaactctcaggctcaagcgatcttccatcctcagcctcctgaatagctggggctacaggtgtagccccaccatgcccggctaattttttaaattttcagtaaagacaggatctcaccatgttgttcagactggtgtccaactcctgggctcaagcgatcctcccaccttggcatcccaaagtgctgggattacaggcatgagccactgcaccctgggcatctttttgtatattcaggagccatttggcatttccttttatgtggactgtttattcatatcctttgctcatttttttttcctactgggtttctggccttgttcttactggtttcttattgctggcctagagcttgtgatgatataccagtgctaagcctactttgtaacagcgtctacaccctcagattttcagcagaaggttgttaatgcttttctttccttttcttcggtgtcttctggtttgtttttatgcgcacaacctctcttgagacagggggagctgagacagatggaaagggtgatgggtgggcaggcaccaaccccggagcacccagaggcccaggaaaaggtgtcagtcgggatctccgagtagtctggccctgctcaggagagcacagccgctctgatggtggtgcgacggttccggacctgtggggcctcag

SEQ ID NO: 36044 - DNA, 2300 bp, Homo sapien
agctggctcttccccagtctgtgtcttctccaggctaattcttagtcatcctttatccttcaagacttaactcagatatcacctacttcgtttcagatgtcttcctgacccatctgtgcaaacctcgttcttactctaacatgttgaattgtagtttatgtctctctcccactggactctttgagttcaaggctgaaaatcaaaggtcctccaattttattgaaatgaaataggttcaacacaactcttgctttctctatgaagccatacttatgtctatgttagcccaaattcatttccttctcttctgtagtcctaaagcacttgggaatatatcatctctaacccatggtttctaagtgactgaaggacagaaaccttgtctgtattctttagaccttccccaaagcacctaacaagtgttaacttatagtgttgcttaaaaacgctcattggttgctggaagcaaataaagtttggagagctcatcaaggagagtgggtaaaaatattaaatggggctgggcatagtggctcattcctataatcccagtactttggaatatcaaggtgtgaaaatcacttgagcccaggagtttaaaaccaagaccagcttgggaaacaaacaaagaccctgtgtctattaaaaaatatatatatacatatatatatatatatgcatgtatacacacattttttatatatagttattcaaaatagattttccattatatatatatacacacacatatataatatatatgttatatatatagtggaaaaatctattttgaaaaactataaagatctattactgcttgtccaatacaatagctactaaccacatttggttattagcacttgaaatgtggctggtgcaattgaggaactgaattttaagttttaattaattttaattaatttaaatttgaaaactgatcattgatttaattgttagagcccttttaagtatgtttgaaatgacctggatatgtgaatctattttttttttttttttttgagacagggtcttgctctgttgctcaggctggagcgcagtggtgtgatcatagctcgctccagcctcccctcccgggctcaagcaattctcccatgtcagcttcagtcgagtaggtgggactacaggtgtgagccaccacacttagctaatttttaaattttctgtagagacaaggtcttactatgttgccctggctcaagtgatcctcccagtttggcctcccaaagttttgggattatagatgtgagccattgcatctggcctgaatctacgttttaaactgtcaacttcatgaaatctaagtatagatcaaggttttccagtgaaaagttagcatctaaattgaggtgtcctataagtacaaaataaacaccaaatttcaaagacttaggtataatttaaaaatgtaaaatatatcattaataattttatatttattaatgttataataatattttggatatattgatttaggtaaaataaattactaaaattaattttacctgattttactacttgaaactttaaaattacatatgtggcttgaattatatttctattggagagagctgatctattccaatagataggctttgctttttgataattattataataactgaatttcaactctttttttttttgagatggagttttgctcttgtcacccagactggagtgcaatggtgcaatcttggctcactgcaacctctgcctcctgggttcaggtgattctcctgcctcagcctcctgagtagcagggattacaggcacccgtcaccacatccagctaattttttgtatttttagtagaaacagggtttcactgtgttgaccaggctggttttgaactcttgacctcaagtgatccacccacctcggcctcctaaagtgctgggattacaggcgtgagccactgcatctggccaaccctctcattttctaagacagtttttagtaactagtggtaagtgattttacagataattaagtgggattatctcttttgaactcttttttctcaatgcagatcataatctactttctcagcccaaggagcatagcattgttcagaagcatcaccaggaggaaataattcacaagttggccatgcagctgagacacattggggacaacattgatcataggatggttcgagaggtgaggcttcagtttccccagccagggcctgtcaggtaggaggaaagagcaaacaaaactacggctgccaagtgtctgagatgcccaggaattatcagaattaatggaataatgctgtc

SEQ ID NO: 36045 - DNA, 2300 bp, Homo sapien
aaatgataaaaaccagcaaacacctatgctttctgtgaatatacatttctcatatcccgtctccttgatgtctgcccaaaaaaggtacccagtctgatatgctgttcattatatgaaattttagccaaaagttgaaccattaactattaaaagtcatgttatcacttatttattttggatgatggataacgggtgtttattatatctttctgtatgctttaatttccaaaatgaaagtgtttaaaaaataataataagactcggtagttagcctgattctccaaacttcaggccagatttttgtataccacaaatctgcagccagtgcagtggctcatgcctgtaatccccaaacttagggaggcagaagcaggaggatagcttgagcctaggagttcaagacctgcctgggcaacagaataagaactccattctccacaaaaagaaaaaaaaaaaaaaaaagaaagacaatatacaaatctacgggaaggaatctttccagaaaggaagaatttgtttcaagaactgttttgcaggaatatcagaaggttttttatttttctttgactcaaaggctgtaacactgtactttataaaaatggaaataaaggcattagtttgaacaatcctctatgctgctactgttgtaaagtttggagcctataactcactcaaattggtttatagccatgtgtttactaaatcttttttcatattccttttctccaggcatacaggaatttatatctcacagccttcttagagtcagtcaggttgagcctggtgactagttcaggacagtgaaacgtcagcagaagtgaaaaggccactcacttctggcagaggcaaaggagagcccttacaggattctccaatctagctcttctgccagcccggaagtgctgggagggcagagccactgacgcaagcagcagggaagctgagtcaccatggggacgtgagactgacttacagatgacgagtgcagcctcacagcctagtccatgttgagataaacacaatacagtcctgcatactttatagtcataaacgagggagaatagaaatggaaaatgaccctctaggcctctaagaccaaattataatgaaaaaatttatgtcttcagttttgaaaattaaattttttgaccctgataaaacaaatttgctatacaagtatccgttaaccgtgtgaaacctactgagtcaaactattttcttacattccttccacttcaacaccaattctaatccaattccaaattagttttcagagagtctcttgtaaggaaaaggagaatcgacttcgaattttaaaatttgtgctattattagtttatagagctttcaacaatttacaaatagtttgcataatcagtatatttaattagtatatatagacatatatatatatatttgagagggaacttcactgcaacctcccagttgcctcctgggttcaagtgattctcctgcctcagcctcccaaacagctagggttataggcgcccaccaccacgcccggctaatttttgtatttttagcagagacagggtttcatcatgttggccaggctggtctggaatgcccaacctcaggtgatctgcccgcctcggcctcccaaagtgcaaggattacaggcgtgagccaccaagcccggcctagtgtaatttttaaaagtacaaaagccactagaaaccgtgacaataagaacttccttttgggttttccagcatttggttcataggacatggaccatatatagatgttttttgaatgctgaaatcttttactcataacacagttttcccagtaacttgcttccggttgatttaaaatttgtaatacacctttgtaatagcaggtaccttcatgaaactcagtatttgagaaaaatgtggagtttttccccctttcttttggccagaatgtatatccagggtagtgactttcgagcaaatgcgtttaagcaactccagtattcttactacgctacctccaacctcgctccacgcatggggagatcagggttccacattttcgggtaagcattagccgtcctggcgctgcacgagcgtattctacaattccgaaaactactaacttttccgtctgcaacctttaataattgagagggtatgcgcaactcagaaaagtgcgcccgctgaggttgggtgcagagtggactggaggaaaggcgacacccatttacggtgcggccccggacggggtccccagacacggccttcccggcgtgccacgcgcggaggggactcttaacgtgaagcgctgggtgactc

SEQ ID NO: 36046 - DNA, 2300 bp, Homo sapien
acgcccggcttctgttacagaatttaagactgacctaactactacagttaggcctaatacaatgtatttcttaacttcttaaggaaaacgagattattggaatagtacgtgtatttctggcataacaggaaggaacaaattgtggatgaataaagagaaccttttggcagcagtggagtttatccagccctcatttctgcctcaaaggaggaatgcaactctgtgccagaaatatgtgtctatattgcaatgctgttgataaaacagcctactacagtgctttgaggaaaataggcattacgcaggtatttgatgactaaattaacgtccagctgaactgaaagccctcataatgctactagtactgctacataccagataatatgacagtcaaggccatgggaattatatggcattggctgccctggttccatggggagacttgagtgagctgggcggaggagatttggcctaatggcattaagctctgatgatactagaagcagccctcagaaggaaaagattaatgggctatctctaaaccatcagagcaatatcggaatatgcatgaaaatcatttcctaccccgtgtcagggtcaaaaaaagcactatcttttctcatattggcttctggagagtcagggcttcttgtcctacgactggtttagggcaggggaggaaaacatcgacaaagggttaaggctgttgggcagtttttaaaattcccagcccagcctaaaggtggtgtctgtcaacgtgtggtcggtccctggatcatcagtaacagaccaagagtgcaggtgcttgcttaaatcccagactcagggacccatcacaaatctctagaatcaaatttatggaagaggtgctagggtactgcaaccttattactaaggaacaatcttctgtttcagaactatggcctaggaattggggtttcaggtgggggccttgagcggaagtcctctgactctggattcatcacatccgacagacactactacaacactttgttttgaagaccattaaaaaactacctcaacttctcgcacagcgaacaggaacaaaactaaggactctgggacatattttcataagctggttaaacagttccttcacagccttgtttatcatgttagtttgttcactagattcttatttaaaaataaatctcttcaactgaggaattttcagaaagaatcacaaactccaaaatagaagagttttctcatagtgcagaactgggcttctaaacctgaagacactgctataaaaagcaaagttttatttaaaagaaaattgctggttaaggctttccccagctcttttgcactcagagccacggatgaaagctggcaatttgcgggtggcagggaaggaagacgcggaaacagggctgaaaagaccgagcaaaatgcgctcggctccagagttcaggaggaagtccccaccaactacctaatttttaatggagccaattaattgccagaaaaaccgcgtctgcaaatgttttgccagtcaacactccaggttctcgccattcctctccggcgggatgaaccacccgaggcctgcaaaaagcagtcaagcagtcaagttacacttcagctgtgcccaccacctgggcgcagcgtcgcctccctccccaggatcaccagactctgccctccgcgcggaaacaggagcccatcaagccgctgcccacaggttcctcgcgcccagctcagccccgcggcctttcgactcgggggtccgaaccgccgccgcgtccggaggagacgccccctcggccacaaagggaagactcgggccacgcccgccgccacactctccctgcccggtcttcgcgcccgaaaccgtaccgcgccgccacttactcgtcgctccccgccgcgctgtcccgctcggggctggaatccgcccgggaggcgcgcgcaggccgcgcagccagaagccgcagccgggaccggctgtgccgcagcggcgcgcgccccccgccccggaccgcgcggccacgcggctgagtcacccagcgcttcacgttaagagtcccctccgcgcgtggcacgccgggaaggccgtgtctggggaccccgtccggggccgcaccgtaaatgggtgtcgcctttcctccagtccactctgcacccaacctcagcgggcgcacttttctgagttgcgcataccctctcaattattaaaggttgcagacggaaaagttagtagttttcggaattgtagaatacgctcgtgcagcgccaggacggctaatgcttacccgaaaatgtggaaccctgat

SEQ ID NO: 36047 - DNA, 2300 bp, Homo sapien
aataaatctcaaaacgaatgttaagacaaacaaggccggttgcggtggctcactcctgtaatcccagtactttgggaggctgaggtgggtggatcacttgaggtcaggagtttgtgaccagcctggccaatgtggtgaaaccctgtctctactaaaaatacaaaaaattagccaggtgtggttcatctcaaaaaaaaaaaaaaagacaaatgatctgagacaaatatggcaaattattaatctttttaatgtgggtaatgggtctgtattgtattgtctgttccttttttctgtatgtttgtaatatttcataatacatgttttaaaaacaatacaactgtaatttaaaaaattatataatatttaaagcacctagatcagagccttacacatggaagccctcaaatgttaagtacattaggaggctttgattgtactttctcctcttattttgcagtcctggtatgttagagtagaatactggaatgcagaaaatgtttctcttggtcaggtgcggtggctcacacctgtaatcccagcactttgggaggctgaggtgggaggatcacttgagccaggagttaaagaccagtctgggcaagatggcaaaaccccatctctacaaaaaaattaaaaaattagccaggtgtggtggcatgcacctgtggtcctagctactatggtggctgaggtgggaggatctcttgagcctaggagtttgaggtgagccatcatcgtgccactgcactccagcctgggcccacaaagggagacccccatttcttagaaaaagaaaacattcctccaagaactatatacaaaaacaattaagtttggtaaataggtatttataaatgtttaagttataggatataactttagcttttgatcatatagcttccctttatgattgtgtcaaatcaaagaatgtgtatcatagaaagagggatggtttggagtaagatactataattcctatttttttttttttttttttttgagacagagtctcactctgtcgccaggctggagtgcagtggcacgatctcggctcactgcaacctccgcctcccgggttcaagcgattctcctgcctcagcctcccgagaagctaggactacaggtgcacaccaccacgcccagctaatttttgtatttttagtagagacgggttttcaccatgttggccaggatggtctccatctcttgacctcgtgatccgcccacctcagcctctcaaagtgctgggattacaggcgtgaaccaccactcccggccagatatttaatttttaaactgggctctaccacctaactagttctgcggtctcaggcaaagccattttgagcatcaaattgtatctgcaaagttaagctaataaggtcctccttggaaaagttttgtcaggattaaatggactcatgtatatgaagttatatatatatataaaactcatgtaatatatatattaagtacagagcctagtacttaatgggtgctcagtaaattgtaataccagttattatgacacagatgccttcgccctagtgactcatagttaagggtctcctgcctcatgaacaaagctttattgttcattttggaaagtgctttgggaaatcgagcttgccattaagctactgggcagtcctgcttatttagcttgggggtagcttctgatgttactcatagcctttggtttctagaacagaactctgggcacctcctgcctggctgggcctcgctgatgtgtggtccatgtttcaggccttctccacagtaggcactcctgactacattgctcctgaggtgttcatgcagaccgggtacaacaagctctgtgattggtggtcgcttggggtgatcatgtatgagatgctcatcggtaagttgcatggtttcagaggactttttctgtgcatccatgacagacttttacattgataccagcctctgtttcaattggcagtgatctaagtgatttccctacttgtctttcaaagtgaattgttttagacagatgacacctctttcagtaagatgtatcccactccattcttgggcttactggcatcctgcaattgctttgctgatcattttttatgtttttctttctcttataccttcatcttctccatctagaagctcttttagtcactagcatttattaaatatccgttgtatgcagagcacttcaactgggcattgcctcactttcctaatttgccgcccccttcctctgtcaaagccttcaaatcatgggaccctctggcctctctccctcttattgtattggtgtg

SEQ ID NO: 36048 - DNA, 2300 bp, Homo sapien
aaatacaaaaaattagccgggcttggtggcgggcgcctgtagtcccagctactcgggaggctgaggcaggagaatggtgtgaacccgggaggcggagcgtgcagtgagcagagatcgcgccactgcacttcagcctgggcaacagagcaagactccgtctcaaaaaaaaaaaagaagaaggagaaggagaaggagaaggagaagaagaagaagaagaagaagaagaagaagaagaagaagaagaagaagaggaagaagaagaagaagaaaagattagctgggcatggtggcacgtgcctgtagtcctgtagtcccagctactaaggaggctgaggcaggagaatcacttgagcctgggaggtggaggttgcagtgagccgagatcgtgccactacactccagcctagtgatagagcgacactccgtctcaaaacaaaacaaaaacaacccccctccccccaccaaaaaaaacatatatataagagagaagagagagtgaaattcctcttctgaaactgggaaagttccaggaggaagataaggtttgagctgggctttggaaggaggaaagagaagaggagaaagaacattggatttgcagacagaaaatggggttcccctcttggctacttggcttactagccgtgggaattcagacaagtcacttagcttctctaagtatcaattacttcatctgcaaaacctcgtgtgtcactgccaaagtgaggaccaagtgagattaaataagtgaaagttgtttgtaaactgtaaagcattatgcagacatcttggactattattaaaagcttaagaatgggtaggactttgacaacaggcatttggggagaagggcctctgggcagagagaatgaaaggcgaagtgattgattgatatgtatgtagtgactgattgagacagggtctccctccgttgcccaggctggggtgcagtgtcatgatcatggctcatagcagccctgaactcctggactcaatcaatcctcctgcttcagcctccacagtaggtgggaccacaggcacttgccaccatgctggccaattacaaaaatttttttagaggtggattctccttatgttgcccagactggtctcaaactcctaggctcaagctatcctcccacctggacctcccaaagtgctggaattacaggcaggagccaccgcgcctggcgagaagtgatttttgttaagaggctagacaaaaggaaactgggctttgaagatgaaatgaatgaataactcgcagcacatgcttccttctctccctagatggcccctttgcaggcagtcagggaccatgtctcgttcatcttagtttccaggagcttgacactttgtagttgagggctttgtgctccattctcaagaaacgacaagtgcccaaaggctattaaacttgggacctctttacccccaaaagtagtacagaataagagttgggtggccttgaaaagcaccttcttctgtccacactgggtcgcccgctgggtaacctcccaaacctatgagagctcaccttatcccaggtaaggtccttactttaaggaagaggaggggggccaagggctccagcagacctgttctacacggggtaggggggtgggtgggaactatacaggtgacaacatttcatagaactacacacacactcacacacacgcacatgactgcatacccaacaggttaaatccgagtgtggtctgtaatgaagttaattgtattggtttagttaattgtattggtttagttaattgtattgtgcgaatgtcaatttcctggctttgagaatgttgtatcttaagaaaaatgttgaggtaagctgggtgggtgatggtatagggaacctgtatgtattaattttgcaacttcttgtgagtccataattatttcgaagtaaaaagtaaaacaaaagaaaacaatggaacttccccctcagcccagcctacttcgagaccgcctcacactcacacatctggcctcacccaggtccagccagccctaggcagggggtgaagggaggggcagggcggggccacgcaagcgcagttccgcaatcccggccgctccgggaagtcgcgcatgcgtagtctcggccccgggctgccgcgccagcccgtctccgcggcgggggaccgggctgccttggcccctcagcgctcgcgtcttttccggcagttggaacgcttcctgttgtcctcacccgtaaccgcctgttgccccctgtctcagagtccctcacgcgtcccctcccgtctttggctcgttggctgccgccgccg

SEQ ID NO: 36049 - DNA, 2300 bp, Homo sapien
aggctgaggtaggagaattgctcgagcccggcaggtggacgttgccgtgaggcgagatcgaaccactgtactccagcctgggtgacagagccagacccagagtctcaaaaataaataactaactaaaaataaacaaatatgtattgcttgactgctgtatcgtttccaagccctggggatgcaggtgtgaccacaattggccaaagtgacaaaacctaacatctgtaacgctgcaagcctggggttattttatacagaggaaatagagaggttaaacgttcttctcaggatgcttcagccagtaactagcagtgggggctggggccaaatccaggactgcctgactccagagcctttgatttgatagaaggaaagaaaatgaaaaagaggagaaaagcttacatagaggaggggaacaaatcaaggcaaatataagtgagccagaaaaaaaaatctagacgagagagaaataagaaaaggtttgctaggatccccttctccccttttacaggtgaggaaactaggctgagatgtaataaatctgtatttttttcctccactacagataaaccttttagaaccacaataagaggtaaggcttcaaaagaaaaatacctgggaaagttaaaacatattaattggctggccgggtgctgtggctcacgcctgtaataccagcactttgggaggccgaggcgggagaatcgcctgaggtggcgagttcgagaccagcctgaccagcatggtgaaaccccgtctctattaaaaatacaaaaattagccgggtgtggtggcaggtgcctgtaatcccagctactcgggaagctgaggtaggcgaatcgcttgaacccgggaggcggagtttgcagtgagccgaggtcgcgccattgcactccagcctgggcaacagaacgagactccatctcaagaaaaaaaaaaaaagaaaaaagaaaaaaaaaaacataataattggcatatctttcagctaagagggaataaataaaaagacaggttctttttctctctttttttttttgtgcagtggtaggatctcagctcacggcaacctccgcctcctgggttcaagcgattctcctgctctcagcctcccaagtagctgggattacaggcgcctgccaccatgcccggccatttgtatttttaatagagacgggatttcaccatgttggccaggctggtcttgaactcctgacctcaagtgatccgcctgcctcggcctcccaaagtgctgggattacaggcatgagccaccgcgcccggcccttggtgatttttctaacccaatcacagtctctctccccttaattactcttgcggctctgtcttcgtaagggaagtggcccggacaaaatacatgccaggcagtgcaacggctgctaggagaaaggctcgagatacccctcctggcatttgcttgggggccagaatttacattcaatcttcttcagaaacttccctttccgggtgtttgctaaaggtgatagtttccaggtcacctgaccggtctcctttgctgtcggcgccaagtcctgcaagtttgcttgagagacgagaaaccagcaagagttgggcaaactttccaaaccaggcttttccttcagtgtggaatctaggcggccacagtctggtgccagctgggtcacaaacagctccgtgacctgtttgtaaacgcgatgctcttagttccagactaaccgctcacaagggtgaagcacttaattaattcatctcttaatcttgttaggggccaacggctcctattagtgtttgagcgtgacggcgacggtgctgtttatgaagccctagcctatttggaggtgaggaagaggagtctgtgggtaacctggaggtcgacagaccgggaggaacgctcgagggagcaccaggcctgttacaacgagcgcgcgccgacgcacgtctccacccacccggcgcaaccgccagagcgcgctcccagcaaccgcggctctcgctgcgtttgtagccatacgtcacggcctcttctgcttctcattgggggagcccgtccaatcatgtgattccagtatggcgtataaataaaggcgaggagaaggcggtggtccgccatttcgtggacgccgggtgagtgagagagttggttggtgttgggccggaggaaagcgggaagactcatcggagcgtgtggatttgagccgccgcattttttaaccctagatctcggtaagagaccagcgaaagagggaatgaggtggaaatggaatttaacagtaccaaggagccaggcccaatggcggcgc

SEQ ID NO: 36050 - DNA, 2300 bp, Homo sapien
ccaggtgatctgaccgccttgacctcccaaagtgctggaattacaggtgggagccactgtgcccagccaggatcaaatatttttaagagtagttgtgaactgatccttgtttaaaaaattgtttacaaaatggttacatgggttggttgtacctttacttttatgtgtttgaaatactccagaaagtgaatcacttactatttccctttgtgttaatagtgtcctgttagctggctgagtaaggcctgagtattgacctccatgcccccacccccctttcctcatatttggaagtataatgggaaaaaggagctgagtgttcactgtaaagctgcatgaaaggttggtcaattcaagcaggttgtagtaaagttttccagggcccacctcttcccagtcactcttcaaatatgatagcttatctaaatttaatgactggttgtattaagggtgaggaataatggtcttttttttttttttttactactgtgagctataatttctttttttaaaaaaatgtatatttattatttaaaaaataatacagacgacagtctgtgttgcccaggctggcctcaagctcctgggctcaagccatcctcctgcctcagcctctctgagtgctgggattacaggcatgagccacctcacctggccacagctataatttcttctgtgctgactgttgaggggagagggtgctgtaaaatggccaaaatggttctgtcttgtcttgaactgattttttacttggagtggggcagggggagaccaataaatacagcctggtaaataactgaaataagtgcagggacttcaagggaagaaatcataatgaagatacaggagaacttgtttttcaaggataaatggatcttcacacttaaattgcaactgttaacaaattaacattgagctcagtaatcagactggctctaacaattaggtgataaaatagaatttgacttccttgtgaattggtactttagaaaatcctatttgtttaatttgaaattaattgaaattttaatttgaaactgggaaacaagcttattttatttttcaagacagagtcttgctctgtcccccaggctggagtgcaatggtgtgatcttggctcgttgtaacctctgcctactgggttcaagtgattctcctgcctcagccgcctgagtagctgggattacaggcatgtaccaccacacctggctattttttgtatttttagtagagcgagggtttcaccacgttggccaagatagtgtcgaactcttgaccttgtgatccgcctgcctcggcctcataaagtgttgggattacaggcgtgtaccaccgtgcctggccaaagctcattttatattagtaaaaataagggagctagaaatttgatgttaaattgcacagacacttaggtgtgttctttgcagaatagccaactgagagtacttttggctttaatacgcatgtcagaaagtcaggctgttttaagtttaatatctttgccccctcagaacactatgtggctgccgtgtaagagtggaactgtcgaatggtgaaaaaagaagtagaaatcgtggcccacctccctcttggggtcgtcgccctcgagatgattatcgtaggaggagtcctccacctcgtcgcaggtacttgagagaaagcttgttaagaggtattggtgtaatggagtagctagtaggagcaggtatttctcttaagtttgttggtgggttttaaactttggaagaatcggaggtttctgtgaaacatttgttgggtgtaatttggggtatgtgagttgtgctgagtgttggcttttgtctttaggtcactgttcatgttggtagtcagtaacttctatcttggatctgtcttctagttcatctttctagttgcatctttccaaatcttcccttatacttcagtttaggcctttttccatttcttggctccataatgacaaacattacattcaactctagctcttcacaaatttgtgttttctactattagcacaattgtaatatttatcaaacaggcagctgttttaatgttacaactggtaaagtagaaatcattctgagactaacttaagtcactgaccaataaagggggctaaaaaagaagtaatcccagtcatctgttcttcaatcccaaataggagaaaattcagtttttttataattgaaaatggcatcattcttggaccaggcagtattgtctgggtgctaactccacatctcctcagacctccaaaatagtttctataggactaaatttacctcttacaggtgagtgga

SEQ ID NO: 36051 - DNA, 2300 bp, Homo sapien
tgccagcagatccttgcgacagggctgggatctgatgcatgtgtgcttgtgtgagtgtgtgctgggagtcagattctgtgtgtgacttttaacagcctgctcccttgcctttttcagggcagaagtcctcccttagagtgtgtctgggtacacattcaagtgcatggttgcaaacttttttttttaaagcactgaatagtactagacacttagtaggtacttaagaaatattgaatgtcgtggtggtggtgagctagaagttataaaaaaaattctttcccaaaaacaacaacaaaaagaattatttcattgtgaagctcagtaccacaaaaatttaaataattcattacaagcctttattaaaaaaaattttctccccaaagtaaacagacagacaatgtctagtctatttgaaatgcctgaaagcagaggggcttcaaggcagtgggagaaggtgcctgtcctctgctggacatttgacaaccagccctttggatggtttggatgtataggagcgaaggtgcagacagcagtggggcttagagtggggtcctgaggctgtgccgtggcctttctggggtttagccacaatcctggcctgactccagggcgaggcaggccaagggggtctgctactgtgtcctcccacccctacctgggctcccatccccacagcagaggagaaagaagcctgtcctccccgaggtcagctgcgttagaggaagaagactgggcatgtctgggcagagatttccagactctgagcagcctgagatgtcagtaattgtagctgctccaagcctgggttctgttttttagtgggatttctgttcagatgaacaatccatcctctgcaattttttaaaagcaaaactgcaaatgtttcaggcacagaaaggaggcaaaggtgaagtccaggggaggtcaggggtgtgaggtagatgggagcggatagacacatcactcatttctgtgtctgtcagaagaaccagtagacacttccagaattgtcctttatttatgtcatctccataaaccatctgcaaatgagggttatttggcatttttgtcattttggagccacagaaataaaggatgacaagcagagagccccgggcaggaggcaaaagtcctgtgttccaactatagtcatttctttgctgcatgatctgagttaggtcaccagacttctctgagccccagtttccccagcagtgtatacgggctatgtggggagtattcaggagacagacaactcactcgtcaaatcctccccttcctggccaacaaagctgctgcaaccacagggatttcttctgttcaggtgagtgtagggtgtagggagattggttcaatgtccaattcttctgtttccctggagatcaggttgcccttttttggtagtctctccaattccctccttcccggaagcatgtgacaatcaacaactttgtatacttaagttcagtggacctcaatttcctcatctgtgaaataaacgggactgaaaaatcattctggcctcaagatgctttgttggggtgtctaggtgctccaggtgcttctgggagaggtgacctagtgagggatcagtgggaatagaggtgatattgtggggcttttctggaaattgcagagaggtgcatcgtttttataatttatgaatttttatgtattaatgtcatcctcctgatcttttcagctgcattgggtaaatccttgcctgccagagtgggtcagcggtgagccagaaagggggctcattctaacagtgctgtgtcctcctggagagtgccaactcattctccaagtaaaaaaagccagatttgtggctcacttcgtggggaaatgtgtccagcgcaccaacgcaggcgagggactgggggaggagggaagtgccctcctgcagcacgcgaggttccgggaccggctggcctgctggaactcggccaggctcagctggctcggcgctgggcagccaggagcctgggccccggggagggcggtcccgggcggcgcggtgggccgagcgcgggtcccgcctccttgaggcgggcccgggcggggcggttgtatatcagggccgcgctgagctgcgccagctgaggtgtgagcagctgccgaagtcagttccttgtggagccggagctgggcgcggattcgccgaggcaccgaggcactcagaggaggtgagagagcggcggcagacaacaggggaccccgggccggcggcccagagccgagccaagcgtgcccgcgtgtgtccctgcgtgtccgcgaggatgcgtgttcgcgggtgt

SEQ ID NO: 36052 - DNA, 2300 bp, Homo sapien
aggcagtgggagaaggtgcctgtcctctgctggacatttgacaaccagccctttggatggtttggatgtataggagcgaaggtgcagacagcagtggggcttagagtggggtcctgaggctgtgccgtggcctttctggggtttagccacaatcctggcctgactccagggcgaggcaggccaagggggtctgctactgtgtcctcccacccctacctgggctcccatccccacagcagaggagaaagaagcctgtcctccccgaggtcagctgcgttagaggaagaagactgggcatgtctgggcagagatttccagactctgagcagcctgagatgtcagtaattgtagctgctccaagcctgggttctgttttttagtgggatttctgttcagatgaacaatccatcctctgcaattttttaaaagcaaaactgcaaatgtttcaggcacagaaaggaggcaaaggtgaagtccaggggaggtcaggggtgtgaggtagatgggagcggatagacacatcactcatttctgtgtctgtcagaagaaccagtagacacttccagaattgtcctttatttatgtcatctccataaaccatctgcaaatgagggttatttggcatttttgtcattttggagccacagaaataaaggatgacaagcagagagccccgggcaggaggcaaaagtcctgtgttccaactatagtcatttctttgctgcatgatctgagttaggtcaccagacttctctgagccccagtttccccagcagtgtatacgggctatgtggggagtattcaggagacagacaactcactcgtcaaatcctccccttcctggccaacaaagctgctgcaaccacagggatttcttctgttcaggtgagtgtagggtgtagggagattggttcaatgtccaattcttctgtttccctggagatcaggttgcccttttttggtagtctctccaattccctccttcccggaagcatgtgacaatcaacaactttgtatacttaagttcagtggacctcaatttcctcatctgtgaaataaacgggactgaaaaatcattctggcctcaagatgctttgttggggtgtctaggtgctccaggtgcttctgggagaggtgacctagtgagggatcagtgggaatagaggtgatattgtggggcttttctggaaattgcagagaggtgcatcgtttttataatttatgaatttttatgtattaatgtcatcctcctgatcttttcagctgcattgggtaaatccttgcctgccagagtgggtcagcggtgagccagaaagggggctcattctaacagtgctgtgtcctcctggagagtgccaactcattctccaagtaaaaaaagccagatttgtggctcacttcgtggggaaatgtgtccagcgcaccaacgcaggcgagggactgggggaggagggaagtgccctcctgcagcacgcgaggttccgggaccggctggcctgctggaactcggccaggctcagctggctcggcgctgggcagccaggagcctgggccccggggagggcggtcccgggcggcgcggtgggccgagcgcgggtcccgcctccttgaggcgggcccgggcggggcggttgtatatcagggccgcgctgagctgcgccagctgaggtgtgagcagctgccgaagtcagttccttgtggagccggagctgggcgcggattcgccgaggcaccgaggcactcagaggaggtgagagagcggcggcagacaacaggggaccccgggccggcggcccagagccgagccaagcgtgcccgcgtgtgtccctgcgtgtccgcgaggatgcgtgttcgcgggtgtgtgctgcgttcacaggtgtttctgcggcaggtgaatgacgggcgtgggtcggtgcgcgctcggcttgcgcacacggtgtctctaagtgcgcgggtgacgagagtcgggatgtgccggagaccccggggcggagagcgggattacaagtacaggaatccctggtcacgctccccgcccctggaaacccagctggggcgagggagggcgtggacgggaccgttctgggagctcgcctttggctgcggttggctccaggccccaggcgcagtttgctcgcggcgtggggatgaagtccgtgtccctggaggggcccaggaagggcgaggaaagcggagtggagtaagttcgtctaggatcggtcccgggtggctctgggatccaatctgcgccgccctggcccaggtcccaggttcaggtcctttacgccactgtgtccacc

SEQ ID NO: 36053 - DNA, 2300 bp, Homo sapien
tttcataaaagttgtaccagtttatattcctgccaataatgtgtgaatgtgtttcctacatcctttatgacataatatatcactttttggatcttactaattgaatagctgaaaatgatgtctcggtgtagttttattttttatttttaccctcatcttctttgtgatggtacgtagttttatcttttatttctcttattatatttttataaacagaaatgtttacttttataaatatttttcatatgtttaaatccattgatatttatttttccatgaattgtttattcacatatggtgccaatttctctaatgcattattggtctttcattgatctgcaggagttctttacagagggaggaaattaacttattttctatgatacgtaagtattttttcagagtttgccttttgacttatcagtggtgacctttttttgccattcagttttatttatttttaaaaagtttccgtatggttgaatggctcaatattttcttttgtggcttctaatgctttgtgatatatctggaaaggccttgcctaatccaagattatttaaaaattatcccatgatctctttcttcctttttttcttctttctcttcttcttcttcttcttcctcctcctcctccttcttcttctccttctttattattattattttttaatggagacggggtctcactatgttgtccagactggtcttgaattcctgggctcaggcgatcctcctgcctcagcctctcagagtgctgggattacaggcatgagccaccacacccagcctatcccatgacagatctatctttccttccttccttcctctttttttctttctttctttctttctttctttctttctttctttctttctttctttctttctttctttctctttctttctttctttcttagtttctttcttctttctttcttttttctttcttctctttctctctctttctttctctctcttctttctctttctctttctctctcttccttcttccttccttcctccctccctccctccctcccttccttccctccttccttccttttctttccttccttcttctgcaaccatggcaaatgaactatgccatgatttcttatggcatttgttcaaacatacagaaaagcagaagaacataatgagcctgcagtaccctcattaactccagcagggatcagaacaggtccagagccagtcttgtttcatctatgtcctacctattctccacactcttcaataattttgaagtaaatcccaaacaacatataattatgtgattttgatttttaaaatgcttatgtcttttatccatctggaatgcttttagagttagagctctttgttttttgcagatacctagcccattctcccaacatagtttattgaataaaccatctcttctccaatgatttgaagtggtgcctttatgatacactaaatccccacaaatatttgagtctattcctgtcccacaaatatttgagtctatttcattattctgttccactgattcatctgtctatagtcatgctccaattccacactgttctgatggttgtagctctacagtgtattttggtatcagactagattgttccctaaaaggtggtttagatataaagcctcccctgaggctcaaagacactgtctgagagtgagggcctgaagtgaggcaggatgggcagttctcccggggcatcccatacacttagcttcagccacggctgtgcccatcaacctgctgctgtctgggataaggcattgccttggcaaccagagactgaggcccagtcctggctgtgccactaagggctgggtgatcttgagcagtccatctcactctttggagcctctgcttaggagggcctccctgccagctccagcattctccacttcaagacaccaatcagggcagggatgcctgggggtgccaggcaaaattgtgaaagggccgccagtggtcgcttccacaggaagtcctgtagatgagcacaggagattggctcgctggggaacggaaagggagattaagcaagacaagactgttaacagttctagagctcgtgggctccgcagggcagcagtcaccctaccaccaggtcccagagcccagggctgtgtgttccactgggagcctttgagaggtaggagccatcccaaggttgcaatgcttctttttctttggaaggatgaggatgggggagggagctggggtccctgtttaacttctatgtcaagggtgcaaaaggcagagccctcttttctcctgcatttggagc

SEQ ID NO: 36054 - DNA, 2300 bp, Homo sapien
gagccagcacagctcctggcccctaggagcccctcagtgcccccacccaccccacctaatgtgcgcaggagggcagattccagacctgtcctgtccccgcctgaccaccaagaagaagggaggtgacttagtggaggggcagctcctcggctggcccctaggtggcgctggccccctgcatgggattcaccgtggcggggctggagaggctgaggctgggagcatgaaacctcagggtaaacagggatctgagaacagaacattgctttaacattaaagcagttatatcagagagtggaaatgtggaatacaggctaatttaaagataacatagaaagcttagaagaaacatgcttgtggccaaatctttggttactctcaggactccgggttcattctccccagctgggagggctatgttggagcaaaagtttgagatgctgtccattccgatagttcaacaccctcaagggagagattgggaaactgaggcacagtgcagcactggggctgccattttgccctcatcttaacagcttgcctacttaagctgttttcccatgaatgtgtccgtgagcacctcaccatctgggtaaccccgtggagggggcgtcctccagtgctaaagagggtgctctggtcttctctcccgggctctctcaccatctcgcccaggccctcagtttctacctgcacagcttgccagacctcccacgtgaacttcccacctgtgccccaaatccagcgccttccttctgtgtctacctggtcaccccaacccctccctctctcgaacctctatagccacgcccagggcccaagaggcgtggtcacttcttgacagcgctgttctcaccatagctcagcacctgtcccaatacccccaagtcctcatgacctctcgcatggacttatggtggcagtaataatagtagtagtaattttgaaaaatagcaactaaggctgggtgcagtggctcacgcctgtaatcccaacactctgggagactgaggcaggaggattgcttgagcccaagagtttgagaccagccagagtaacatagcgagatcctatctctaccaaaaaaaaaaaaatagccagacatggtggcagctacctggaaggattgcttgagcccgggaggttgaggccacagtgagctatgaccccaccactgcactccagcctgggccatagagcaagaccccgtcttagaaaaaagcaacagacacgtatagataatacttactacattccaaactgttctaggcactttgcttgcattggcccatttaatcctcatacctttccgggaggcaggtacttcttattcccattttagagatgaggagactgaggcacattgaggttaagtaacctgcctaaggtcacacagctattattaggtggcagaactaggcaaatatttcctggatgagcctcctcctcccctcacactcacctccaccaggccccagtgtcctagagcctgctctgattttgtctcctaccagcttgggggtcatcagagttccctgcaggccgctgggtgacattcagacatttttcactgggcattctaggctctcctccaaccagcccagcttactcttccaccctgtggttctgccatcaaactgggcctgggttctattcatttctcccacagaacctcctctgacatccatctctccgtgcccagagccttcctgtgcctctaagtctgccttcaagacttcctgctccagagaggctttgctgacactctcacctagagtggtctttccttcctctaactcccctgacacttctgtgatcccccttgttccatggcccttgtcactttttgccctgaggacatatcttctctctccaacataggtgatagatgattccaggggagaagcaatatatgtctccacccaccccataaatgtatgtcaaagagatctgtttgtatctgttatcaaggtggcaccaatgtatgcaccactggcccgggggcaggaaacctggtttctaatcctgtcactacccagatggctgtgtgactttaggcaaatcacctggtgtcgctgtgctttagtttccttcttgctggaagtagatagcaatactcacccagacagaagagaccacggtaaagatcagctgacggcctctgtgggaacaaagacagggaaaggggaaatgagttcaccagaaaccaacaggcagcacaggaggtatgaaaattgcctggctttgtttgatgggacattagggaaaagttgtgcctagacttcccttattaaaaacaa

SEQ ID NO: 36055 - DNA, 2300 bp, Homo sapien
ataaaacgatgctaattattgttatgaacaaggtttcccaaggccctgtcactgggccaggcacacagcagatgctcagtaaacactcctggaatgaatggagaacatattccacaagcatgctttgagcattgtttatgccaggtatgtgggggatggggaacatagagattccgagttcagttttgcatcctcaggaagggaagacagaattattctccttggagtggggcctcctgacccagctgtgcctggctgtcaggggaattaacagcctctgtcccttgctgcctgttccaggaggcagaacccagtccagctgattctgagccatggggaaattgtaacaggcagaggaatgtgttcttgtatttatctttgactgacagtatctgatgttccaggaattgacttcaaacagaatccggaggagccccttatggtcccgctgccacaaacaaggcccagagagcgcaactctgcccagcccagcaccaggtttttggcctccccgccggcccgaggcacatcggcttcgatgtgccaggcggtgggcgaggaagtggaggttccagctcggcaaagcttaggctgaggctgaggatgggctagagtcaagtctacgtgtgcagccttactcagggagacgcctctgcgctgcaacctcatgcccgggagggcaaggctgggctagggcgggggatcgcgaggggcttggctgggaagaggactgcaggagaggtgtcccaactctcccctcgctcgccaggcacacagcacgcgcctactcggtgctggctgcatagaagcccagggagctcgggccgatctcccagtctggttgccaccagactgggtggcaggagcttctagacctggaggctggctcagtcgtgtggtcacgacgggcgggggagtggaagggcgctggcgcgtggtttcggcagccgacttggcgaggccgcggctggcgggaaccacggatgggggaggcgcccatgcaccgaccccacctgggccactgggaaaccgaggtagtccctcctggcactggggtcgcccccacacacctccccagaaggagatgtagggtctgtttctgaactgagacccgcccccgagtagggcgcacactcagcagagaccctccacacccaagcccctgggaggggatcttttttgcacacctccctcccacttatgccccctctcaaccctgcatagacctttctcaaaaaggcgcccgttggttcccataaccctccccctcccccaggatggagacccctgatgggagataggggtggtgagagggggcgggcgcaaatgaagatgcgcgcgaccaggaccacctcttgctgtcacccgccacgtccccagcatctggaccgcgtcccccggcccgccacgcgcgcacacacacacacacgcgcacacacacacgctcacactcaccctgcgcgcagaccccgcccgcggccccgccccggcccctgcgggcgccccctctggcgttcccgggcggcgggaggctgcggcttcgggcagatttgattttcccgcagcccgggcgccccggagccgaagcccgagccgaggaggtggcgctcgcagccgcgtctcagccccgtcgccgccggcgccaagacccagggagaggcggcgcagcccgggcgctcgggctccgcgctgccggcgccccgccacccccgccgccagcgccccatccggcgcctcccgctcctcacgcccctctccctgtcttctgcatcccctctacctctgcccacagacgcgcgtccctctcctggtgcccctctccacgactccgcgtttccctcccggtgccctctccccgagcccctctccccgcgcccctctctgccttccccgctgtgcccccgctccctgggctccttgcccttccccactgggcccctagcctcctcgcggcgtcacccgagccccctcctcgatccgcggcccccgctccctccgccctcttccctctctcacttcccacgccccctcttcgcgctcctctctcctccccttgccgcccagcccaggctctggagttgggggagagcccagggctccagtcgctccggaggaggcgtgaatcgcgcagggattgactaatttggggtggggggtgcggtgggcgatggagcagcctgaggacatggcgtcgctgagcgagttcgactccttggcgggcagcatcccggccaccaaggtggagatcaccgtgtcctgcaggtgagcctcccgctggccgggtccccttgccccggccc

SEQ ID NO: 36056 - DNA, 2300 bp, Homo sapien
ccaaaggcaagtagcacaaagccttgtacagactgaatggatggaataaagggccggaccttgcatggctaataaaaggcagggctggggcttgaatatggggaatttggatcccaagttctgctcttttcctatgatctccacctttgacatacagaggagaaagatgaggtgcaggaaaggaataatctggtggcagggcagaggttagaacctgaatctcctgccttactggctggggttgttcaactgacttctccatcctagcgtgtccccaggccaaactgactggctggccctagcctcagctgtctctacgctccttccaatcagagcctgaaccaggcctgtggaggcgcagcaggaggaagggcacacaaatgaccctcatcaggatgtttattggatcataactgtattatcctcaccactcagctaatctcatagaaatcgctttcctctccgtgaggatctggccacagctccattaagagctgctgccctgcatacctgtgaggaagctcttatacagcagaaatagtggagaggagagagaagtcatatttctacttcctcattacactgacgggggcaagtggcaatttcactgtataagaaaggccctcaaaggaaagggagttcgaagttcgtgattttgggggcaacattcggctccgaaggaaatgtttcctttgtgcttccctttttgaaagcatttgtgatgctgtttaagatcaaataagaaaagggaaggaatttgtgtttggggagctcacgacgtgccaggtactttatacatattattccattaatcctctctgaagagctgtggacagggcatcacaatgcccctctcatagatgagtctgtttcatagatgaaggcaccgccttagttgtctgggccttggcggggctgagctaggagtctgttctttccctctgttgcactcttaattcacacagggatggtttccctgccgttctttttcccctcctccctccagctgaaaaaatatggaaactagttttcaagccaggactagtcactgtctgactttgactttggtaacttcctttcccaagccttagtttttccatctgtagaatgagaggcccagactctcattctaactgcatctagtttaaacctctatgattttataatagtatttttctcccagggagctcccagtacatcctcatctaattggaatctcataccaactctggaaggaatggtagtatggttatattattaaccccatttttaagctggaggaagagaccagagaacccggcactctgttgcaaactcccccgccggccccctccgcaggccagctgcctccaaggggctgtcagcagcagctcctgcagcctgacacttgagccttacgcaggctcctgacagaattatcagagaactggggaacaaatacttcccgtaatcggggcgacggttcttagccagaggtggaggaggcaagatgtgaagtgtgtctgatgagttcctctcccagtgtagggtcagagctaataaaacccaaggaaatctcggcgggctgctggagatgcgagcgagcaggcgagccctgggggcagggccaccgggacttaagcttccgcacaaagccaggcttgtggcattttgtgcacatttcagttaccttcggcagccaggcaggcaaatacaagcagcttggcatgaaaatgaatttagagcttaaaagaaaagaagtgtttcaccctcggtggcttctcaggctgccccggtacaggtacagccaggggaggcaggtgccaaggagcagtggtgacaaagaatctaagggctggagtgaaatgtcagttcccttcccctcccacacacatggcctgagggagggaggggcggagtcctgcagcttgagccgataaccctcacagccgctggagcaggagagaaaggagaggccgcccacgtgaaaatcagctgctccgtctccgcccttgatgccaatcaggaaggcatcaagtgttgggaggctgagacttcagggtgggacctagtttgcttttaagcatccgaagaaatgtgaggactcattttccatttcccaagatgctgaaacaagaggaaatgggtttacattgaatggacagagagagagttcaggaggcctacgagtagactggctggcttggcgggtaatgtacttaaatgaaattaaacccagcacaaagaaagagaaggaggctgaggctgaggctgggaaaggccaggctgtggaggaccagggtaagaaggcccagtccctg

SEQ ID NO: 36057 - DNA, 2300 bp, Homo sapien
gtagaaatttaagtactaattgcctcatctttcactgtaggaagtcaaatattctgttctatatatatgaaattaaatgtaatatgttctgttttaaaaacaatagcttatatatcctatttttttgaaactacttccatttatcctgtcatcccttaaaccagacatgatgggcaccaaaagttaacactgttcctttctgaaagatgggatatttagggattagttaatgatggttagaaatctttaggagctatgcttatgaatgatttttccccttttctctgctttcttatatattctgtattttgaaatgcatccatatacattaaaaaaaaaaaaacccaaaaacctgaatgcttctgaccatagatgataaatcatgagacgattaagaatgacaaaaaagaacaagactgagaaaagactctgctatagagaaaaccaaacttgtttaaaggcaaacgagcagaaattagcagagaagaagcagactgagaagcaagggcccttgaaatgagtaagggttccaccagttcactaataaaccccatctaaatgccagtaactcccaaattaatacctccataccaggtctttccctgaaccccatattcctatccaactacttactcatgagcatagtcggccctccctacatgtgggttctacattcatgggttcaactaaccgcgactgaaaacatcttggggggaagcatctgtactgaacatgtatagaactatttttcttgtcattactccccaaacaatacagtacaacaactatttacatagtgtttacatcttgcccctacatctattctctaaacagcagctagagtgatccttttatttatttatttatttgagagggagtctcaatctgttacccaggctggactgcagtggtgcgatcttggctcactgcaacctccatctcctgggttcaagcaattcttctgcctcagcctcccgactaagaacctgagattacaggtgcccaccaacccgcccggctaatttttgtattttagtagacagagcgtttcaccatgttggtcaggctggtcttgaactcctgacctcaaatgatccaactgcctcgggctcccaaagtgctgggattacaggcgtgagccaccgtgcccagcctagagtgatccttttaaagcatagatcagatcatgtctttcctttgctcaaaactctccaatgactcacatcacatcttactcagaataaaacccagtctctaccatgccctataaggtatcatatcttatgatttccagcacaggttcctgcctcagggcctctgtgtttgctcttccctccatccaaaatgttctccccacagttgcaaggttcactttcttacttcattcagatctcttctccaataatgtcagagaggagttccctgacttttctactaaaattccatccccacacccttttcctgctttattgagagcaataattctgtctctttgtttataggtatctccctagagcttaaaaaagtatctgacacaaaacaggtactcagtatttgttaaatgaatgaatcgataaaagaacccaggattttattattctcaaaatattataaagtctttccttcttattgatcagactacttgcatcactataattcagacaaatattatttgttcttagtgagcagtacatgtaagttatgaaaaactctaccaagcctaggagtaaaggttggtttctggtcaattccacacatgtgtgtttgaggaaggcaggcgttgtcaccagaatcaaccaacacagaccttagtaagtggaaaagagagctctggctgccttatcacctatttacgacagagacttcagaaactaatgctggctttagaaaaaaagacgaaaaggagaaaaaaaaaagaaaacataaactaatgttggcttaactgtacctgtccctgttgggtcacctccttggatcatgaagtctttgataattctgtggaattttgtgccattgtagtaacctcgacgagccaactcagcaaagttcttacaggtctttggagcatgcttccagtacagctccagcacaatgattcccatgctgcagagggagaggacaacagctccagtaaacaaaaaggtcagggcagacaggagtattatggaactgctccaggactcttgattttcaagcttgtaagtcatgaaattgtgataaccactggatttcatgctcagcaaaggaaaacaccacaatgcaagtaacataaacacccattatcttttttgagtaaaaca

SEQ ID NO: 36058 - DNA, 2300 bp, Homo sapien
catctcacaaacatattgttaaggaaaggaagccaggcacaaaaaaatacgtactttataactccatttatataaaattcaaaaacagggaaaaccaatctatgatattagaaggcagaaagtggtctaccctttgggaggaaggaatgggtaatgattagtaggggggcttctgaggaattggagacattttatttcttgatttgatttgacccctcatggcttctggctaactccaatttattttctggatctcaacccaggctgtcactccaggggaaatttttgactgtccaaacctactctggagtaaccagagctcagggaaaactgtgtttcttcttcttcttcttcttcttctttttttttttttttttgagatggagtttcacttttgttgtgcagggtggagtgcaaaggcaaaatctctgctcactgcagcctccaccttccgtgttcaagtgattctcctgcctcagcctccgaagtagcagggattacaggcatgcaccactatgcccagcttattttgtatttttagtagagacagggtttcaccatgttggtcaggttggtcttgaactcctgacctcagatgatctgcccgcctcggcctccgaaagtgccagattacaggtgtcagccactgcacccaacctactgtgtgcttcttattacagtcctcattccacgctcctacagctacgtatttagttgcccatctctcctagaatgtgagtttctttagggcagggcactgtgtgtgtgagactcatctctgtctcctcagtgccaagtgactggtaggagctgcagtaaaagatttaggaagaaagtgatcatgatcttgggggtggcttttcaatattcagacattggagcctgggaatggcacatgactcccgagatacacagtaaagaactacataaagtccagagaaaggcaacttaacaacagactaaacagaccaaggattaagactttttcatccagctcaagggccacaaggtgggcatgaacttgaaactgcaggaggtgtaaaaattatactttagcatttatcagtttaaaatgtagtgttccgttcattattcattcagcaaagctgagcaccctgtgctctgtactgtgcaagaagagcacaaagatgaaggaggcccagctcctctctcaaggagctgtctagtttatctttacaaccttgtacatccttattccttgttgacaattagggacattacagttgaactgtcgttaagagcacaagtgcaccagctgtagtactttaagcaagttatttaatctgtaaggctcagcttcctcaaagtaaaatgggaatagtaatatctaccttgtgggattttgaagattaagcgtgaaaatacgcaataaaatgcttagcttgatgcctggcacatggtaaacattcaaccatcattattaagtggtgtgcaaagcatttacagcgttaagtttaggtactctatttcatttttgtcctccctccaaacattatagctcctctaatttgcttctgttcctcgcgccctgcgcaaaccctcctaacaactttcaggtaccatctatcccagccaatgttaagccttgttcttgctctgatccgtttgtcctgttttctcctgtctcttcctttctttatctcctattttcttcctgccccttccctctcttttctcctcagactcctcgtctttggattctgcaggctcagatttgctttatgactatggaaaaacaagtattaactgccgagtctattttcagatctgaaaaatggtaataatactatctacttatagaattgttttgtggagtagatgagataagaaagtgcaagcactgtgtacatcgtacagcgccttacaaaaattctttactggcatctctaaactaccctctttcattctctgcctccccttcccgtccctgcccaattgtgagactaagaaattcttcgaatttaatattaggacataactccaaccagagcgcagcttttctggttgttcccgccttccatgcctaaacgaaccaatcagatcgcccagagtggcgcggtatcgccacttggagaccaccgcgaatgaagtttgcattttcctctgttcttgagcccagcttcttctcgtctcccaccccagcttcccggcattggaagaagggaccgtcctcttccttgtcttggccacccaaatcctggtatcgaaagggttgaacggaccggaagtgtgcagcagcgacgggtccccagctaatcgacgccggaagtagcaattac

SEQ ID NO: 36059 - DNA, 2300 bp, Homo sapien
tagaataaaagaggcaataatttgaaatgtctccctcataataggctctacagcaaattctactttaaaggctatcgttacacaacagactttaaattctcctttgaaaattatactaagtaatagaattggctaaacagaaaagtacctgtgcagctgttgacacctgtggcctatggagaaatacagcaaatgtaaattataaacaattctggccgggcgtgatggctgacacccgtaacctcagcactttgggaggcagaggtaggcggatcccctgaggtcaggagtttgagagcagcctggccaacatggcaaaaccctgtctctactaaaaatatgaaaattagcctggcgtggtggcaggtgcctgtaatctcagctactcaataggctgaggcgggagagtcacttgaacctaggaggtggaggttgtagtgagctgagatcgccgctgcattccagccttggtgacagagcaagactccctctcacaaaataaatacaataaaaataaatatccagttgtaggggattagtgaaaagaccacttagtcaagcaaggagactcttcatctaactcattcttcaatctatttaattttaggtggtttggcttatggggaccctgggtaaggagcatactccaaactcttgctattatccgcccgataatgataataatagtctccctggtgcactgtattctctcaaagattttaaatgcttgcatgcagccatctctacaacgtcaaatgatctcttttcaactggaataacaaaaactgaaagaaatgtgtgaccatgaaggcaccgtaacctatgaatgacatgctgagaccagaaacccaaaatgatgtaactgagagtggcgctaaggccctaagttctggtcacgctgtcacctaagtaagaacctggccaaaagtgaggaatttttttttaaacaaaatcatgggaggccattattttggactgagctcatgcactaggcaccaacaaaccaaaccaaactaaaatggagtcactcatgctaaatgtgacataatcaaaccaaggctttaaaaaaacacaaaatgctagaacagaccaggttttttctcctgtaaacagatgtttcagaataaggaggtatcctctactcagcccttattctcttcctgcaaaacccactgttctactgtttcctagtgagtttcaaaaccatacaggtacacttatgacagcgataataacatcaatgaccaaggttttggtcaatctctcaaaattgagaaaatgaccaaaacgggggaattgttaaggcaaactaaatatggcctgagaaggactctgtccttctatatttgagtccttgtggatgaactgtaacatagcttaatagtcaaacaaaattgaaaacctaacttaatagtatacacctgtaacaataactgagtggtggccaatcccagcggccatacttcaaccactcacagcctgctgaatgttcaatctgcgttcaaatcaggcaaacaccgagctgtaaccaacctcactgtttctgtaccttacttccgattcctgtgcctcactttgccttttttatctataaatttgttctgaccatgaggcaccctgggagtctgtgaatctgctgtgattctgggggttgcctgattcgtgaatcttccattgctcaattaaactcctttatacttaattcggcttaagtttttcttttatcaacagagtaagctctcactaatgagtgggctgagtgaaaactggagggatttgttcgtctttctcaagagtagtagcttccagaaggaaggggctgctcttcatttacatttcccttccactcccatcccttaatgcctaacatgctgcctggcacatagtaggggactcagtaaatgcttgttctatggatcagttcagctatgaagtctgtgtgagccagtccaggtaaattaggaagacaaggatttaggactggggcgaaaagagccagaacggaagaaggacgccagggggagcaagaacctacactctccagatatcgcgagaggtcccgcgctcgccacgacactgagtgttctgttttgggcggaagcgctggacgagaggaggaattactctagggtacaaggcctcgcccaggagtggggggttgcttccgggtcgcgctcccggaaacaggaagttgcccatcctcctcgcccggcggcagctgtccccgaggcgggaggagcccgaggggcgcgagccccgcatgtgagtgactggggcccgaggctgggtggggggaggcc

SEQ ID NO: 36060 - DNA, 2300 bp, Homo sapien
ttatcatatttgacactgaataagaagcatttgaaaatattggagaagaaaaaatgcaactttgcagcctcagtgtgccactgaaacaggtggtactaaagggttttcagctacccccagagtactgtgggaggagaggcgccctcccaggagcagggtgtagcggtaatcctctgactaataatcttcctgcgagttgagactggctgagaaaggtaggtggcagttgcctccaggaaacacagatactatcttcaagagatggaggatgctcagcagaccggccaagaacaaacacggtctttccctgacgaggatttcctatgccccactactactgcctcagagaaaacaagcatgtagtgcttactgccaaccacagaaaatgttttgtggttaagagtcagtttccaagtatgtttattggtttaaaaaattgacttcgtttcagccacatttggttgtctgttatcatttgtcgtaggctctctcctgatttggtttccattgggttttaatcagaaccgtcttctgaaacgttttagattcaaagcagagtttaaaacaaacacatctctcagagaacctagacgaaatccaaaatggaacagaaagtaaacaagaaataatgaaataacattataaacagcatggtaacagagggaagctgggaaaggctgtgcagaaacaagagcccctcagagaaggagccaaaccagacaggcatgtcagggagccgctgtcacacagcagggtctgggttgggggtcttccatttctgaccagcatgtggggctggaaactatggctggcggccccaccccctcctgagctgggatagagggctgtcttatggacagatgcaattcactttattccaaagatggctccagaaaagtcctgtctaccctctccatccctttcctcttctgtgtccttttctcactcttccttcccggagtcctggctcccatgtgtacttgtgaagcaagggtctatgcacacatccagcatgtgtgagaagtgcattagggcacagcgataataggggtcacccttctatccacaccagcccccctgtgctgtagacgtttcagccatatgggtcataggttagaaaatgttgggggaactacatctttagctccacattgctgaatgtttttcctagctgttatgctttatttgttgatttgatttaggaaatgcatgacaggttaaaagatattttccacaaagtgtaaaaaggtatacagagaagagtacctctccttcctgctcctgtcctctactccctcctcagaggctgcttcatatataccttaccttttcagcggtctccagtgcttatcattgtttgtttttaaaaattattatgggctggatgcggtggcttgcgcctgtaatcccagcattttgggaggccaaggtgggcagatcatgtgagcccaggaattcaagaccagcctgggcaacatggcaagaccccgtttcaactaaaaatacaaaaattagccatgtgtggtggcatgcgcctgtagttccagctcctcggaaggctgtagcaggagaatcccttgaacccaggaggcaggggttacagtgagctggacggcaccactgcactccagcctgggcgacagagtgagactctgtctcaaaataaataaataaataaaagtcattatgatgtctttcctttcttgtttcattgttggagctactggatgtaccagctatgctctttcagtatctgttttctccatatcccttcctctctcagactttgacccctggtggacaaacgactgtgagcagaatgagtcagagcccattcctgccaactgcactggctgtgcccagaaacacctgaaggtgatgctcctggaagacgccccaaggaaatttgagaggctccatccactggtgatcaaggtgagcagaagcctgagtctcccgctgattggctgcttgcttaaaggctaggtcaagctctaggaaatttctgacaagtaactctgtgttgttttgttttgtttcctgccttgccaagacgggaaagcccctgttggaggaagagattcagcattttttgtgccagtaccctgaggcgacagaaggcttctctgaagggtttttcgccaagtggtggcgctgctttcctgagcggtggttcccatttccttatccatggtgagtgtgaaaagggccgggcacagtggctcatgcctgtgatcccagcactttgggaggccgaggcaggcagatcacttgagcctaggagttgcagaccagcctgg

SEQ ID NO: 36061 - DNA, 2300 bp, Homo sapien
ctgttccttttatttttttctctctttattattcttttattgacaccactagatagctggccactggtcatgccattgccaagatgaagaaaaagcaaactacactttggcctctggttctgaattgcagaaatcaaaggatgcagtaggtgtctatgtcagaattatggatcagaggcagacaatgacgagtgaagatggttgtgaagccctcttcattcctggaggagcctgcatctcatctctcaggccctctttctctgtgggtctcatgaacagcagtggggaccattgagcacttgaatggcctgtttgtctatgggcttgcaaaggacaagcagagttcacagagctcaggatagaaacatcagagcctcctccacgggcttcagtgaaactccgatgaactgtacctgagggaattttttcttaatcaaccccttgtgtggatgaatacaggaacaacaaaacttgtgtacgtatgaaagtcatgttgttaagcagttatgatttaagaggttttaagtcagagggatcatctggaggccggctttgtgcaagcttttacagccttctgcagtgtccttaccctggctgtacatggggaagggctatgtgtaaacaagtgctttagaggcctctgagagtttttaaaaatcagacccattaacaaaagagagggtttcttaggaacaaagcaactattttgattactgagatctctgttttgtttctgtgagttactctgtattcctttccccatttcactcttgcccttcacatcttaaatgtccataagaaacccttgcatgtgttggtattctgaggcatcccgtgggaaagtcccctaagtcccattttgtacttcaacaaaaaatgactgtagcagaagataagtggagacttttatggatatactactcattttacttaaaatctacccagttcagacttgaatgtaaacttgtattaggggaaaattctccaaagagggttttctacatacacagaagcagttcaacttctcaagttaattttgataagcagaatctactactggccagagcgacaggagtggctaggggttgccagccagtccctttctgatgatcaaggccctgcacagcaggatgccacaggatgcccctgccatctagctggaagcatcaaaagtccctctgtatgacccggtgtgggaaagagggttgtcaggatgagaaagtggggctgcagggtgacgataagaccacctaaccaactccccacctccaccaccacaataagaacaaaactgtagggctctaaagagagggggtggtttacaagtttattgagcatttactaggaagtgacatggcgatgacctctgtacatgagttaggttcactttcatgtggcctcccactacagagatgcgtatgcccagaagtcagctctctgaggagacaggctactttggccccagtttgaagcattctgtccaaatgtcctgagctctccagcagtcaagtagtgaatggataccatacttattatggttgatgaaaaaaggcagagcttatcctcaattttttttagggaagagaaggaataaaataaaagtggttcaagctgggcatggtggctcacacctgtaattgcagcactttgggaggctgaggcaggcagatcacttgaggtcaggagttcaagaccagcctggccaacagggtgaaaccccatctctactaaaaatacaaaaattacccaggcgtgatggtgggcgcctgtaatcccagctacacaggaagctgaggcaggaaaattgcttgaaccggggaggcggagattgcagtgagccaagattgtgccacttcattccagcctgggcgacagagcgaaactctgtcaaaggaaaggaaagaaaagaaaaaaaaaaagagagagagaaaagaagaggggaggggagggaaagggaagggaggggaggggaggagaggagagcagattgggggggctcatgttctgagagaaaggaataatagcatttgtctagtacattccagtttacaaagtgcctgatatacatgatctcctttaatcttcacccaatcctgtaaagtaggtgttagatccccattttgcaagtaaataagtggaggcttagagcagttaaccgctggcaggtaggtagctggttccatagcacatcattttcctgcggcatcacggcatggtgccgaagaagacagctgtggatgtcgttgactcagatgtgcctccgttggggtgggagaacccagggatgggggtcagcaagc

SEQ ID NO: 36062 - DNA, 2300 bp, Homo sapien
tgttttgtttcttaataatagccatcctaatgagtgtgaagtggtatttcactgtatttccctaatggtaagtgatgtcgatcatcttttcatgtgctaattggccacttgtatatcttctctggagaaatgtcttttcgacaatgaataattgcatgaataattgcataaatgaacaatgaattttcaagtcctttgcctatttaatcaaatttttttttcttgagacaggctctccctctgttgcccaggctggagtctggagtgcagtggtgtgatctcggctctctgcagccttgacctcccaggcccaagcaattttcccacctcagccttcctagtagctgggactacaggtgcatgccaccatgcccagctgatttttgtattttttgtagagatgaggtttcaccttgttgcccaggctgatcttgaacttgtggtctcaagcgatcggcccgccttagcctcccaaactgctgggattacaaagtgctgagccactgaatcgacttcaaattgttttgttgttgttgttgttgttgagttgtaggagttttaaaaatatatcctagatattggccaggtgtggtggttcatgcctgtaatctcagcactttaggaggccaaggcgggcagattacttgaggtcaggagtttgagaccagcctggccaacatggcgaaatcttgtctctactaaaaatacaaaacttagccaggcatggtggcgcatgtctgacgtcccagcctacttgggaggctgaggtgggagaaccacttgaacccgggaggcggaggttgcagtagccaagattgcgcgagtgcactccagcctgggtgacagagcgagaccctgtctcaaaaacaacaacaaaaaacccacaaaatatatatcctagatattaatcccttatcagatacatgatttgcaaatattttttcccagttcatgggaaattgtgtcttttttttttttttcttttgagactccgtcacccaggctggaatgcggtgactggatcttgactcactgcaacctctgcctcccaggttcaagcaattctcctgcctcagcctcctgagtagctgggactacaggcgcctgccaccacacccagctaatttttgtatttttagtagagacggggtttcaccatgttggccaggctggtctcgaactcttgacctcaagtgatccacccaccttggcctctcaaagtgctgggattacaggcatgagccactacactctgcccccgaaagttcttaattttaatgaagtccaatttatttttgttttgttgcctatgcttttggtgtcatatccaagaaatccttgccacatccaatgccaagaagtcccccttatattttcttctaagagttttgtagttttagcttttatgtttaggtatttaatccattttggagttaattttttaatatacttacggtaaagattcaacttcattatttcgcatgtggacattccagttttctaagtcttctttaaaagacttgcctttccctcgttgaacggtcttggtacccttgtctaaaatcatttgaccatatgtgtaagagtttatttctgggctattctattccattagtctaaatgtctgtctttatactaataccacactattttaattattgtagatttgtggttacatattaaaatcagaaactgtaagacttccaattttgttctttttcaagattgttttgactatttggggtcctttgagattccatataaattttaggatggatttttctgtttctataaaaatattatgatttgcatttcaatagggattgcattgaatctgtagattgcttcaggcaacattgacaccttagcaatatcaagtcttctaatccatgaatataggatgactttccatttatttgtgtcttctttcactttgtttgtcaacacttgtgattttcagcgtacaagtcttttgcttccttggttaagtttattgctaagggccaggcgcagtggctcacacctgtaatcccagcactttgggagaccgaggcgggcggatcacgaggtcaagagatcaagaccatttggccaacatggtgaaaccccatctctactaaaaatacaaaaatttgccgggcatggtagcagctatggtgggcagcatggtgggcaagtagtcccagctacttgggaggctgaggcaggagaatcacttgaacccaggaggcagaggttgcagtgagccaagatcatgccactgcactccagcctgggtgacagagcgagactccatctca

SEQ ID NO: 36063 - DNA, 2300 bp, Homo sapien
tgttttgttgcctatgcttttggtgtcatatccaagaaatccttgccacatccaatgccaagaagtcccccttatattttcttctaagagttttgtagttttagcttttatgtttaggtatttaatccattttggagttaattttttaatatacttacggtaaagattcaacttcattatttcgcatgtggacattccagttttctaagtcttctttaaaagacttgcctttccctcgttgaacggtcttggtacccttgtctaaaatcatttgaccatatgtgtaagagtttatttctgggctattctattccattagtctaaatgtctgtctttatactaataccacactattttaattattgtagatttgtggttacatattaaaatcagaaactgtaagacttccaattttgttctttttcaagattgttttgactatttggggtcctttgagattccatataaattttaggatggatttttctgtttctataaaaatattatgatttgcatttcaatagggattgcattgaatctgtagattgcttcaggcaacattgacaccttagcaatatcaagtcttctaatccatgaatataggatgactttccatttatttgtgtcttctttcactttgtttgtcaacacttgtgattttcagcgtacaagtcttttgcttccttggttaagtttattgctaagggccaggcgcagtggctcacacctgtaatcccagcactttgggagaccgaggcgggcggatcacgaggtcaagagatcaagaccatttggccaacatggtgaaaccccatctctactaaaaatacaaaaatttgccgggcatggtagcagctatggtgggcagcatggtgggcaagtagtcccagctacttgggaggctgaggcaggagaatcacttgaacccaggaggcagaggttgcagtgagccaagatcatgccactgcactccagcctgggtgacagagcgagactccatctcaaaaaaaaaaaaaaagtttattggtaagaattttattctttttattctttttcattgcttttataaatgaaattgttttcttaatttcctttttggatttttcattattagtgtatagaaacaactaatttctatgtgttaattttgtatcctgcaactttgctgactttattaattctaataagtgtgtgtgtgtgtgtatgtgtgtgtaatccatcttggttttgtttttatttttacttggagactcaggcagggacaggttttcttgtcatcttccaaagcctgtgggtagactttttctaggtccctattcattgaagaagcaggcttcaaggatcccagctgtcctcaagagtactggttccagcttcctgcttcatgaaccggtcatggcccctgcaaggtcaaggtcattataatgccagcacctgactgctaaggctatttcccttccaataccttcccctcagagctcctggtgcatcagctcattcaaccttctgcttttctgctctctcttgatttaagaaacagacacattatatttctacatagttagagcacaggggtcccagcatcccacttccaaatgagcatgtcaagcacatgcattcagagaggatacctggaagccaaaattttgccatagtgaaaggccttattcctgaatacagctagagtggggaagaccttggcctctccccccgcaggcaagaatgttgcctccacagggggctggtagcctgctaaggcccaggccacatgagtgggttgtctactgttactgagggcctactatgtgccagacaccatactaggtgctttacatacattatatgtcattgaatcttccctctagtcctgtgagataggtactattattgtcactgattcacttgagaaagctgccaaaacacagatagcaaggggcagaaccaggattctgatttaggttggctcagccttttatcaaatacatctggtcttcctctgtcctttcaaaagcctatagcttcctcatcttgcccactcctctgtgggtagggtctgtggtttcctttctcttatctatcttcaacacacagtgggtgtgacctgggtgcaaccagtcacagctctgcagaggttactgtgattttgcccctgaaggatctgtccacaacttaggaactcacacagcttttggcctgagcccccgttaccaagagaaaggaggtttttgccaaggactccaaggggagtgcacttgatgctggtcgggacccaaagcgcccagccctccctgagacattgt

SEQ ID NO: 36064 - DNA, 2300 bp, Homo sapien
cctacttctttccttttaattttctttgagatggttctattatctcaagttcttcctgttttgcccattctctctcatgatggcacgtttctttgagcggctcatacattttttattgtgaggattctttttttcttcctcttggagtctctgtgagccctgagttgtagaaatacagctattgtgcagtttaacatttgcttctgcttggtaccctacgggtctaactggtttagctgatctatttttccttcaatttcttcacttggagaaattgttcgatcatttagaaatactttactgaacatgtactatgtgcatagtcctatatctgatgttgtggaagatacaaaacaatgcaagacaacacaaagttgctgcttcacatgaaactacagtttgaaagggccaaatacagtataggcccaaagttaggtgaccatgtaaggcagagtaaaaggctcaacggtgaacagccaagttcagaaagaaaaacagacagttggagaaaaatggggacgaaaagcccaaagaaggaaaaggttcctgtgaggaagtttcagaaggatggggaagtaaatcatcctcccctacccccaccccccacccccaaactaaaacctatcgcctcttctgggtagagagttagtgtggcactaggaacttgactttgaggtccttattgagaaagctaaatcagaacctaggcaaaaggaagtcatttaaggtgctcctgggggatgtttgatgaaaattgtgtttgatggagaaaacacagcaagttgaaagggttagcaggctttgcaagtgatttcactaggacaagcctgggttagggaggccaaggtgagggagagagggagtgtggcatgctttgaacgtggaaagtacatagtgttcattatcaggagtgggaagaggggaggtagctttttagggggtaaggcaggaagggagttagaaaggacagactgggaaacccggactaacagtggcaggtgtcgatctaaagaaatttctcacaatgaactggctatagactaagtacagacaaagggaccaggtcttccattgctgtgtccctgcacactctaggatccgttcaaacagaaacttttattgcgaacccccaaaactagcacggttctgttgtaggtgttgttgcagagtgtcgggcacgtttacaaacaggaacagggcacttgctgtcctatcttcctcgcagggttcttgtgacgattacacttaaatcaacacgtataaagcattttaaaaagtgcctgtcacatagtccctgcaatttaaggtctagttgtgattattcacttgtattaactaagaatcaactacaggcgcctagcagtgcctgcatgtgctcacactgaggcactcactaaaaccctcaggatctagtgagggagacagtcaaatactttagagcaaaacaaattttacaaccacggactctgaggaaggcgtgcgaaggctccacagctggggagggtgcccacagtcgccgaggggacatctggatttgctctggttgggagagcattcctggcagaggagatggaaaatgcgatcggacaaagaggctgggaccgcggaggggatcgggctcggggtcggggctcgtcctgcagcaggagattcagctcgcgcagagttccacgcaggccgcggcgactgggatctgggccgcaaaggggcgggcagagaactgcagagaaaactcccgaagccagggaggtggcttggaagcgcctcagaccatattggggacgtctggcagccagaggcgccgaaccccgcccccgcgtgctctgggcatcccgggggagcgccccggcctgcggctgccgccacagctcccgagcccggggccccggctgcccgccaccattgacccccggcccgcagcccagtgtcctgctaggcctccaaccggccggggagccacatccggcgtgtcccacccgccgcaccacgctcccgagctcccccgcggcctggagtggtgcgccccggccccgccccctgacgccggtgagggggcgtggccccgtcacgtgacggggagtgacctcgccgccgggcgccatgggagcttcggacccggaagtggcgccctgggctcgcggcggtgccgcggggatggcgggagccggagctggagccggagctcgcggcggagcggcggcgggggtcgaggctcgagctcgcgatccaccgcccgcgcaccgcgcacatcctcgccaccctcggcctgcggctcagccctcggcccgcaggatggatgg

SEQ ID NO: 36065 - DNA, 2300 bp, Homo sapien
ggttcttggctgggcgcggtggctcatgcctgtaatcccactactttgggaggccgaggcaggtggatcatctgaggttgggagttcgagaccagcctggccaacatggtgaaactccgtctctactaaaaatacaaaaattagctgggtgtggtggcacacacctgtagtcccagctactcaggaggctgaggcaggagaatcgcttgaacccagtggggtgaagattgcagtgatccgagattgcagcactgcactccagcctgggtgacagagtaagactcagtctcaaaaaaaaaaaaaaagagagagagagttctcatcttctagatacacactaaaatgtttatgggtaatgtcatctgacatctgggattttcttcaaaatgacatgagaaggcagagtcgatgtggctgcagcagggacaggggactggctgtgagctgaggtttgttatggtctggattaggggttcatgggatgcattatatgattctgtctagttttgcatatgttctaaattctccataataaaaagtaaaaaacaaaaatggaggtttgtgagacttagggtttggggcagggggcccggcatctggtgggagaaaccactcagacgaggcttggggtgagggcggctgttgggcatgtgaggccccaggggttcacagttactggagcgtgaagctgttccaggcacttcacgtaccaagagcaccgaggctcaggccctgcactccaggacacagaccaggttcagtggagagccctggtgggaccagagcccagtgggagggccctgaacggcctgtggggcttgaaggaggggaacagaggcagcgtccatttgttctgtaagggccgggagaccaggtggtaaaggaggcctcaggcaaagacaacccagtgtcctgggatcagggaggcctggggatggagcagcaagaacatggtcatccaggctcccaacgaacctttgctggaactgtaggacacccacttttgctttggaaatccaacttctcttgtattcttcctgggtgaccttgggcaagttacttaacctctctgattctgtttcttcctatgtaaagtggggataggaatagtacctacctcatgaggttgttataggattaataagaaaatactcataagcatgaaaaagagtgcatgttagctattattatcctctgagtttcagggaggaaactgccctcccttggggcaatgaggtgatgacagcaacaactaaaatgagagaaccccagtggggaggtgggaacatcacagtactccctgccacccttaccaggtttgtgattattttaaataaaacatgctgtttcctggccaggcacagtggctcacatctgtaatcccagaattttgggaggccgaggcaggaggatcacctgaggccaggagttcaagaccagcctgagcaacatggtgaaaccccatctctactaaaaatacaaataattagcagggcgtggtggcaggccctgtaatcccggctactcaggaggctgaggcaggagaatcgcttgaaccgggaggcagagggtgcagtgagccgagatcccaccaccgcactctgtctctaaagaataaaaaagacattatttccttacagctgtgagcaggggcagatgcagaaaagaaggtgctgggaaagaggccaagtaaaagccactggaccttctgaaggagaaagtgtggttggctggaaccactaggccaagaaaccagccaagggtctggctccgggtggcctttttttttttttttttttttaagagacggtgtctcactatgttgcccaggttggtcttgaactcctgggctcaagcaatcctcctgcttcggcctcccaaagcactggaattagaggtgcaaaccactgcaccagcccagactgggctccagaagctacctctgggccctgttgccacctcttaggtggcttctggaatgggggtctacaggtgtgaaaggtcagcccccctgagggagaggtggggcccgagcaggctcctcccactgcgggagtgctggcctttcccctgcagggctgtggctctgggaccacttcctctttcttcactctgaagccaagagccgaccttctgagccctcaagaaagatcagaacagattcatgggtgatttagcctatctgtcccaggccagcgtggctgagtgtgctggctggaggcctctctctctgcttcgagggtagctgagatccaccccggaaaccggcaggatgaagggggcaagtgaggagaagctgg

SEQ ID NO: 36066 - DNA, 2300 bp, Homo sapien
agctgtcttccccctttttctccttctctcccctccaatcctccgcaggagccagagaagaagatcgtccaggagctgctggagacagagcaggcctatgtggcgcgcctccacctgctagaccaggccagtgaccaggacacccccctctagagccccagccctgggtctcctcacctcaccccttctcagccttcccaccctgctcaccagagctgagtcaggagccctggctttgactccaggaagccttggccctttaacctcaatggctggggttggggtagaatcaggaggtcttgttagcagtactccccattctgcctgtggtgcccaggctggcccctgtatagcagagaacacaccagctggcccttgctggcctacacggtatcttcatctgtcatctcaatgcccacaacctcacaacgatcttacctttcatagtttttcaggagccctaaggctagagggttattcatcaccgcagggagctctagtctgatgaagtccaagacctccacagtttgggcctgtttatggcattcatcagctgccagcctttggccaagtccctgcatctctaggctttgccttgctcatctgtaaagtggccagaacacaacctcccctgccttcttttcccggggttgctgtgaggatgccgggagatcagggaggtggaagcatgcagtaggcttggtgggaccctagttcccccgggctgatgtgtgggtggctccctgtcactgcagtgagtgacctgtcgtggcggctacaggtgtttttccaggagctgctgaagacagcccgcagcagcaaggccttcccagaggatgtggtcagggtcatcttctccaacatctcctccatctatcagttccattctcagttcttcctcccagagctgcagcggcgcctggacgactggtgaggtccaccaggagcccctgaggcctcagaccacagccctggccaggtggaggtggggagaccccagggcgctaggttcagcctcctaggcccaggcccttattgtgtggccatgcctccctggggctcggtctgtctgcacagtgaagggcttgggtgaatgagctctgagaggctgtgtgtgtgcagactgcttcctggggaaaggggtggatcaggtcctggccaagccaagtgaccaagtgactttgggacagtgaaaatagccagtgccaactgagggcttcctacacgcctggccttgggctttccctctattaactccctcaatcttcacatcagcctgctgtgtgatgacggcatcatggttatgcaagaaaccctcttgttttcacagatggccactaaagcatttaacagtgaagttacttgccttatatagtttgccacgaagtctaggatgtcctttaagatctttggcaaagaagaatgctagtaattgttaaacctagtgatgtattgattgcttaaaacatttataataaactgttgtttttttttaagataataatagccaggttcggtggctcatgcctgtaatcccagcactttgggaggccaaggtgggtggatcacttgagcttaagagtttgagaccactctgggcaacatggtaaaaccccatctctaccaaaaatacaaaacttagccgggcatggtagcaggcacctgtagtcccagctactcaggaggctgaggttggaggattgctggagcccggaaagtcgaggctgcagtgagccatgattgtgccactgcactccagcctgggtgacagagagagaccctgacttaaaaaaaaaaaaaaaagaaagaaaagaaaagagaaggatataaccctatgagatcgcctgccatcattccaatttttttcaatgagaaaatcagggtacaaagatgctaagtgacttacctgggaacacagctagcatgatttgtgcatcccaggagtcaggctcaggaagcctcactcccaggccatggccatggctccctgctgctctgctctagcaggccctgccatgggatgatcctggaaaagttctgtgtgtgtgtgtgtgtgtgtgtgtatacatatatatacgtgtatatatatgtatatatattattttttttcagtgtgaggggcatggaatgaggtttcaccatgctgctcaggctggtcttgaactcctgggctcaacctgcctgcctgcctcaggccttgcagagtgctgcgagtacaggtgtaagccactgtggctggccaatcctggagaagttcgtacccctctgagcctccacttcctcacctctatgatgggcta

SEQ ID NO: 36067 - DNA, 2300 bp, Homo sapien
gggttatggtgagctgccctggaagtgtgcaaaggcctggccaccacatgggaggcagcagaggagctcaagtgtttgaggaatttaatggcaacaaagttgccccacacagaagctcttgtgctctcagcctgtgtcttaggttctctttgcaaatctctctccacaccgtctgaaggaagtgtgcttacaggactctgggggtaggatggaaatagatgttcttccatctcacccttgggggctgaaaacctggggtggaatccttcttttgccccttaggtgctgtgtgacctcaggcagctctcttgccctctctgagcatccatttcctcatctcctaaatgaggatgatagtatctgcttcccaagattgctgtgaagattattttcttcttcttttcttttcttttctttttttttttttttgagacagagtctccctctgtcacccaggctggagtgcaatggcacaatctcagctcactgcaacctccacctcctaggttcaagagattattgtgcctcagcctcccgagtagttgggatgacaggcatgcgccaccatgtccagctaatttttgtacttttagaagagatgggtttcaccatattgcccaggctgttctcaaactcctggcctctagtgatctacccgccttgacctcccaaaatgctgggattacaggcgtgagccactgcacccagccaaggttattttctttaatgttttattatgaaaattttaaagccaagaaaacggtataatgaacctcatatactcatccagttttgaaatctaatttccttttttgttgaatccattgtcaaaaattgtcatctccacgtcacactgggtcaacttagctgctgctaaaattccaggagccataggttccatttgcttggagcgaggcccagttgcaggggcatttgcttggctcaacaggattagagaggtggcgaacaagctctgcatccctgtctctcgaatttgaattgtcccttgggcacaatccacctccctcccctccacagtgctgtgcctgggacccgggctatgatgagtctgaactggttgcctccctcctcttggcaggtgcgggagctgatggatgctgagtttccccactccttcctggtgtccgggaagcagcgcaccctggagctgcaagcccggtaaaggagctggggtggcggcccagggccaggcgggaaaactgggaggggctgatctcctcaacacctgtgttcactttccgagcaggtcccaggaggaaatgatttcctggatgcaggtatgggaacgctccgaggcttctgggagtctttttcctttctttcttttttctttttttctttcttggtactagactaccttgatgaagctcctgggattctccctagcctatttgggctgaaggggagggagtggtgtatgtatgcatgtgtgtgtgtgtgtgtgtgtgtgcatgtgtgtatgcatgtgtgtgcatctgtgtgtgcatgtctgtgtctgtgtgtttgtgtgtgtgtttgtgtgtatgtgtgcatgcatgtgtgtgcgtgtgtacatgtatgtgtgtatgtgtatatgtgtgtttgtgtgcatgcatgtgtgcatgtgtttgtgtgtatgtgtgtgtttgtatgcatgtgtatgtacgtgcttgtgtgtatgtgtctttgtgtgtctgtgtttgtgtgtgcgtgcgtgtgtgtgtgtgcatgctcccacacctgcgtgtgctcagctgctccctgctcttcctaaggagctgctctgtggtagtttggagaccgatctgggttcctatcttgctgcttctcattgcctagctgggcagtccagggccagtcacttaccctctctgagcctcagtttttacatctgtaacctggggctggtagtttctcctccgataaggcagcccgcgtgtgtgtagaatccagcgcctggtacccagtgggctttcagccctgtctgttgcatgcacggaaggatggacagaggagcaatccctcccttccacacctcaagccccgaccctccccctccctgcaccccaggccttccaagcagccattgaccaaatcgagaagcggaatgaaaccttcaaggctgcggcccaggggcctgagggagacatccaggagcaggaggtaaatgaaggctttttcatcccttgctggagccaccaacccaaatagagcttgttccctctctgttctgcctataccagctcagagggagagggagtgtcatctgccaggagagactgaagggaccaggggaagcc

SEQ ID NO: 36068 - DNA, 2300 bp, Homo sapien
aaaaaacaaatcccaactgtcagattagtggacagtgaaccaatgctctgagtttgttcatcaatctgtggtagaactacaattgtttcctaaagagtggaaaggctttgaataaaagtggagaggtagagagggctctcccaggacaggttgattgcttccgcaaaggcaaagggtctgtaaagtgctaggcgagtgggaacaagtgggaatagttctgtttgactacatttgagggtttgagaaaggaaagggagggtagaagggatggaagtgggaatcacatatgtttaatgatgtcttgttcggtgccaaggacagttttagaccctgataagcggaaagctttgaatactcaggaggtgaatttgggtcatttcatctcctctcttagctgctgtatgaccctgtgccatcctatttatgtttcattttcctatctgcaaaaagggagtaattcttgttcccttgggttttctcctagtcataaaaaatgaatgagttcggccacagtacacaaacaaaaggaaaatatgtaatattttgtaggataaattcataaaagttgtggaggatctgggcacttttataaagcaagcactgtagaaaactttcaaaggaaacatttaaattcactaatgacagctatagggatcctgatttttcctttaaatggcaggcacttcaaaaaattaaaatagaatgtagttagctttcaattacttaggccactgacaattcaatttatggattatatagtattttaatttactcatttcacacgtcgttatcaactctacatgaagtttaaaaggacaaaggatgcaagtggaattggtcagtgttccgggttatttccaagggaggcagagggtggggggtttcctttgagacaagacttggggttggccaataattgctggtattgcctgcctggtaataacaggctgatgaaaaggtgactacaacgtgaaaactggttaaatcaagcgcaccctcccaccctcgttttagatgaggaattttccgccctcacagaaggggctgaggcagcatctggcatcacaacactaacatttgcttcgtgatttcctctttacccggccctttgacacacatcccttcccagaaatcaggattcgctggtgcttttgcatttctaaaatgggaatcccgtggctgagcttttagccggccggaacgactgagggctgcatccctttcccgcaggagcggggctcccgcctccagttctgttccaggcctgactcctccactccctccgtgactcatgtcctgcggatccttcgcccccgacgcgccccccaacacacaaacccccagaatccgcccccagcctacagcgcgacgtcagcccgccccagccgacttggaggtctcgggtctgagtcacacagaaagaccaccctcgtcggcatccccacacacagtccgacacccggcgcgccggcctccccgcctgacacactaacgcccgtcgtctccgcgcaacttgttatgctccggctcgagcccttgacccaaaaccctcagcgaaacggagagccgcagagccggcctcgggcggcctttgatggctttgttattgtttgggtttgaatcgatacgcccctccccatccttcctccctcgcggccctacacccagctcccgcctcccctcacgccccgcgcccctccccctccattttggcgccttttccttcccgccacgtcgtggcggcgtagagaccattctgaccgcgagagctgggcggggcgggggcggggcgcgccgagttatgcagatcaatcggcctctggttggctggagtagcgctggcaggggcggggccggggcgcggccacagagcgcgcggggcgggggccgaggggagtcgcccagtcccgccgcttccccaccccctctcctccctcggccggcccggcagccctgctccccgccttggcctcccggagaggccccgccccgtccccgcccgccgcgccctccccgcgcgccctccccgccggcgcgctcctcccctttactcctggctgcggggcgagccgggcgtctgctgcagcggccgcggtggctgaggaggcccgagaggagtcggtggcagcggcggcggcgggaccggcagcagcagcagcagcagcagcagcagcaaccactagcctcctgccccgcggcgctgccgcacgagccccacgagccgctcaccccgccgttctcagcgctgcccgaccccgctggcgcgccctcccgccgccagtcccggcagcgccctcagt

SEQ ID NO: 36069 - DNA, 2300 bp, Homo sapien
agacctggtctcaaaaaaaaaaaaaaaggtctctctggttggtatatggggaatggactctaaggggctaagagtggaagcagggagccgaatagcaggctgctgtaagcaggtgtgtggttggtgaagattagggtgaccaagtggtagtggtgaaaaaggttccaacaatctcaatttccctatttaaaaagtcatcacaaggtaactgatgtgaatttttaaaaaatcttggaggggaaactgatatagaaaacaaactgtagaaataacagggcttttctgggttgagcactgttaactacaccccctgggaatcagtgtcatttaacatttcatagaagattaagaaaaaggagtattttgagatatgtctagatacacaaatcatactttgctttccacatagtaaaatgtcaaatcaatagggagcagcttctggaacatctctaaagccatgtgcataagctggaaagtggcaggtatcttgtcacatggatgagtgtatggcagctcacatagggaaagacaattcagaggatacctttaagacaatgaactctgaactgctggttgccaccaaggtaaggaatctagaagttgttttagattactctttcaagacatcaactcttctaaagtccaaacagccagcaaaaggtctggctgtccagaataaagacaaaacatcagccttaacaaagcctcagtacatccctctttgggcttagtgtgcagtgctggtcactgcatcctaagaaaaagaagcgccagagaaaggcaagtaaaataattaaaagaatagaggggctttttttctctgggttaaatgcccataaagaagataagatgcttttatagcatgaaagactcagaggaagtaaaaatagcccttgtcatccaatcctataattcttaaattaggggacaaaagaagcttgaaaatgggagtaatgaagaaaccgtcgttggaggacatataaaagaaggtccttctttggctggggccaggggtcaggtctttaagtattctccaatatgtggaagtacatgtggtagctgtaaatggagggtgggggtgggggtgggggacacgcagcccacctcaacagtccttcgaagggacaaaaaccactctggactggtgcccgccttccctctttccccaaatcaccacggaatacaaccacagaaactcaaaaccagcaaaaaacgctgacaagacattcaaaggattcaaaatgctaatactaaatctcattgtctgggaaaattagattgaaaataaattcaagggtgcaagatttataatagattaacaagggaaattaaggatgttggtggggccgggaggagatacatccttaactttgtgattcacacgatggagcaatactgtgtccttcaaagaaatggtatttggtaatctgagttggacagctatcataaaccatttcctatatacactgttagcatagtcagaaagtgagagttatggattgacatagggattagatcatttgaatttttaacccacagcacaagtccttcaatcgttttcaataaacagagggagagggagactctgatgaaccgttgctcacgtgttgaacagttagcaatcccgggctatcgggtccctgctgaccttccttcagaaaaacgaatggacatgtaaacggaatgaggaaaggagggtaataaccagagtgtcattgaattgagagatgttaaaaatgggccacaaccaacacatgggcccttacttttaggtgaaagattcctatatataaatacatagtatgttctctcttgccaagaaatattagactaaggaacttcattcctcacgaagaagataatcccctcttccttcccataggtcccttaccttacctgcttcttccctctcgcgggtaggaactttgagccccgcctctcggctcgtccaagctccgccttccccgtccacctgtgtgcccagcccctgacgttaccggtcggcttcagcggcctgcaggattccggctcccaattggtcggcccgtccacggcttgcgcagctcaccaatggcagcggtgctgggtggaggggtgcccacatccaagatggcgtccccaggagctgggagcgggtgaccggcggcggggaagcggcctgggttggccctcagattgcggggtctgggggcatctcgccgggcaaacccttggcccgcctacaaggacttcccccggccagagcaatggccgctgagaacagcaagcagttttggaagaggagcgctaagctgccgggg

SEQ ID NO: 36070 - DNA, 2300 bp, Homo sapien
tctctatattcttcaaaatgaaaaaggaatccagaaacttgaagaaactgaaaagacttctcttcctatctcagaaaagtagtgctttaaaaaagttgactgttcttatagccaaatacaggaaatataggaaaaaaagattgttaatagcaaccagcagtcagaaggcacagaagcccatgccacgtcccacatctcttacactgcttcctgatacaacagtcttcctattgattatgattataatcttaggatgtcaaaatttaatgatctcactacggaaaaccccagagaatagcagttagcacaactagagagctcactagaccaggaaggaaaaggaatcagttggcaggaagtgtgcttacctaaaaacacagaacatctttaacagtaatattaacactgttgagtccacagcactttaatctgaagttatctttgcattcctttctattactttaataagtattactaaaagctgatttccaccctattctccatatgtctactagaatccttaataaaataagactcttggtggggcatggtggctaacgcctgtaatcccaacactttgggaggccaaggcaagaggatcacttgaggccaggagtcagagaccagccctggcaacacagtcagaccttgtctctatttcatttaaaaaaaaaaaaaaaattaaggctcttacctagccactactgaccctcatctctctctcgcttaaaaaaaaaaagtcacgagttcaaaagattatcccagaaggaaaaaacctgaatccattagaaaaggtagcacaggggacacaaccaaacatgaatttcatcaccaagtagactgtagctggcagaaatcttaaatttacgactgaaatacacactcttccttatacttctcaggactttgcccaaaataaactgaaacagtaaaccaacagtagattgatggatggataatttgccaaaagtctcaacatacaccgaaaagagggtgggggtagtcttagggggtctgctctccagttaaacaactgaagaatgaacgaatttagtgcatttgcacaagaagtgcattacaatgcaggggaggaagaagtcacttggggttggacaaatccttagaaaatgccaaaggaataaccctgattctgtggtcgtcttgtaataattcctagtgggaaagggccaactcaagataaagtaaggtcagggttgagaatcgtcctcacttttcctgcctaaccctctcggcaggcggccccaaactcccaccggaatccttcgggtaagtgccgacctcagggatcaagggaaggggccatcctcgagcgaccaaccacctgtgcgtggtggagacccctgagagggagtcctaattagagtgggaagcagctctggggaggaacttccgagaccagggccgacactgactattcacccaactccactcccctttacgcccaatcttcggccaccttcccgctgaggtcacccctcctgaaacctccgcccccagaccccggtctacacccacatccagccgtccccaaagctcgctgttcgcttcgctgcctgacagctgccctgccgccaccaggcagtcccagcttccccaaaccagtcttctggcctctgtggcgccccaggcccgcgggattcagggattaggatctggaagggtttggtccaatcccctatccctctcagcgtcctgggctcacctccccggcagcttagcgctcctcttccaaaactgcttgctgttctcagcggccattgctctggccgggggaagtccttgtaggcgggccaagggtttgcccggcgagatgcccccagaccccgcaatctgagggccaacccaggccgcttccccgccgccggtcacccgctcccagctcctggggacgccatcttggatgtgggcacccctccacccagcaccgctgccattggtgagctgcgcaagccgtggacgggccgaccaattgggagccggaatcctgcaggccgctgaagccgaccggtaacgtcaggggctgggcacacaggtggacggggaaggcggagcttggacgagccgagaggcggggctcaaagttcctacccgcgagagggaagaagcaggtaaggtaagggacctatgggaaggaagaggggattatcttcttcgtgaggaatgaagttccttagtctaatatttcttggcaagagagaacatactatgtatttatatataggaatctttcacctaaaagtaagggcccatgtgttggttgtggcccatttttaacatct

SEQ ID NO: 36071 - DNA, 2300 bp, Homo sapien
agaccgaaagagtacagatgcaaaagttctattcttgagaaaatgccctaacattttctttaaaccaaagtacctttctatctaaaagaaccttagttttctcctatgaccagaggcttgtgggcttcactgctaaaagcacacagctgaacagtatttctctttaccaagtaaggtactaaaaactattatgaattgtgacaatatttgaataccttaaacaacgaagacaatgagctggggtaaggatctgagtaacattattttaaatgtttacttgctgtaataatgacagcaatgttaataactactgtttttttgagcaactataatgtgctaaataaacactgtcctaggctctttacaaatagggtatttcacttagtccccacagtaactctgaggaaagtatttttatttctcatttcataggtaaggaaattgaggcctagaaagattatttgtcttggtcacacacacaacagagcccaaatagtaacccaagtctttctgaactcgaaagttctctatttctctatattcttcaaaatgaaaaaggaatccagaaacttgaagaaactgaaaagacttctcttcctatctcagaaaagtagtgctttaaaaaagttgactgttcttatagccaaatacaggaaatataggaaaaaaagattgttaatagcaaccagcagtcagaaggcacagaagcccatgccacgtcccacatctcttacactgcttcctgatacaacagtcttcctattgattatgattataatcttaggatgtcaaaatttaatgatctcactacggaaaaccccagagaatagcagttagcacaactagagagctcactagaccaggaaggaaaaggaatcagttggcaggaagtgtgcttacctaaaaacacagaacatctttaacagtaatattaacactgttgagtccacagcactttaatctgaagttatctttgcattcctttctattactttaataagtattactaaaagctgatttccaccctattctccatatgtctactagaatccttaataaaataagactcttggtggggcatggtggctaacgcctgtaatcccaacactttgggaggccaaggcaagaggatcacttgaggccaggagtcagagaccagccctggcaacacagtcagaccttgtctctatttcatttaaaaaaaaaaaaaaaattaaggctcttacctagccactactgaccctcatctctctctcgcttaaaaaaaaaaagtcacgagttcaaaagattatcccagaaggaaaaaacctgaatccattagaaaaggtagcacaggggacacaaccaaacatgaatttcatcaccaagtagactgtagctggcagaaatcttaaatttacgactgaaatacacactcttccttatacttctcaggactttgcccaaaataaactgaaacagtaaaccaacagtagattgatggatggataatttgccaaaagtctcaacatacaccgaaaagagggtgggggtagtcttagggggtctgctctccagttaaacaactgaagaatgaacgaatttagtgcatttgcacaagaagtgcattacaatgcaggggaggaagaagtcacttggggttggacaaatccttagaaaatgccaaaggaataaccctgattctgtggtcgtcttgtaataattcctagtgggaaagggccaactcaagataaagtaaggtcagggttgagaatcgtcctcacttttcctgcctaaccctctcggcaggcggccccaaactcccaccggaatccttcgggtaagtgccgacctcagggatcaagggaaggggccatcctcgagcgaccaaccacctgtgcgtggtggagacccctgagagggagtcctaattagagtgggaagcagctctggggaggaacttccgagaccagggccgacactgactattcacccaactccactcccctttacgcccaatcttcggccaccttcccgctgaggtcacccctcctgaaacctccgcccccagaccccggtctacacccacatccagccgtccccaaagctcgctgttcgcttcgctgcctgacagctgccctgccgccaccaggcagtcccagcttccccaaaccagtcttctggcctctgtggcgccccaggcccgcgggattcagggattaggatctggaagggtttggtccaatcccctatccctctcagcgtcctgggctcacctccccggcagcttagcgctcctcttccaaaactgcttgctgttc

SEQ ID NO: 36072 - DNA, 2300 bp, Homo sapien
ctctccagccagaacactgacttaggtgagtccctgtgagcccaggcaaggtaggagctttgggtgactggaattctcagagacctggaagctactgctctttattcttccttcttttacttttctagcttctcctgacctggtgcccattgcagtgacatgcaggtattaagtcagacatatgttactagagattatggaccaaattaggtgggactggtttctgtggcctgtagaccctagtgcaactattctgactttggtcttccttatctcaaggtgactcttactgaaatctacacccactggtctttcccttcccctctaactttcatctctgagctgacaggactgctactgcaaggccgtgtccttggcacttagctgctcggggctgttttgggcttttcactgtgcttatgggtagcaggtggtggtggtggtcttacatggatggaaggagacatcaggcagtgctggttgcggtttgctttagagcatttgtggagagttaacctaacaaggctgttttctatttacagatgaactgaggaagtgtagctggccaggggttcccagggaggttcgacctataacctggagactcctgtcggtgagttctacccactgtgtagagaaatgtgagcctcacacagcccttcttgcctgatgaggttagtctggacacattggtcttaactccatagacttctctagtcctactggatatgacagaactatgggactatagtcctatttctgtgcataaagaaatacattcttgagagtttattcacacacatgtagtggtacacagacttgtaccaatagtcatggtgtcatgttcttaacagcgaggaagaagaatagagtgagatagggtgatcccagcacttgctttgagtaagctccaacgttccctgtgcttcactcctgtttcagccggaataaccaaaagttgaaacccactttgatctgtgaagagttgataaattggcctcccttggaagctttactagtcctgctttcaccaagtacagagcactgtgccagccgctatgatagaaacacttgggtttcctgagcctgtaaaattcattcattcatctagtgaggatttattgagagcctgctgtttgccaggcatagtgccagatgctttgagcagatgcaaaaatgaataaaccacagtccccactctccaggcactcactgcagaatgcattacataaatgttttcaagaagaagggtctgtctcctgactgctcgcccccacctctactcttgcaaccatgcaatcattgcctctgccacttctaataagtttgaatactattcagagtagatttggtgagaacggaaggggaacagaaaatataagaatgagagtgggatctagaccagggataagaatgaaagttggcctggagctttggctaggccgggggctgctgccagaagttctgtctgagtgttgtagctgtatgtcacagattccattcagctgcttcctaagctggtaattctgaaagttacactggaaaagaatgtaactggcaccaacttacttggcacactgctgagatgtgctgtagaggttgctatatccctgcatttctcagaagtatggccctggacacacacagccctccgaggccatgacttgggtccagctccctcccactgacctacattcactgctgtactgtgccagctctgggagctgaggagtgctcaccagtggcacaagctccagcacagtgcagggccaagggagtaaataatcctgggaaagctggccttgcttcatctgctcacatgtggatctcattgaatgaggagagggcaaaaaatgggtggccagaaccaaaaagggatttacccttggcagttttccttcttggtagtttccaaaccactgcatagattaaaataaaaattaaggatttatccaaccattgtctttccccatctgaccagcagtcttgtctatagggctatctcccagcaaacactgagaggaggaagttgaccctgcagcggaagcgggaggaatattttggcttcattgaacagtattatgactctcgaaacgaggaacatcaccaggatacctacagacaggtacagtcaccacctgctgcctctttgcttaccagtcatatactttaggtatgtctcatggtagtgctctcagggtacaggctttccaagtcttcaggctgtggtatattggttaggagttaaatttatcctcaaaactgtttcccctcttttcattcagcaactctgattttag

SEQ ID NO: 36073 - DNA, 2300 bp, Homo sapien
ctcaaaatgctggaattacaaggcgtgagccaccatccaggctggtaaaaatgccaaccaagaagcaaagaactaagtaacactgaatacggaaaggcttgctttgaaaacctgaaagatacttgataattgcctatagtatgtaagaattacccacactagtagaagagacattggaagacctccagcggttctcctatccactcctctctataaggcaggattatcccagactttttctatagcgaacatcccatggtctcccctgattaccaggcttggtgctcttcagtttccatctctttgaccacttcacttgtaccatgtgagtgtgtctgtgttgttccaccctgactagagaggatgatcacaggtctcctgattctgaacagctagcttccatgtacttggccattgttacagccaggcgccaaggatttgagtatttacaaggggctgatcctatagagtagaagcccttctaagtcctttggaaagaccaacctggaggagctttttaatagaggcatctagacagacccaggtcacaagaagtgcaaagaaagagagtgaggcagggaattattgagattttcctgaaaacgatggttctagctttggctgtattttcaagatagagggatcatttagcaacagagaggaaatagagtgtaagagcgttcccattagagtgttgggccgaatgcaaatgagggtgctatgccttttcctcaactacacaaagcaaatgggtaggtctagtgaaggcagagaggccagctcccttccaggaaaggctttgttctcactacctatgaaggcagcagtgttgacagtgaaagaaaccgtttctcagctctgtttgcccgctgtaggcacaacgatctatgacagagaggctgggaagcatcctttatgtctctagattctctgtgtccctcctacactagataaccatctccaaaaaccatataaccatttcctgtttgttggtctccctgggaggtttttctgccttccacctgcttgagagggcctcttcaatctgatgcagtggtgactggctgagattctcccaagtccacatgctttctaatctcctaccctatcatctgcatgtactcacatcacctctgccatctctctggtgtggttctcagaggcatgaggcagcccagtcaaagccagtctcaagaatgtgtcagacttgggaattgtggtcaccaggatgaaaccaggcaatgggtattatcaggttgagagaagatggggagaagctcagagggcctaatgaaagcgaggggagtatagttgagtgggacagggcatgattatgtaaagggaccataaagatctttcctttgtccccagtgtaggcctctggcttcttatggctaatatgctaaaccccagggcctttcccatggggccctggctggtttctctgttctcaaattcccagctataggagtccataggattttgtttgacttcctatccttagcaaacatctgagttgtatcctgatatgtgaactgacttcctgcaatgtgcagtctgtcacttggtcctagtcaggctgggttagaattaaatcaagaccacctttcttctcaggcagggagaggggagggtggtagaaaaggtatttcctgtctaaatcctataatgaccaaaaaaaaaaaaatttagaaaaaagcatcagaactgggatgtcctgatatcttgctcttggaaataggaaaccatatctacagatgagaatgtggtggcctgaattaacagcattcatcccaaatgttttctaaggcatttgggtttgctgttctttccttctcccaattttatattgtggtgaccagataatgaaaaaatgaataaagggcaagaagtatctacccctacttgaaaacaattagtgtatttagaaactttttgcatttatatacttctttatcccacagtatcttaaaattttcctaaaaattctacaccaacctggaggtaaattgtgaagtaggtaaacggagggaaggagtgtgtgtccccgtgatttaacactcgtgtctttctttctcattttcctagatctttgaaagaattctatttatttgggccatccgccaccctgccagtgggtatgtccagggaattaatgacctggtcactccattctttgtcgtcttcctctcagaatatgtgggtaagaagcattagtaccaagctgaacaagctattgctctttcttatctgccgtctgtctgtttgtttttcccaagagtccagccagtaggtatgtc

SEQ ID NO: 36074 - DNA, 2300 bp, Homo sapien
accctttaagactccccttcctcctagaagccttccctggggtccccctgacccccggcatctaatagtgctatttctgtcactctgtagatttctcctgtggcactttacctcgctagttgtttgtgtttccctcctactctctgccaccagactttctgattctttgaggccaaagagtattttaaacatcttcatatccccagtaccttcattttggtgtccaaaataggcattccacacatgtccagatgaatgagagaatgaaaattccataactgcagaatactcagaaattagtacagcttcactaggcttggccactggagggcagtgagttacacttttctgatactgtgctgaattagccgaaagttctctctcccctaagggatggaggtggagcaccaccacttagtcaacaagtctttgatgagcacccacatgtgcagggcactgctctaggcactggggtttatgaccataaacgaagtagacaaaaaccctgccttctacttctaggtatttattcaaggaaaatgaaggcttatagccccaaaagacatgcacaaacatattcacagcaactttatacagacataaaatgaaacaaccctaatatcagctaatatgagaacagatatccataccacagagcagtactcagcaataaatgagaacgtactattagtagtacagcaacatggaagagtctcagaaaccatgaaacagaatgaaagaagccagataccaaaaaatatatatattgtatgattcacattatatggagttaaaaataggtaaagcttatctatggcgatagaaatgagagcaaagtttacctatggtgggaggtgggctgagaatgagcataaggaaacatttccggggtgatggaaatattctctatttggatgggggcattttttttttaaaccatagacataaacatgtgtcaagactcatagaactgtgcacatatgtgcagtttactatgcgtaattctacttttttaaaaaaatcgctttcttagtttaatttctggtgggcagaaacagacaatcaactgaaaaaacagatatttgtaggattgagataagtgctatggatagaaacaaagcaagaaagagggacagggatgtgccatgctggcaagtgtgggagcaggaggcaggttttaaaccgggtggtgagccgccttcacactgaggagatgacatttgagcagagccctgaaggaggtaagggagggagctgtgcagttaatttttgatagtcaacactcacattttcaaagaaaaggtagtgtggatcctgttgtcttgtcttgctcctgggctgttgtggattgtgctcgccccccacgctcagtcctgggaggcggcatcctccatcttacatctgactctttgcatcagctttgcccagtctgttcctccctgtctggctaggccaaagatgaaactggacaaactttattattgtctcaagaggccattccttttctgctttttaaaatgtgaacttcatattaaatcatacatttagaaaagtgcatctgtcatacatgcacagttcgatgaatttccccaaaataaccagcactcacagcaagacgtggaacgtttctaggacttcagaagtccctttgtgttccctcctagtccctaccccgtcctctcctcccctgcccctacaagggtaactactttactgatttctaacacctagattagttttgcctatttccttttttttttttgagacggagtgttgctctgtcccccaggctggagtgcagtggcgcaatcttggctcactgcaagctctgcctcccgggttcacgccattctcctgcctcagcctcccgagtagctgggactacaggcgcccgccaccacgcctggctattatttttttgtatttttagtagagacaaggtttcactgtgttagccagaatggtctcgatctcctgacctcgtgatccacccgtctcggcctcccaaagtgctaggattacaggcgtcagccaccgcgcccggtcagttttgcctatttctaagctttatctaatttgaatcatatagtaagaattttccactttaatgttgttagtttggagggaattggtggggagtgggcttgatgctgagtttttagcagccaccctatttgggactcaagctgcctcctggccccatcttcgtagatgaagcagcctcccatgtgataggcagctgagaaatattgaggctcttgccagcagtgtgtggagatagcccagtcaggatgctgagc

SEQ ID NO: 36075 - DNA, 2300 bp, Homo sapien
gcagtgaacatctgtttccagaataggggttgtgggtctgaggagaaaagctgtctggtagagaactcaagggcttgattgtttctgtgtgtggcctctgacaggcatacacaggggcctttcttgttgggcaaacacagcacttcttactacttcacctctctgtgacaggaagtgggagttaaacatgggctaggaaggacacatcacatagccttttccttcttcaggtttctggaaggctgcttatgttttcctcacttgcatctcagacgagacagattctcactcctgttactcagtgggaggtttccatgagaagctaacagatagtcctttccaaagaggtctcgtggctagataaacttgggaaatgctggataaacaaagttaagcagatttacttaatgcagaatttctgttaacttctcaaacccttttgtgtgctgtgatctttgctaatctccaagatggggatatctaatgcaacatttctcaaccatatttgtctgtggaacccccccttttttttgagtgttctgtaggattgatgttttgcagaacccatcttgagaaataccatcttgttggaattaagtcctagaagcactcacaggcttgactcatcttcctttacatgcataccttctcttttgagtggcaagactgtgggtctgccttatcagaacttgggaattccatctttaaaataaactgtgggggctttctgatcctagctgttctccctatatatgagtgtgagtgtgctagacagctcactgagctgaaatcaaagaaattttccaggccatcttcagggatctgagtataattcattgaacatgagacctgaagtatcattttctaaaactgaacgaacaaatgccaaggaagagaaagatatgttggacctgatgggactagcatgagaaatggcctgtccagtgttgtagtgagatcttcaagaacaaatatgttcttgaagggacatatttgcccacctgacacagacagtagaggggcaggcccttgtttcttaacatcaggttagcctggtcctcacttggccttaaagaccccattgaagacactcgaatctatctttctctctccatttttagataagacctctggactttcttcaccttttgttttacagaagaggatgtggagaactttgacgtgaccaacttgtctcaagacatgctgcgaagcattgaggctgacagcttttggtgcatgagcaagctgctggatggaatccaggtgagctgcttctgcccttgtgggaacaaacgtctaggtccagaggctcccagcagggctttggtttctttcttgctcttctgtatcaggcaggaccacccacccacccactatggctcctcctccttttcatccatctctatccttcttcattggctttacagctttcaaacagcaatggtgggtcgggcacggtggctcacgcctgtaatcccaacactttgggaggccaagactggaggatcgcttgagctcaggagttcaaaaccagcctaggcaacatagagagaccccttctctacaaaaaattttaaaattagccaggcgtggtggcgtgtgcctatagtaccaggtcctcagtgggctaaggtgggaggatcacttgagcctaggaggtcaaagctgtagtgagccatgatcacaccactgcactccagcctgggcgatagagtgagaccctatctcaaaaaaaaaaaaaacaaaacagtgatggtgtagtgtcccttggagtctgcagaaatctccatgttgccttgacttcgtctttggagtagactgctcctttctgctctgtaccccaagcacatgggtttgcttccacactgcagggctccattgggctttcccccaacactgttgttctgtagatttctttgtttcccagaacactgtcactggccattggtactagctttggaaaatggcctgaacttctaaacgtgtttcagtgaatgtcaggtgataacacaagttagagtccatgttcatcctgggctctgtgtcatttgcaggataactacacctttgcacaaccaggaatccagaagaaggtgaaggcactggaagagcttgtcagccggattgatggtaggttcagagggagaagagttctctagcaatagcagagttgattctgttatgaggcggttgtgcttgtgggtcctctcctcagctgtcttcctagccatgaccctttccagcgcactgagtgctgctggcagcaccgggatccttccacatctcagcaggaaggt

SEQ ID NO: 36076 - DNA, 2300 bp, Homo sapien
tgcctcccaggctcaagggatcctcccacctcagcctccctggtagctgggattacaggtgctcaccaccatgcccagatcatttttgtatttttactagagacagggtttcaccatgttggccaggctggtctggaacccctgacctcaggtgatccacctgcctcggcctcccaaagtgctgggattacaggcgtgagccgccacacttggctgtgtgtgtgttttttgtttttgtttttgttttttttgttgttgttgttttgatggagtttcactcttgttgtccaggctggagtgcaatggcgagatctcggctcaccgccacctctgcctcctgggttcaagcgagtctcctggctcagcctcctgagtggctgggattacaggcacacgccaccacgctgggctaactttgtatttttagtagagacggtgtttctccatgttggtcaggctggtcttgaactcccaaccttaggtgatccgcctgcctcggcctctcaaaagtgctgagattacaggcatgagccaccatgcccagcccggctggttttttgacagaattttatttaggaaaattgttttccttctttccccttgtgcaaaaaaaaaaaaaaaagagaggaagaagggaggaaggaaggaaggaaggagagaaagaaagagagagaaagaagaaaagagaaagaaaaaagaaaagaaagaaagagaaggaaggaaggaaagaaagaagaaagaaattgttaactgggtgttggaaaactgaaaagacaaaaggggctcaaccattggatgtactcactgcaggcagcagctatcacactatatggaaaatccaaaggagaggctgagtttaaaaacaattttttaattggccgggctcgggggctcatgcttgtaatctcagcactttgggaggctgaggcggttggatcacttgaatccaggagacacggcgaaacccggtatctaccaaaaaatataaaaattagccgggcgtggtggcgcgtgcctgtaatcccagctactctggaggctgaggcaggagaatctcttgaacccgggaggcggaggttgcagtgagctgagatcgcaccactccaggctgcactccagcctgggtgacagggcgagaccctgtctgtaatcagtaataataataataaaattaacagctttattgagtataatttacatgccataaaattcacccactggaagtttacactttcttcactttacagggtctcactctgtcgcccaggctgggatgcagtggcgccatgtcggctcactgcaacctctgcctcccggggtcaggtgatcctcccacctcagcctcccaagtagccggactacaggtgtgcaccaccacacctagctaatttttcttttttttcttttttcctttctctccctcccttcctcctttttttttttttttttttgtagatacggtgtctccccatgtggccaggttggtcacaactcctgaactcaagtgatccgcgcgtctcgacctcccaaagtgctgggattacaggcgtgagccactgcgtccggccacacttccatgactttttaataaacttatacagttgtacaattgtcaccacaatccacttttagaacatttctattaccgctttcctccaattttttcaagcccatctgcattcaatacccgctcccacacctcgccccaggtaactgtgctctttgtctttgtagatttgcctagtgtaatttattttttacttcggtaatataagtaggtcgtgcaaaatagagactatttagcaacagactaggcagacttaaatccgatggaaagtttaaagttgtttaaaagtgggctatagtttcacatgacttttttaaaaagaggaaaggtgagaagaggttccagtctggggcggctaggactggggtgatggttctggaggcggcgagggaaggtgtgaggcgaggagacctctcgaatcgcgcccgccccgcccagggccggattggctcccaacccaccctctttgctccagggcggccgccgtcctcttgcgcaggcgtagtgctcctgcttcctggccgagggcgggcgagcggagcctgctttcgcagcgatcgcgagcgtgtggcgattgcttctgtctgttatttagatatggaagctgaggggatgcacagaggcagccagaacctaggtcagggtctcgctcggtgctgaccgcccccggggtcgagtaggcgatgggggagcccggcttcttcgtcacaggagaccgcgccggtggccggag

SEQ ID NO: 36077 - DNA, 2300 bp, Homo sapien
actttaacttgactatattttgaatgcattctctcattatttaatgctttacataaaaattaaatcattaaatttgctaaatatgttaactttttcaatataactcatttcctataccttattttatacccttcaaattattattttgagaatgggtccataagctctacaagattaccaaaagtgttcatgtcataatgcatgctaagaagcctcagtgaggtggaaagaaggacactaaactttagaacatagagaactaggtaaatacctgtttgctgcttcctagctctgtaatcttgaacatatcactcaaccttcattcatattccacacttccacagattcagtaaatatctattgagcactgaccaccagcctctgttaaatcttgtgaatttaatacagacagacaatctttcctgtacagagtttacagctgagtcggggaggcagatgagtccacaggccattatacaacaccgtggtaagtgctttgatagtggaaggacagagtgctttaggagctcagaggtgggtctcccaacctagatttgtgacatcaggaaatatttcgagatagggacactaaagtgactcctgagggataaatggacattagcccagcaaagaggagaagcatgatccaggcagggggctgaactcttaagagacatggcatgttttgttttgttgtgttctgtttttgagatggagtctggctctgtcgcccaggctggagtgcagtggtgcaatctctgctcactgcaacctctgcttcccaggttcaagcgattttcctgacttaccctactgagtagctgggactataggtgcgcaccaccacacccagctactttttttgtatcttcagtagagacgggatttcaccatgttggccaggctggtctcgaactcctgacctcaggtgatccatccgcctcagcctccccacgtgctgggattacaggtgtgagccaccgcgcccggcggagacacggcatatttgataaactgagaagagtcagcatggggagaactaagggatagcagtacaaggcatacctgaagaaggggtcatgctggagggtctcagaggccattttaaggacattagctttattctaagagcaatgggacatcattgatggattttaatcattgttgggttgtgacaggatcaggtttaattaatcaattttaaattcccttcttttcacaggtgttgaaaattataaaaatcactttggttttgtgaagaacgcattagagggatcacaactggagacagtcacgggagtttggagttactggagaaattctgccgagagggggtaagtgcatgaattgtggcaatggggatgggggtgaatggatggatttgaaagacaattaggaggtaagcgcaattaagtgtatgagaaactttggggtatgaagaagagggagattcctcagatttctagctggaccaacaggatggatggcagcgcccttcaccaggaaaaaagtgagctgatggaagaacataaggtgaaatttgaattcatggggtttgaggtgactgagtgaggatgtccaacagacgtttggccatattggcctgaaaatcagaagagaggtttgagatggagagccaactgtgcccatatggtaagatgctacaggcggcattccttctgtcctcccgtccttcgttcaaaatctgttgagatgtcccataggctggatgttggggatacagcagggaacaagaacactgcgttcgctcaaccagtttaccatctacctctctgaacttgttcttagtctgtaaaatgaagataatgataagattaagtaagatgaggtcgtgtgagggcacctagcacttacaatttttgtattggtttctcttcctcagagccaaaggaggagatagttacttttgcttttgcagccttttccgggcggcttttccgcgcaggcgcccctggacctcccaggttgagaggtggagcgggccaaacctcagctgcctttcccggggccgggacccggccgggggaggaccgaggcgcggcgctgtccgtgacgtcatcaggctgcgctgcccgcagtactggacccgagcgcgacggtgcggctggcggacccgggctggcttgtggggaaacgaaactgagggaggaggcggcggctctggcagcggcggcgacagtgtcggcctgaccccccctccgctccccggcagctcgctctctcccctcagcgtgagtgccgacgcgcggcccggggggagcaagcgggcgggcgcgcgg

SEQ ID NO: 36078 - DNA, 2300 bp, Homo sapien
tgtatttttagtagagacggggtttcaccgtgttagccaggatggtcttgatctcctgacctcgtgatccgcccgcctcagcctcccaaagtgctgggattacaggtgtgagccaccgcgcctggccgtcattcaccctttccagtagatcttttaacatgtttatcacagttatcttaaaggccccatctgagaattccaacatttgggccatctccgggtcttgttctgttggcctgttttccctcttgtcaatgggtagcattttcttgcttcatcgtatgcctcataatttttttattaaatgccagacattgtgtgtaaagaacagtgaagactaaagtagaaagggtggctgttagtatacataggtcgagtaagcttagtctatagttgaactgaatctgggctttgaatgagctcaccactactttcagattatttaagggtgggattagaagcttccttttagtaggacttgggatctaagaactgagtgacccagttttcctgttctaccctcatccttcagtaagccccacataactgcactgtggggtaggggtgtgggtttctttctcaactctccagctccttcaccaaatatagatggccactgctcccgtttaacctctctgtcctgatgtcagttacctgtcttttttggtaatcctgagatcaaataatttttttttcttctagccactgtagtctgcagatcaaagctctggcgaaaatccatgcctttgttcaagacacgtgagtgttgcccacttttcagaaaccacctatttcaagggaagatcttgcttttcctccccacaagctgtttgtttttttcatttcaacaaacattttaaaacacctgcttttttctcatactctgctatggtctctgaaggatgccagagaagcatatgacatgagctttgtccccaaatactttacattgtctttgggcagataagagtaacccaggaaaaggatacaggaaaggttattaacagtgcatcagagggtgtagagtggcatggcacaagtagaatacataatgttcaggggacacagagtaaagagtgatcaagagaggagaggtaggactgatcagagaaacctcgggtagggggtgaacataagctaattcagctttgtggggcatggtgacatccagtgggatgggtttagtgtggcctgtgtcagcagaagaggagctagaacatgctgatgggtgattgaaaagggtgtcggggaggaccctggcatccaggtcgtctggagggcactttctcctttcccattgtggtgagaagggcaggtaatcccatttcgtgtatgtttgagctcctgtcttcaaaaggagagccttgcatgtgttgtaatcacgctgggccagtggcagcatagtgtctgtgtgtacactcacatgttcattcattcaggcctcctctctatgggatatgaggggtgcacagggggcactcctgtgcctcttagagattttaatcactaactggcttcatattcccaggacactgagtgagcctcgacaggcagagatacggaaggagtgcctccgactctggggggtgagtatctcccccgcccattgctgcttcagggcagggaagccatagagaagaatggggttgactcccaatcctgtcaccttagggtgtctctgcatccaaaaatatctgctaccctcacagcatcccagaggttgacatctcggcattgttggtagttacgtccttggccctttcactgctggtttggccctgcagctgggtcagaaaggactaaggggtggggtgtggggaggtgggccggtgtcagttttgcaactggtggccccttgtagcagcactgacaacagagagccccagagaaaaggaagtagcctttggggtccattgccacaggatctgaaagggagcagtgagtgaattatccacctccatccctgtcagcctagcctcctttgttgtgtgccattcctcctccccagtctgaccctatctcctccacctgcatatactcatacacggtcttggtcaaaagggcatttgaaagtcaaagctctttgctgtcttatttcagatcccagaccaggctcgtgtggctccttcttcctccgaccctaaatcgaagttctttgagctaatccaggtaagactggtatctgtggtggacataaaaagttagagatctgtctctagatgtggatggtatcactgaggccccagatgcatggtctccagagggcttgtgcagatgcccaccatgggctctaaggggcg

SEQ ID NO: 36079 - DNA, 2300 bp, Homo sapien
tggcaagctctttatcttacttaactgggtaaagtcattgctttttctttcaactcttgacttgtgtttctatataatttgatcctgtcttcctcagttacttcttttgtaccctctcacactttgtctttttctcattttacttactctctccttctctgctctctggactcttcactaaacccaccttagacatatacgaaactggatcttttttgagggccactaattatggacttaggtcttttgagtggtgccctgcacccgttccaaggctgagccagatctctgcttctcttctgctgaggcactggagaacactactatcattatcactaaagtataatggatttaatctctcatagacattttcttctgacatttcccagtcccatcagtttgtagctgccaactaaaagctcttttgagaagtaagcctcttatccctcgatctccatgccttccttacctggctgtttctctctgcctgtagaaatcccagatctacacatgggatggccgccagtcagaccgctggatcaagctagacctgaagacagagctgccccgggacactctgctatctgtggaaattgtgcatgagctgaaaggggaggtcagagatggttctgctcaggtgttggccctgcagctaggggactagggggctgctgaacctggccttttgccctgagttaacttggttacattgtgtggtggctgacagggcccagggctggggtaagggtttataatgactcctccccgagcagttgctctaagccacagtggttcaggtaaggaggagcgcagtctccgtgcgtcagaggagacctcgattgtctctgtgcattgagggccctggtgagtctactgggtattttttagcagctgatttagtttttgaccagagatcccttgggaaacaagagacttgtttctcaggagccatgagtatgaaatctatatggtgacattcagaacagtcagtaggagcaactggcaaggggggtaagccagatcctggctggagtgccatggcagcagcctcactgggtttgaggttcaaggggccttatcacccaatgccttggatcttaccctgctcagaagccgaggccagtctgatgctgaggagcagctgggagggagacaagaaaaatatcctgcatttagagccctacccttcccccagctgtaggcagaatggagccagcatgccatggtgggtagtgggggctgaaggctgacacctggcagagtgggcagtgtacctacttatccttctaggggaaggcccagaggaagatcagtgccatccacatcctcgatgtccttgtgctgaatggcaccgacgttcgggagcagcactttaaccagcggtctgacctgggccccagggtagggagggtgggggtaggccagggcagcttgggaggacagcggcctcccgaggtgtggccccttatctaggccttctctgcttgttgacatcctgagagtttccccctcccacccactgactggtcccaaagtcagggtgagaattggagttgccacttcagagtttgctagggcttgggccctggttatcagagataccagcacactccattttgccacagctgctcaggttgaggtatttatgttaaggttgagcaagagggtgaccttgcgggtagagggggtactccttggaagaaatatcctgtgcttgagtggtcccatttaagttgctcatctgagtgggtgcactgtagtttccatgctttggggtgacagggcagacacatacaataaagatgatacttgaagttctagtggaggtgactgagcacagctgaaggcacacttcaggaaaaccaaccgacatagtgaaattagaggtcagaatccacaggggcggggcatgaataaagacgtcggtggagaagggcagggcgggcttcctgggggacatgggtgctgcctcttagagcagtcttgccgcagattcagaaggttctcctactggagctgtgaaaatgccctgggggtaggggtgctggtggaggcatccttggcttgcctctcagagagactgtttggattgtagaattcagcttgccgagaaatttgtgaaagccgtttccaagcctagtcggcccgacatgaatcccatcaggtgagcatgtggtccctaccctccatgcttctttctggccagtacctgctgctcccgtccagtgagggacaggagggctcagtggagggcactaggcaagtgggtgttagagacaagaccattcttgccatgaagt

SEQ ID NO: 36080 - DNA, 2300 bp, Homo sapien
cgtactgagtatggagttgtagagccatcctaggtgccatccccttttggtccaaacattgggcagcgctagatggcaggaagcagccttgaagacccgtctttcccccacagcagcaggggccccagcagtaacaaagggtacctccaggggtttgggtagcgctgccctctggcagtcatgcaccgctgtctgccatagccgctctagggtcttggcagaattctgagcttgaagtgcagctcccttactaccctttcccttcctttttcttccctaataggaggtacaatctgcttttgtttgtcgttaagtggtcactcccatttcctttatcttggccgacaacacagagaggagggggagctgggcagtagcttggggtgggggtgggcacctgtggttgtttttaatgggaaatacctctcagagatgttcatgcaggctccctagggccccatcccagtgccaggctggtttccatggagatagggcactgaggctcccgtgaggttggaatcgacttcaccatgggggtccttcagccagcatccagctccccacccccaggctggcagtagcactgctgagatgctgtatttccacccaattctgggtatatcagtgtgtcttgcagaatcttggatcattaaagataaacatatttttaatgcctgtgtggctctgtgttggggctgctgctgtttgtcctcagtgctttgtgatctgagactggcttggatgaaacagcttgagccagaggtgaaggggaagcagctctactcaaagcagaggagagaaaagagggtttgtttaatcggagcctgttcaagctcttgggcacctgcagggctcccagggctgctgcttgctgctcaagagggggctcaaagaagagttgggggaaattgtgcagctcctgttacaagcagggactgcagaatgaatgaacccacagccccggaagggcagagaggcaccttccccccttacataaatcacacagctcactccatggtggcactgtgacaatccaggatcagtctgtgtgactaaaataacagaggcgtcagaccaattagtgtcactagacttgggcgaaagagggagggagagatagatggtttcactgaccctagcctgcctcccctccaaggagggctggttctgcctgcacgggactgtgcttgggggtgggggatgcagatgctgcaggcacctccctctctgttcccggctggtttctccaccagttagtcatcgccctggtgctggttgccccccaaagtccgccttcactttgctggacttcctcactttggccccaagagtcctttgtgtatggccttagttccctgggcaaccccatcccttgtttttcctacttaactggtttcatctcggccatccacgcccttcctctgttctgccttgctgtagcctcccacctgctcccctccttattccaaagctaggagttttagagttggggggtggaagggtaagggagatgtctgagtttgctgctcctgccacaactccccctctgatcagccccacccctacttctcactacaaaccctacctgatttactggccactgtcaccgtaagtctgtctggtcattaccatgactcttcctgcccactcacagcctccccagccttgcctgcctgtcgaagatggattaactccgcactcccctgggatcgccacatgaccacttcaagtccccaagccgcccttcgctgcacagactgcatttttttctgccataattacaagcaatggcactgactggagggcatgacagtgtgtggtggggggatggacaggtggcacaatgtctgctgctcaaccccagcagtgcccgagccctggaagtaactcccactatttggcttggaaagtgcttcccactgtctccttcccactcgagctgggggccttctcctctattctgaattgtaatccagagctttcccttgaacatctcttcttccttgattcctgagtgccgcctctgctgctgctgcctcttcctgcccccaccgtccaccctccgctagtcagaccatgacatttactcagcagacgggaacagctttgtgttctttattgcctctcccttgggctaagggagggaccagcaccatgtccttctggagacccggaaccccccagcaggccagggaggcaaggcctgggccgccaggaagccatgcttgaacactaggttgggaggggaacaccccagcaccttggtcctattgaggcttgaagtgcctgcttgatcctga

SEQ ID NO: 36081 - DNA, 2300 bp, Homo sapien
actgagttggggttattattcacatacaaaaacacaggcaccaacagagataactggtcaggaaataaggagctttgattctggtctcatactctttgacctagtaattctacttctgtgaatttatcttaaagaaagaatccagaggacagagctgtgtgcacgaaaaggtttgctttcgcaatatttggagttactgtcaataaaatgatgtccaatgcaagaatgcgagagactcccttggtggcacatgaggccaccgcaagtgataatttcaaagacacagaaaaacatacttggcagtgtttttcaaattgcagttcaacctccattaaggggtcatgaaataaacctaagaggtgtcctgccaccaacttgtttttgtttatttttttgagatggagtttcgctctttcacccatgctggagtgcagtggcacgatctcggctcactgcaacctccgccttccagtttcaagtgtttctcctgcttcagcctcccgagtagttgggtttacaggcgcccaccaccacgcccagctaatttttgtatttttagtagagacgggctttcaccacgttggccaggctggtctcaaattactgacctcgtgatctgcccagcctcccaaagtgctgggattgagaggtaaagccagctggacttcctgggttgagtggggacttggagaacttttctgtctagctagacaattgtaaacgcaccaatcagcgttctgtgtctagctaaaggattgtaaatgcgccaatcagcactctgtaaaaacccaccaatcagcgctctgtgtctagctaaaggattataatgcaccaataagcactctgtgtctacctagggattgtaaatgcaccagtcagtgctctgtaaaaacgcaccaatcagcgctctgtgtctagctaaaggattgtaaatgcaccaatctgcactctgtaaaaatgcaccaatcagcactctgtgtctagctaaaggactgtaaatgcaccaatcagcactctgtaaaatggaccagtcagtgctctgtaacaggggacaaataagggaataaaagctggccatcccccagtcaacagtggcaacccactcaggtccccttccatgatgtgggagctttgttcttttgctcttcacaataaatcctgctgctgctcactctctgggtccgtgctacctttaagagctgtaacactcaccgtgaagtcagtgagaccaagaacccacctgaaggaaccaactccagacacaggattacaggcctgagccaccgtgcccgactttgtttttttttaattaaataggcaagaatacaaaataacagagtgcattacaggaggtaaaggtacttactgtgaaactttggttttggtttcatgggtaactgggccatggtataaaatacatttttttatcgtagggtcacagtcaaaacatttcaaaggccgtgggtctatggtgtacagtatagtacgattacaacaatgtaaaatactgtgtgtgaggccaagcctgggaggaataaacagaagcaaagaggaactgataaagttggtagaataaaggatgctgcttctcagttatatgttttctgtgatgtttgtaggttgttcttacaataaaacaaaccaaaaaaaaaaaaaaaaagaagtcaagacacaaaggagaaataacaatagagggccattatcagattccattggccgagaagctcaaggctccagcaccggccttgaaggatggacagactttgaatggggggcgtggcctaaacagggacggggttgttgctgaaacacaaaacacactgaaagagaacatggggttaaaaaaggctctcagtgatgcaaagcggcttaaaactggggaagaaaggggcaggtctactcccgggctgtacattctgcctccctgtaccgacttttccaccctccacccatctaggctgaggtctcaagctagaggttgcccctcataaacatgtccgcaccaagccggccgcgcccctcaacaagatggcgacggcagcagccccacctcccgctgactcggtggccaatgagggagaagcacgaagacttgagcatgcgcacatagcgacttggtgggcgcgtccagtgatgactgggggatcccggcaagtaacatgactaaaaagaagcgggagaatctgggcgtcgctctagaggtgaggggaaaagtgggggttgggccacctcgttagttgccttctcctggccgcgggataagggataggctgggctatagataggaggaggagccaagc

SEQ ID NO: 36082 - DNA, 2300 bp, Homo sapien
taaatcaataaatagatcctgtgtttgtaaatatggcactttgttctttctacagcagtgtttgtatccattaactctgtgggtcctcacatacctctgtgaggaaagtaaggcaggctccattgccccaattttccagacatggaaaagtttgcagaagaggatactcaccccctccctctgtataaaagaccatatgagcctttctgaagaaaacgagagtaagaaactaacagcctattaggtgacttcttagtagatatagattgaggaaggagaaaaccaaggttgctcttgccagttggaaaggatacaaattgaggtgacccaggcttcagagagtcccccagagttcacgtcggtgttgccatctcccccaaccaccccaccttcttataacagatccactcccactgttcacatgggtggcatatgatctaagcggggcagccagtcatagaaccacatgtccctagccatagtgattagttcagaagggaggactcatgatctgagctaggccaataagaatcctttcctgagatttgtttcacctgtagctgggaaaggaaatcccaccttagctttggttgcagagcagctgacgtgtgatcctggaactgctggcaacagtgttctcttcctgagaagaagctcatggagtatgaaagagggcaggcagccagcacagggcagcagcaatgagagacaatgaggaagactgccctgggggtgcttgtttgaaacttgaattccaggtgccctagcctcacttttgcccctcggagagtggaggccaacaaattccctcttttgagtgagctaatttgatctgagttacttcatttacagcccacagattttttgattcatgtagtttttagactgaaggaataaacccagaagtttgcttctctggtgtccaagttttggtttcccacctctgtgggtctcaatgttcagcttatccgagaggtcttaggccctgggaagtaataataataatgtgtctatctacaactggaccacaaacaaaagtactagaacctagttcagagcgtggatctgactctgctcttcatcaactgtgtgaccttgggcaagttatttaacctctgagcctcagtttcttcatctgtgaaacagagatcatagtagcagctacttcataaggctcttgtgaggattatacataataacccttttcagcatatgacgctatgcctggcatctagttagcacaccacaaatatagttcaattattatggataattttatacacaatatccctcaaacagttctatgaataaggcagaacacagattctcatatctgtctgggcagcgaagactgtgatgcttagagggccgtgacccactaggtcacgtaataagtggaagagtctggattctggacaccagaatcaaatccggagtccccccactttggactttgcttctcaaatggcattgtgttggcaactgtcagaaggccaatttaatagcttataaagggcactgtccctccagggacagtgtttattagagaagtcagattctggccagaatgctgcttggtggggacagaagattggctctggaaagatgtccagagaaaagactgcttaagctgaagtccccaggcacccctggccagtgtcagcacaccctccttctccccgtcttctccctcgctgccagctccttgtacccgcacactttacatatgagaattctaaaagacagacggtcagaaccagaagctaatatagggatcactgtagtccactcagcctttattaaacaggcatagtagatgtaatgatgagccagacacagatcaaatctctcatttacagatgagaactgcgagtctgggaaggaaggtatcttccctaaggtctactgtgaattagtaactgcgttaggcaccttctagagaatatctgcctagctcacaataggccccctttcctgaggtttgtgtgatcccacctacccagtcacagctgattcgatcagaggaacacacctgaccaaagctgggccaatcagattttaactcccaggaatctgaccctaggatgagatgctgatcatagttagcccagggaggaaggggacagaatgacagcatggttatatcaatggtccaattcttggttccaacccttgattgtccttcgagagcaccacccattccttacaacacatctctccgcttcattttgggagttttgaagttattaaagttattgatttcttttccttacaaccaaaataatctaaattaagattgt

SEQ ID NO: 36083 - DNA, 2300 bp, Homo sapien
aggccccgctgaccgccgctcccgcccccagtcccgccggaggtggagcccagttcccaggacgtgcgccaggcgctgggccggcccgtgctcctgcgctgctcgctgctgcgaggcagcccccagcgcatcgcctcggctgtgtggcgtttcaaagggcagctgctgccgccgccgcctgttgttcccgccgccgccgaggcgccggatcacgcggagctgcgcctcgacgccgtaactcgcgacagcagcggcagctacgagtgcagcgtctccaacgatgtgggctcggctgcctgcctcttccaggtctccggtgagcgtccagtgggtcccgccccacctaccacgcccaccaggggccaggctctgccccaatcccagcccgggtgattctttgcctgggtgggcctgctggcccccttgaagcccacctactccaggcttagccccggcctttccaagacccgcccacgccaaggccaggccccgccccgtgccactcggatcccaacctgggcctcccagccccgccctccaggtgcgggccacgcccctccactcacaccttcccttgaggttgaggccttcgccttccaaggcccgcctatgcctataccagtcctaagccccgcccattacagctcagcccgcttcctgggcgtgtgacaaccgcgccgctttcaaacatagccttcccacaggcctaggcttcgcctctctaccagcacccaaaccaggcctagaccccttcgaaacccatccaagccacgtctgggctccgcctgcgtaaggcgtaggctccacccctttcagctcggtccaatcccagcttccagccgttccagcagcaggcagcatcccttccagccccgcttccaccagcgttagagcccctcaagcccaggccacagccccatctcagcccctccccgctcgtccttgacccctgaggctacagatggggaacccttcgggagcctgaggtgtagtttaggggagagaagacgcccctcagcagcttctctggaacgttgttgcggggcactgggccagacagcacacgtttcgtgagctggcaccctagaggtgcaggcccttcggtgcccagaaacccctctcagccccagctcttcgaggcattctcaggtgggctgtcaggggctgcaggtggcaatgggtgggtcagaaaggggtggaggtggtggtgagggaggcctaggggaacaagaggggctgcctgggttgctgatggtcttcctccatgtgaggagagccgcctccctgcaaaagctggtggcagcgcccctggagcagagcctggggatgtctgtcccccattcagtggcatacacagctttcccagcagcacccaactgactaagtggcccttcagcttctgtttgaatccctcactcaacagcagggggataggacggcaggtcactggccctttccccactcccctccacccagccctgccagccagaggcccctgtgacatttcccacctccttcccttctcccctgttctcccacactttccctgtctccccactcctctctctattcccctcctctcccttctctttctttcctcccaatatccctgactcttgtgtctttcccccaatctctttccccatcttccctcatatcccttttctgtgtcttcctaaatttctctttactctgtttttttctcggcctgcctttctcttctcaccaatatcacctcttggaatttccaatctccctgtctccatctcccactttccctcctatcccatcctcgttttccccaatcccctcttctcccaacgttccccacctcacaatattccctttctctttgtttctccgtcccctctctgttttccacctcatcctcttgtttccctttcccacacctcctctctttgtgtctcccctgcaccctccacggcccaatgcccccctccccgccctcttagccaaagcctacagcccggagttttacttcgacacccccaaccccacccgcagccacaagctgtccaagaactactcctacgtgctgcagtggactcagagggagcccgacgctgtcgaccctgtgctcaactacagactcagcatccgccaggtgggccaagggggagcgggggcctgggggcaggtggagtgtggtgtggctgaccctggaaatgctcatcaaggccagaggaagggtcggagatggggcttagacacgttgacccttttagaggcaattcttcaggggcagggagaaaagttttggacatagcagcaagagattg

SEQ ID NO: 36084 - DNA, 2300 bp, Homo sapien
gctgaggcgggaggattgcttgagcccaggagctcaagaacagtctgggcaatatggtgaaaccctgtctgtacaaaaaatacaaaaattagccaggtgtggtggtgcatgcctgtagtcccagttattcaggaggctgaggtgggaggatcaattgagcccaggaggttgaggctgcagtgagcgatgattgcgccattccccttcagcctgggtgacagagtgagactctgtctcaaaaaaaaaaaaagagtccgggcgcagtggctgatgcctataatcccagcactttgggaggccgaggtgggcagatcacaaggtcaggagatcgagaccatcctggccaacatggtgaaaccccgcctctactaaaaatacaaaaattagctgggcatggtggcatatgcctgtaatcccagctacttgggaggctgaggcaggagaattgcttgaaccagggaatcagaggttgcagtgagccaagattgtgccactgtactccagcctggtgacagagcaagactctgtctcaaaagaaaaaaaaaaaaaaggaaaaagtcctatcccctgcctctaacaggttagttaagcttgcagggctgagagggcatctggcaatctggaaatgtctgttgagggtggctcagctcttcctaagggctgccaggagcctgagccccccaaccttggggtcacccagtcctgactccatgggggctgtgcccttgcagacctggatgagccaatgctgacggtgcaccagacggtgagcgatgtgcgaggcaacttctaccaggagaagacggtgttcctgcgctgtactgtcaactccaacccgcctgcccgcttcatctggaagcggggttccgataccctatcccacagccaggacaatggggttgacatctatgagcccctctacactcaggtcaggatgggcagctggctcgccccataccacttctcctgcatccaacaggggaggggggcatggggctgagtttttgggactgccttgacttcaacaattctattcttactttggaaacacacattctgattggagttcagacagcctggggcagaaaaatcagatggaaaggtcagggagcagcaatgagggcaggagtgtccccgaggcaacatgtcctccaggaacattgctagttaggaaaaggcacccctaggggcagacaggtcatcccagtctgctgctgggtggcagagtattgggaacctgtggccaggcacagcaggatctgggggcgaggagatgactcctcttcccatgggccctgatagtcccaggagatggtggtgatgccattctgccaaggagggctttcagcggtggctgcaggccagccccatgtttgtgtgggttgtacgagtaagttcccttcttacccctccgtttcccagactggagaaaccaaggcctggtacttgccagtgtgcacaagggcaacctcagacccagagaatcccatgatgaggcactgccaaggctatggagagtgtagcatccaccccaggctcaggacccctggggctaaatggtgagggtggggttggggatggaaagagaggaattagacaggcatttgtggtaggctctggtgctgggtgaatgagtatgcgggatccctggagactcaagcaggcacctcaccccagtggtccactgctgcccagggggagaccaaggtcctgaagctgaagaacctgcggccccaggactatgccagctacacctgccaggtgtctgtgcgtaacgtgtgcggcatcccagacaaggccatcaccttccggctcaccaacaccacgggtacaggcattttcctccccatactccttccctacctgagctaactcccaaccaggagatagtgccccaccccacagggactccaggcacactgccactaatgtctggcccctcccctcctcttcctgctccgtcttctcccctctcatctcccctgagggcttctccagcctctatggttttcctagccccttactctccccaacatccagccctgcctcacagtcccctaagacccccctccttgtcctcttagcaccaccagccctgaagctgtctgtgaacgaaactctggtggtgaaccctggggagaatgtgacggtgcagtgtctgctgacaggcggtgatcccctcccccagctgcagtggtcccatgggcctggcccactgcccctgggtgctctggcccagggtggcaccctcagcatcccttcagtgcaggcccgggactctggctactacaactgcacag

SEQ ID NO: 36085 - DNA, 2300 bp, Homo sapien
aggcgtgagccaccatgcccagccgagagctttatttcttatagaggattgcgttctatggggtagccatcctaataggctgggaagtgtagcctctggcagagactgaaagcagtcactttgaaggaggaaaggtgagacaggaatttctgctgaacaggtgggccaggtatacattttcaagaggttatgggaggagctatgaatattcacaaagggggaatgcacacatgcatagtaagcaaacgtgcatgttacatgcgtctcatgttcactttggggtgcagacaacgtttaaatgcaccacaaatcttgcctatgtgtcaaaaggtgacacagaagacacaaaggcacttagtgggcagcctctgtcaactggccagaaccagtccatggttgctggtcttttatcaagagaaagctactgaaatcagtctcttgtctgatcaaaggtgtagttatggctggtggaacaggaggccagttagtcggtgtctggcagtagatggtcggcaattgtttcagcattgcttatctccaggccagggcttgtttagctgctagagaaaacagaaagccttgtggcagctagaacatagcttattctttaagtgcagggggtgtgacttaccccgggcctcgcatggccttaggtcctgtttgtaatttgatatctcttagccacagagtcggttccatcactcttatgatttctattttaacacccctgtgcccctctttagagcagggatgtcatttttacctccttgtgttcctcgtgcccagtatcaggccttctaccttcactctctcccgtctcacctgtgagcagaacctgtgaagttagggtcttttcctcttcctagagtttaagcactggggggctgggacctggtttgcctttaggacgatggggctagacaatgaggtaggggctgtgaccttggcaagttcagtcatttcccactgggcccatccagccagggcctagctttggtcccctagcctgggccacagctcagccctgggcactgtgagagaggtcagggaggagccgcagccttttgccagctcccaggccccaacttctgtgagcatttctgtccttggagaagaagctggacacaggctcagagagcaatgaaaaaacaatgaaggccttcagggagggcaatgtgcagccgtgtgtgtgtgtgtgtgtgtgtgtgtgtgtgtgtgtgtgtgtgtgtgtgtgtgtgtgtgtgtgtcttaggttaggctctctaaaagcaaagcctgagatggttggggctggggagttatggtttagccaagtgatttgctgggaaaatgctctcaagagaaactgagggaatgagtgaggcagccaagcaaagatgtggctcaggaagcttagtctcagcctgtttccaggggagctctggagtatgacagtgccatagtcaccccacctctgtgtgtgtgtgtgtgtgtgtgtgtgtgtgtgtgtattgtgggggagagggggtaatctaggcatttggcatttctggccaaggcagctctcttggctaaaggcaattccctggggaaggtgagcaccctgagctgtcagcagctggggatggatgcacctgtcaccttggggagccaggaggggcaccgatggcatccaccgccaggactgctaagatggtgatgctaactgagtgacgaccagtctgtacagatgacaaagccccttcacacaatcagcccactgaaaagcacagctctcttgcaaggggttggggaactgtccctttcctgagttcctggcccgcctggttctgtcctagaggtcctgggaggattctttcctgggctcagtggggtcaggcctctgaggaatggcctggggagatctgggctgacccctcccagatacactcaggagggagccccagacttcttctggccttggcacctcttctctaaacctcctcctccatcctctcctgccagctccagcccaggcgcagatcgtgcatgcgggccaggcatgtgtggtgaaagaggacaatatcagcgagcgtgtctacaccatccgggagggggacaccctcatgctgcagtgccttgtaacagggcaccctcgaccccaggtaagcccccagcccagccttgctcaggcccctcctaccctcaccttgcctaggctcagcacttaagaagaggcagcaggagatgaggactcacgatgcaccgcagcatggaggcagagaacaggagatgggggctggggaaatagcaggaaaattaactctgtggggaagggctgg

SEQ ID NO: 36086 - DNA, 2300 bp, Homo sapien
aaggggtagagacttccaggaaccctctaataatgggaagaggatgacaatagaagaagctatccctcatcactccctcaattggcaccacttccttttctgactggatgggggaggcgggaagaggcatggtggctgtgtatctctgtgggacagaaaatgaattttttgcctttgaggtaacagtccggggctggggagtgaaaggatggctaccctgagggtatcccaggtctgtgatatctggccatgatgggcatcattcgtgaattcactgaacatgtctgcagctggcatctgctgggagcaccgcactgagtctggacttcctatcagccttggacccacggggtagaaaggagagaaaagacggaagagggcacaagggaggcgcaaacgagtggaggtgggctagagaataggaatcttcggatgttctcgggcttcctgagatggacagaaagggggctgagaaaggaaggtggaacccccccatgccaccaggcacttcccgacacctcccgctcctcttccagcagtcaggagcgcgcgctccggtggggcttaagccctggagagtcaagggaggagagacccagcaggaaatgggcctggggaagggacggttcattattattattttaaaaaaatttatgtttcaatttatatgcagactaacctttttggagtgtggagatctttgagttttgacaaatgcatagagccgtggaaccaccatcaagatattgagcagttccagggggcgaagggagggggggttcgtagtctccccgcttgttagctgctgcgattgtctgcgctcccacgggccgacctaaaacaattcttgcgcacacgctgagataaataacggcgacaggtggagcaggtgagattagcaggacccgggttgggcgcggggcgggatcggaggcgcgggggaggccaccagcctcgcttgccagcctacgcccctccccgcgggcgtttgggaggagcgttctccgcactcctgctccgcgagggccccttcgaggcggctgagacccgagtgccggactcccgccgctggagcggggctcgggttcggcagccggaaggaggtgtgcccccggggcgcttgggggcgcctgaggtcccgaggggaggcaagatgggaagagtggctagccgaggaaaatgtggggtgacttagggaagctctggcggaggggtcgtgcgagcaaacctgttggcaacctgtgggccgcggcaagggcaggagctctcagcgcgacctctccgccagctgctccggcccggccccagcaccagacgcctggaaaggggcgggggcctctcgagccgggcagacagccttgcagacccacagccgcggcccgtctcgcgcggctgcaggaccccaggaaccgcaggcgcccggcctttccctaggacccccgcttcagtcccgcctccccaaagtgcaaaacatttacgaagtgtgcagtgccctgcgggcatgggtctccgaagcgagcggccgtgtttgccccgcgggctgctggcaacggtgcacccggctcggccagctagtctgggtgtgcaaggctggagaacagcgagtgtgcgagcgcgcggctgcagagcccccgccgaaacccaggtccctccgccactgtcctcgggatagatggatccatttctgctttctgacattttcctgctgggcggggttgggggggaatgttagggggcggagagaggaagagagagagagggagaggagaaagggaaagagaggagaggagaggaagggagagagagcgagagggagagagagaggagagagagaagagagagagaggagagagagagaaagagagagagagagagagagagagagagagagagagagagagagagagagaaagagaaagagaaagagaaagagaaaggcaggcagtcagcttcccccagccctgttttgttttctctaattggtcctgggggaggcgaggaaattggacagaggctgggccaggcgagctgggctgcctttaattggctcctttttttaactggaggggaatcaaacaggagagcgagcgacaacgggtgggagagcgagagaccgaacgaggagacgcgaggaggagggaggaggaagagagggagggaggcgggaggagcgcggaatgaaaagctcggaggggcgaaaaagcagcacagcaaagcccaagttgctgagcgagcggagcgctcccgcggcccggagccgagcggccgccgcgccccggagcccggcccggccccgcccg

SEQ ID NO: 36087 - DNA, 2300 bp, Homo sapien
agtgcaatggcatgatctcggctcactgcaacacccgccctccgggttcaagcgattctcctgcctcagcctcccaagtagctgggattacacgcgtgccaccatgcccggctaagtttttgtattttttttttaactagcgacggggtttcaccatgttagccaagctggtctcgaactcctgacctcaggtgatccacccgtcttggcctcccaaagtgctgggattacagacgtgagccacagcgtccggctttttctatgcactttcttacagatatacttattgaaggctttggaaaatccaccaaattaaaactaaacattgtgcataataaatcagcactcacattttagggtgttttggctttaagtgcttgatttttgcaatcattaacttcaccatcaacagcatctgtggcatattaagctaaatgcgatccttgctctttagaggccaaaataaacatcaatgttaacaaacccacacagtatgcacaaacagaaatgtgatttggtatataaagaaataagatagcaacatttggtaatcaaattaatctaggtaatagtctctctgaggctctgatatacccgacaggcaaggagggtatacggcagctattcctaagagccaggaagtcttcctcagcgatgggtctccaaaaggtctggaggatgttgcctccgtgttgaattagtcatcaataatcgatttctctgttcatgactaactggagatcagaatgagctcaggatcaaggactaggatcgttaaaggactcatttttttagtgtctcaaacttctttggtcacttaccaatttccattactgattcagctacagctcccctttcccctccaaaaaccaaacgtgtcagctgtaggaagaagtgcggctctcctagcctgggcatagggactcgcctgggcatagataatgtacttgtggctctgtggttgggagtggagacaaggaactccccaacaccggtgggggagaagagacaaggaagttgccccagacaaggggctgggggaggggcatttcccaaaagttcctgtcaagagaccagtataccgggtggaactataagagttgtttgggtgtggcgggaccaggaagagagagagagatgcccagggagttggcaaattggggagaatggctccccggaatcgcccaggagccagagcggcagctccagggaccttgactccgacgcccccgggaagccagagctccacttccgcgtttggcattgctcccccaggcccctcctcgcactcggttacgggttctacgggcgcatgcgccgccactctgggactggcccaatttaccctacacaactaatctgctcctccccctcccgcttggagcgcaccattcgcgtttagggggaggcaccgcgccccggagtactcagaaacctgctccccttcttcagacagggggaagataagtttgcttcagattctaaaagttctaagaatacgaaggcctcagccgcccgtcgccgggcgacagcccgaggctctcgttttctcccacagccccgcactccgcctttgaggcgcggaacgaagtggcacgcccggatcccagctgatcagcggctgggctttggcgttggctcccccgggcgagaccattgtgactcctcgggaggggcgcacgccggggagggggcggagcggccattgtccggtcagcgcagcctccgggggaggggacggtgttacggagacagcagggcccggggcttcagagcggccgctgcgactccggagccggcggggggctccggtccttccctgcgccaccgcacaggacatctctctggctggggagcggcggtgagacccgccgagggcgtctgtgtccctcctcccccgcggtcctcggtgcgtccgcacgcccctcctcctcggctccctccttcttctctccgcgcctctccgccccctccccgtctccgcaggccgagtggtgcggcccgcctccagctgaccggcctggaatcccggctccgagccccggactcgcgcccgcccgcgcgcccgctccttccccctccccccgccccgagccccccgacgccgccgccaccgcctcctcagagcggggcccgggcccagccgccgccaccgctgccgccgccgagctccgccgccgccgagcaccatgggagacgctgggagcgagcgcagcaaagcgcccagcctgccgcctcgctgtccctgcggcttctgggggtaagtgcccggccgggtgggggcggggggcgggggccgg

SEQ ID NO: 36088 - DNA, 2300 bp, Homo sapien
ccagcagtgcaggtgcctccttaggggtttttggaccctaaagactgccccaggtaccaagtggttaatgccatctgctttcagctactgaaatgaaatgatgtttgaaagagcaagtcatttcattattcttgtggcaaaaactgccttgagccattttctcttagtttttaaatatatgttcatctccagataaaacagcctagcatatgagcctgcagccagcccccgtctccttgtgggctgggcattgaagggcttgcttggaggagagttctcataagtcacaatatctttcatggtgtgggcctcctaaccttaccctacccgctgggttgcaaaaataggttttcctatatggaggcaaaagagtaagcgatggaaggtttgttctctggctgtcaggtaaagtgagggctgcttgagctgggtgatagaaggagacattactgggacgaagccgacattctccacagaggagaggaaagaggtaattagagcttttgcaagaatggggctgtctggagaaacaataataaaggacatcaacagtggtgaatttttttatacttttaaaatggcatgtgtacaaactgcatggggagcttcgttagctggactgtggcacagttttcttgcctgcactgctgacggctctctgagagcgatgtgacggcacatgccaagggagggctctcaatcaccgctgactgcacacagctgccttatgagttctttgcacaaggcttttgtatctttgcctctatcatactgcttttggttctaacatttagctggcatgtaactgatattttaatttatttgggggaaagcagatgattgcttctcttttaaagctgtctcgatatgatttagtgtttcttatgaaattgttgaggaggagtgtgggcttttctaaattgcaagttttccttctctttgaaaagcagacagactgatgcccagcttgttgattcactgtggctttggttccagtgccctgggcagctgacttctgtccatccagtggttctcttctcagcccagcagagcactatgtcagccaactcagcaagctgggatccagttctgtttattggagtctaatgattttccccctaccatgcaaagccagggatggaggagaatgcaaagcagatgccttccattcccaaaacacctgcagctgctttgcctgtaccctggcctgatgaaataaaatgcatttagatcctttaatataatacatttctgtgctacaaattctgccttgggcattgggtcaccggatgtggtataatccagggattgctgctggtgggagtataaatggctaatgctttacaacaagcttccttgtaaccacctgctgttcccaacgtgtacttacatatgagctatgaggtcagtgagctgtcctaagctttaaacaattattaccttgctagaaaaatgtgatatatatatataatatatatatatatatatatatatataatatataatatatatatatattttttttttaataaggttgcttgatcatttaaggaagatgggtcggggatatttgtcatttatttttgaaatagacactttagatgccaagtggttcatgagttgatgtaccacttgagattaatgagttgagatttggagggtcaactcaggatgctttgggaggtcttggatagcttctgtctgctggagctcatgtgcatccacaggaatagtctctgatttaccaaagaaccagatctacctgcctgggccccatcactgtgctgcgcccagcacaggctagggggtggtgagcaggtgcctctgcgcagacagcagcgtgctgccacctcgggctgcacaccagcagaggcagagtgtgttacagtaccacatccccaaggctcatcagtatttttaggtcctccttcaacttttgacaatttaaaatttaaatgagcaagaagtgtaaaacatttgcaaatgaggtaaaaacacctgagcagctggagctgcagccctccctgggctgtggctttaataaaacagccacttgagggagcttccaagtgagggatctgcaagaaagcaaatgtttaatttattatagtccaaaagtatccagagctgtccagttttgccaacttgaaataattctttttacttcaagataaagccaatatttaacatttctgtctggcaccgattgaatcaaaatgtcaggggctcaacttttgtgactttcagcatcaccttctttgtctccctcaggaaattctgtgtaaaagggcagttcaaca

SEQ ID NO: 36089 - DNA, 2300 bp, Homo sapien
ttgcctgacacctggtgtcgtaaccagaaggagcaaggccacggttgtactgtgataggaacgtgtcctacgggacctggaacagggagtaccggttgtggaggagagatgaggcttgatatatgtggagccggaagtctgtggaaaattcttcccaccagcaggtgtgtgaatataaaccaggaagacttgattctcatcaatacctgctcgatacagacattcgctcttaggaacacgctcgacagtgccgcacaatcagaagcgcaccacactcctgtcagagcattaaagatgagtttaggaatgctgggggtgttctagaatcttacagctcagatatgaaagaaacttggtaacagttgccccacatttgatgacagttctaaaaatttacatgactatgccaataagagttgtgaagatgacagaaacttttctaaagtatcaataattcaaaacagagatcgaccatgctcaaggaaagattgaggaatctttctattcctacatgatattacaagatcattatcatgggaaagggtgatgaaagaggacacagccaagcaaagtaggaacaaaatgtgacagatgtgtcaccaccagtgagggtgaactgcagacatctgggtgtttgttgactttaaaacgtgtaatttgttgggaattcttttcccatgttgtacctaatttgggagtcagaatttttactctttttcttaaaggggggctcccaaactgtataaacttccggccctgcgtaacctgggggaggctcagagtacctggggtcttccgctgtgtcccaggaccctgagaggcagcgcagttgggtcagctgacaagactgtcctgacgaaggggcagcatgctgatgtctcttctggtataagctccttgtcttgtgacgagatgacacgttgagtggcactggtcagagagcgaatgagaaatgttgtggagatgtcgtgattgttaaacatgttctttccctcaattctggcgctcctcccgtggaaaagcggagcctctccccttggacacgggcaggagcgcgtgtggtggaggtgaccttcccgtccatgaggccacatctgaaagtcgcgtgagaagacccatctggcgctctcaggcgacatgagccttaacacgggctggcgcgcaagaagtctggctattcacatcagaaggctggcgataatcgaagagtggaaagtgccagcgaggatgtggagaggctggaacgcttgcgtgtcgctggcgggaatgtgaaacggcacagccgctgtggtagaccctctgctggcttgtcaaaaactccaaaaggaatcaccacgtgacccagcaatgccactgctaggcatacacgagagagagctgaaagctgggactcacacaagtcctcccatgttccaggcagccctgttcatgacaacccaaagtagaaacaacccaagtgtccgtcagggggccgaaggatacacaaagcctgatgcagccccgcagttcagccataaacgaaggaaagtgctgacccgagcggcagcccaggtgaacctcggaaacattctgcaaagtgaaaggagccagccacgaaggtgaacgtgtggttccgtgtacatgcaacagcagggtggggagcgcggcagagacagacagcaggtgggctggcaccaggagctgggggaggagaggataagagcaactgcccaatgggtgtggggatcccttctgggaagtggtggttgcacaacaccatgatgtgccgaatgccaccgaattgttcattttaaatggtgaattttacgttctgtgaatttcacctcaattaaagaaaaaaaatattgctcctttgaagcctccatgctgaagagaccatgtggcaagaccagacggagacagtggtgcccaggtgcccagctgtgcaccagcagcacccatggccagtgagcaaggcttcagatggcccaccccaacctttgggctgacctggtggtgccaagcggagcagataggagccgtccctgccaagccctggccaaactacaggttccccagcaaaacaaacgtttaggccaccaagtcctgcagggatggttctgcgatgtcagagggcttgcagggagctgtcggccccacagcagtcatgggttgagagtgggctcagtcagccaggttccagagggtgttgctgggccccccaggtggctgtgccaggtgaggatgggactagagagctgtgtggggaccagataggggagagggccctcctggggggcctgtcatgagcagggacaaag

SEQ ID NO: 36090 - DNA, 2300 bp, Homo sapien
tgacactaatcctggaattgacttacgtttgtcctactccttattaccttttctcaagctcactcctctggtattgaatggtttttctctccttttgctcttgcaacgttctctacagtcctgttaatttccaggccagctcttcccccaccggccccgcaagccttcagggtgcctcccgctccgtggcccaccccgctgcctgcctccttctactgatctgtcagctccgatctgactcaaggaccaaggcttagtcgtccttctacctgctcgggttcttgcacaagaataaacaaatcgataaaaaccctggattgagagataaagttaaaaaagacctcagagtggcctggtgctgcggcttgctcttcacagccggcctctcactggaggagggatcagggcgggtctctgctccgcactgcgctggtaagagcctgggaagagatgctgtctgtggtgagcacgtgatagacattccacgacccgacctgtcggtgccctggttctcattgtttcttctcatttccagctgcatttatctcttgtctaacttgggcagtgttaagggcacaactgtgtttagcccattagccaatttgttttcagataataatgcaaatggctgttactcccaacacacctaacaagactgacagccaatctcaactgcttctgtgttttcctatggatatttcttctaaagaactcctaactatctctctccctgatgccacagagctcacggcaggccctgccatcaagttaggggaccctggaagcccctggaagccctaggccgtaactgcctgactgagctccctgtggctctgcaaggaactggggccatctcagagctgcgtcccagtctgtggccccagaatcccaactaaatgaagtgcagtctccctgagcatctccaccaagccacgcaggtgctgccagattcaaaggcaatacacaggcaggagtgagttacctgtattaaatcacaaactgtgtggcgaagattctaagtggaaaagagtgtttttacaaatggataggcgggtgaagacacagaacctgccatgggtgggggtgggcaagctacaggtgacaggtggggagggaacagcctctgcacaccaacagagacaggatgaacatcacatatgcagcagacacggccagaggatgacgctgcacacgtgagcagggtcaggaggtacacacgtaccacaagcatgaagcacctcctacgtgcctgactgggcgaggtcccagctgccctcagagggtgtacggtccagtgaggccagcagacacataagccagggagaaggagccccagggcatagaggagtgggacccagccaggcaggcggtcagggaaggcttcctgggggaggagacatctgaggtgagtctggaaggaagaggcagccaagctagagaggatggaggagggggggacttggtgtggaagaaaaacaggaagaactacacaggttctcaagccaaagggtggcaacagagcaaggagggcctgggagcagcagggtgtgggggggaggggtggggcagaggccacacccaatgggacagggcgagggcctggccttaagctgggcagggatcctgatactcttggacaaaggaggctatttatttatttatttatttatttatgagacagagtctcgctctgtcgccaggctggggtgcaggggggctatctcagctcactgcaacctccgcctcccaggttcaagcgattctcctgcctcagcctcctaagtagctgagactacaggcacgtgccaccacacccagctaatttttgtgtttttagtagagatggggtttcaccatgttggccaggatggtcttgatctcttgacctcatgatccgcccacctcagcctcccaaagagctgggattacaggcgtgagctaccatgcccagcctacgagactctttaaaaactaatatttcttaaactaaaaaagttatttaaaaaggaatatacatttgtggtgacaaattcaaataacaagtattttaaaaatctagatgacaacaaacctttaaaccttggaatcccctgatttagcaatttggaatcaataggcaggagtcattttcaaatcaagaaagatcagaatttggtaacagactggatgagactgataaaggagagcgcccacaatgactctcagggttccctggaagggacgggggcgggcatactgcggtgctacagaaggtggcagcagcaggtcccagggctccagttacagcagctcagacctgc

SEQ ID NO: 36091 - DNA, 2300 bp, Homo sapien
tgtggattgaagaaaaaaatgtgtacagaaggttgtgtgtaggttatactatacaaatactgtgccatttgatgtaaggtacttgagcatctgtagattttgatatccttggtgggggtttgggggtcctggaaccaatcccccatgcatacaaagggacaaacatatattaacattatgctaacctaattagtcagagtccaggatattgatcaggctatatttaccatgcagccatacagccctctttcttttttttttttttctttttcttttcttttctggagtgcagtggcatgaccttggctcactacaacctccgcctcctgggttcaagcaattctcctacctcagcctcccgagtagctaggatgacaggctccagccaccacacccggctaatttttgtatttttggtagagacgaggtttcaccatgttggccagcctggtctcgaactcttgacgtcaggtgatcctcccaaagtgctgggattacaggcctgagccactgtgcccggcccatttttattttttcattaatctttgagattgggccagccttgccatcttactcttcttcttgagagtatcttgcgatgagttagtcctgccattacttcctctttctggactacttttatacttcctctttccatatagtcagtgtagtaagttcaaccagaacactttgtgcaacccaggcattcattctgtgtctcattcttgttctctctttgcatgtaagcctaagtatgctggacactgcttccgatttctatactgtgttgttggcctgaagataggaaaatcccaagatacagaattggacttaagatagaggcccttaattgcatcttgatcctaagccaaatgttccagtccagttttactgtattcctgctctgtggtatttagatgctgagccacctcatagtatcatactttgattttcattcagcttgtgatttcttattttctgtaaatgtaaatgcatatggagagaatggtaaatggcagagcaggaattcctgggtcttcagccaccacactcttaaaatccctaataatttctacattctgggtgtttataaaatcttcctgggtgtctgtaaagtcttcctttctttatactgctgccttaaaccctgccttcaacatctctatagcttggaccttgcaggtctctttacacttttctaatccgttctccacattgctgtgatcctaaaatgcagactaaacctattgtttgccggtgtaaaacctttgagtggctcctccttgtctataccatgaaacccaagatccatagcacagaggcaatatagtgtattggttcagggtgcagttctagagtcagtctgcctggctttgaatttggctttcctttattagctgagtgatttttggccaagttacttaccctctctgtcttcagtctgcacgtctataaaatggaaataacaatagtggcttctttgtaggagaaggtttgctatgatgtttaaattgcataagaataatataaagggattaaaacaatgcctagagtagggtaacacttagtaagtgttagatcccggcctactttgctagtctcatttcctgctgaaaccctaagctccaaccaaaccaaactgcttctagattccaagtgtacactgtgctagttcattgttctgtatctttaaacatggtatgccctttgcccggagtgaacatcgccctgcctgatgcctgagcattgtcttcactctgaagattcccagaccagtctgaataacctgagtattgtaggtattgaagattcagtgaagtacagattggacaacatgtctgtcttcatagaaattatgttctactggggagagagagacaacaaaataaataaagcagggaagaggatgtttatggggtgggtttgcaatttcaaataggcaaggcctcattataaaggtgacatctgagtaaagacctgaagattaatgaacaagccaatgtgggcaaagagtgttccaggctgagggaacagcaactggctctggtatgctcctggaatagtaaggagggcactagggctgaagctgaagagaaagtagtataagacggtgtcagaaaagaaatggggccaggttgcagagcgcttggttgagtgagattgacagccactggagggtattgagccaaggaatcctgtgatttgattgttctaactactaggtagaccataggttgtataagggcagacacattctaacaagaataatttagacaaaagatagtggtggcttggatgag

SEQ ID NO: 36092 - DNA, 2300 bp, Homo sapien
ctcatctgtgaaatggatgtaataatagtactgtactcaaaggattattatgaggagtaagtcaaaggaattaatatttgcaaagtgcttaggacagtgtctagcacgtcatgtattatagaagatttgttaaataggaagaatatgggtgattatcacacgctaatagaatttagaaagttataaatcgatagcacttaaacttctgatggtaagaagttaagcataactaggatgttttgtttatttttgctgggttgctacagtcttttgcttccattttaaacttccatttttcagctgcaatatattgttcttttctggtgccactctctttactcatcttcatttgaaattaaaaaaaatttttccagaaatctgcaatgatgaattactatctttttgccaataacctgattatagcccagactttcccgtattcaaatcacacaaccaaaatgtatgtgtactgtgagaattcggtatttttttacagtctgtaaacatacatagttctcttatcgtgtgctttttaatatgttttcttaatagtaatggctgtatattttgaaaatatatgtatatatgagtagagctcataatatgctttacaaacatcatctcatttaattcttaaacagaaacacctgggggatagatatggtctcccccccaccccattgagaaatggaagttgagagagggaaacttcttcaaagtgatgcacctggctaaatgtggagccactgtttaatctctgactcttcaagctcttaatatctttctgcagcctcttgtctttccatggagagtgtcagttttagaatgttagtacctggaagataggttccacatctgtgaagcataatttacacggaggacttcagagtcccaggcacaattggtggttaataaatctaatgttggtgaggggaggggatttaataataaccataatactgattttgatgacagactatcaattttcatttttaaaaattctcaagtgcagaaaaaagatatcttttttaaacgatcttgttttataagctagattaattaatttcagcatattcatatataactaacagctatgctatattggaacctttctttttctgttgttttaacagatttctgacctgtttgctttgcttttatacattgtcctcagtccagatggcaggtacaggtcatcttacatgctatttttgtttagtagatttttttgttgttgagacggagatttactcttgttgcccaggctagagtgcaatggcgcgatctcagctcatcgcatcctctgcctcccaggttcaagtgattctcctgcctcagcctcccgagtagctgggattataggcatgtgccaccacgcctggctaattttgtattgttagttgagacggggttttactgtgttgcccaggctgatctcgaactcctgacctcaggtgatccgcccacctcggcctcccaaagtgctgggattacaggcatgagccactgcaccccgcctgtttagtagatattaaagttactagtagaatgaactcagcagagctgatttgtttgtcctagtacatgccttttctagttttattaacttttgaaaaataacattagtctcaagcactttgtggttgtgatactaatattacatttaaactctgaacattttttttgtttgtttttaatagggacagggtcttcccatgttgcccatgctggtctcaaactcctgggctcaagtgatccacctgcctcggcctcccaaagtgctgggattacaggcatgagccactgcacccggcctctgaatggtgtcttaatcctcatagatgttctgtattttctatccaataaacttgtctatgctgttcttaaatgcagatactagaataaactggaatgctagaattgtatttttttcaaaaaatacagaataaataagtaatcattaaccttgctttttctatttttaactgtagtaccagaagaaaacattgcaactatgaagtatggagcccaagttgtaaagggggagctgaaatcagccttattagatggtgatactcaaaattatgatttggatcatggattttcaaggcacccaattgatgatgactgccgttccggcatcgagattaagctaggtcagccatccattatcaatcacatacggatactcttgtgggaccgagatagccggtaagtgattagcatgacttagaaactgacattatgtttgagatgacttagctttgtggtcatctacttttgttttacagatatgatgg

SEQ ID NO: 36093 - DNA, 2300 bp, Homo sapien
gtactcccctcccccaactaactctcattccttctttatatgatagaacaacgactatcgtctattccacaagatgagtaacagccaccctcttcgcccctttactgcagtgggggaaattgatcatgtgcacattttgtctgaacatattggtgccttgttgattggggaagaatatggcgacgtcacattcgtggtggaaaagaaacgttttcctgcccacagggtaattttagcagccaggtgccaatattttcggtaagtgtgtaatactttttttgaaaatttagttcacttgtagaaaacactggtattttctgctctatgaaaaatatataaccaagtataatgacaaagtcttgcagtctctcaattcaatatctatgaagatttcatccttgtagactttgttattttttgagaatcaccttttcctttaggagccaccttaaaattaaagggttagaaggattcccagaccaaatagtgcccaatcaaccatttttcaaggtctcaagaatgtttctcaggctaagtcttcgttgccctcactgtctcctcccagtagatggctaatgggactaaagcttctttttgcataggtagactgccctgtggacctgctaatggacacatataccccttggtttgaggtctaggagctgttagtaacccagcagatctaagacgtgcacttgtatgcagctgttgttggttacttgggtccttaatttccagggttataaatcttaagctgatctttaactactctacattttacctaatatttgtcaaaagggagtcatcactgaattaattactgagtgagttataatttatgcatgataatggatctttttctatttttaaggataaagatggttcacagagttatagatttatctgggaaacttggtatctaaaatggagattccattggattagagaaaatttcaattaccttgtagtgataactgcagtgtctggcttttatagtcagaattaagcaagacagcaacacctagagtcagacatgttgtggtaaagtgtgtctcctggaaatatttactctgtagctagagctcctatggtttttcatgaacttccaatcttacacatgtaaaatgccactgtagatgaaaccgggagcttagaaaagtgaggagtctgttaaaagttctagcactctcctattcttcctagtggtcaactctgccaaggcatccgaccttggtctagccattatttgttatcagcctctgtcctctgcacacttttccttttatatttcttcctctttttaaaattttggtccagtcattactattaaagtgttttataagagcccactttttttttttttttttgagacggagtctcactctgtcgcccaggctggagtgcagtggcgcgatctcggctcactgcaagctccgcctcccgggttcacgccattctcctgcctcagcctcccgagtagctgggactacgggcgcctgccaccacgctcggctaatttttttgtatttttaatagagacggggtttcaccgtgttagccagtatggtctggatctcctgaccttgtgatccgcccgcctcagcctcccaaagtactgggattacaggcttgagccactgcacctggccaagagcccactttttattaagtcagaacttctcagcctgtgtttattgtttattagtacagtgtaccttgtcctctttcaaaaataatttgaaacaactctatgaggatatcttttaggtgattagtatatccttaaaaaaaactcaaatactttgagaaatttgaagatcgtattgagtgaatggaatatactccccccgcttattgaccttgttcttgatgtctttgtagatattgaaccttcgtaatatttgctggctcactaagctaagctcagagtctaccttagactatcttagagctaagctctacctctaagtctaccttagagctaagctcaatgctaccttagacaggttctcaatgctgactgtattcatgtgcaaaggaatgttaattgtcagctgtcagaagaggcctaagtgctgtcataatagcctatcaattcccagataaggaattgtataggaggaaacttcatagtaaacattgaacctctgtgcttgtctccttgttgaagttgggggttcatgtttattgttccaagggagcctcatcaaaaccacttttaaagcattgagaatccaaataaataccatggatcatacaggattggggataagtcttgaggtctccccgagaaggagaag

SEQ ID NO: 36094 - DNA, 2300 bp, Homo sapien
ccaacagtatagcatcttcaaatctctgtctgacctctgcttccatcatcacatctccttctctgactctgaccctcctgcctccagcccagtcagacaatccaggataatctccctagatacatcatttaatcatatctgcaaagtcccttttgccacataatataacatattcatgggttctgagtattagggtgtggtcatccttttttttttggttgggggggatcattattctgtgtaacacagctgacaaagctggtattaaatattatctgtggacagacagcttcctaatgccaaactctggaattaaatacatatactctctttgtagccctggactaggcacccttgtccctacccacaggccctgctccagaagaaacggaaaagaacaccaggacagttccctgaagatagttatcttttaagagaaaaagaatgggatagatgccacatgtccagtttctcccatttaagttcaccaatcaggaagtcactcctctaggcaagagtgagttgcagacaggtataagagaaaccaggagagtattacactaatggatatcattccatatggaagaaagacattgtgaatggagagtaaatgtttccctaacaaacatatccatatttgaactcatcatcatactccacatatctggtcatcctcctaagaaatgtcaccatcactatctataatagtaacttagacacttgtggataatcaagactcatgtagcttgccatcttgctaaatgttaccactgtctacctcagcactcatgctagaaacctggcctactcatttatccgcactcagtgctgtgaattctaccaccttaatggcgctaacatctatcccctcctctattcccactgccaatgccttgtttaatgttcttatcacttgtctggagtactgcaatggcctaaaaatgggtctccctgccccaagccttgcttttcctgaccattttcactttctacttttactcatgaagcttcctttgcccggaattaagtccttcccaatttgtctcctccaacaactgcaagggcggtcccctagcttgctccagcgtcggggataactgactttcctacaccagctacagtcagacctgcacccggatttctaggactcttatctatgtagatagataaatacatttttttgagacagtgtcttgctctcactgcagaggctggagtgcagcggcgcgatcacggttcactgcaatcttgaactccccaggttcaagcgatcctcccacctcagccccccgagcatttgtgactacaggcgcgcgccaacatgcccatttagtttttgtcttttttgtagagacggggtttcactatgttacccaggctggtgtcgaactcctgagctcaagcgatccgcccacctcggcctcccaaagtgctgggattacaggcttgagccaccaagtcaaatgggctttatacttacaaagtacctttgcataccttatttcattttcacctcacaattctccagcgtaggctggaccggtattattatgcccatttactgagagaggaaactgagagtcaaggctgggccagtcacaccctgctgcgaaattaacgagcatcacttagcagcctcgacattaaccgcgctcgcgctctcatccctttctggtcctactccttggagaaccttcctgcacctccaagaacttgccgatcgggtctgcggcggtctggacgaggtcactccacaggcgcccaggaccttctcatccgtagtgacgtgcgccggtgacgccatacagtgacgtgtggtgactcgacttacccggagccaggtgccggcagggcagccacaccctggggccccctgttctggaggggcagagggtcgggccgatgcgaaaaagccgcggaagctgccttaggcgactttctgggcctgcatcgccggacccagcagcccgctgtcgatcggttgctaagtgacgccagcgcgcagtggcgcgtgcgcggccacggcggagtgcgtgaaagcggacgcgcgccgcagcagccggggcggcggcgaggacggcggccacggaagcggccaagggggcggtggcgcagagaggggtgcggagcgggcggaagaggcgtctgtgtcgcagcttggtctcagaggagcatcgctggggtgagtagccgggtccttgcaggggaggtggggcctggccgcacctgcggcgcggggacgcgcgcccccgccgtatccgcgcgcaccgccccccgcccctccgccgctttttccgggg

SEQ ID NO: 36095 - DNA, 2300 bp, Homo sapien
attgatattttatgatattgagtcttcctattcatttacatgctttatatctcacatagtctgagaagctcaccagaaagattagtgcaaaagggctgggaacagtggctcatgcctgtaatcccagcactttgggaggccgaggtgggcggatcacctgaggtcaggagtttgagaccagcctggccaacatggtgaaaccgtgtctctactaaaaatacaaaaattagccagcatggtggcaggtgcctgtaatcccagctacttgggaggctcaggcaggagaatcgcttgaacccaggaggtggaggttgcagtgagccaagatcacaccactgcattccagcctgggcgacagaggaagactccatctaaaaaagaaaattaatgcaaaagaagacaatttgggggtcttttcaataattcagtggtaacacacagtatatggagagtttgtgtattgctccaattcccgagtttaaaaggtttaaggtctagttccatatagaagtcctgcagttctaatagactgtgttttgatgaaatatcctcagtaagttagtatgaggtatgcacaacatttctgctgaaatccttatcctgcctatcattttgcagtggacatccatggttcagtttgcctggcaatcctcccttctcataagaacatcatcgctcttcttttagggaactaacagatcctccccaaactccaatcaggtggtcctaatccaggttgccaatcgcagtgcttcaatcacaggagtaagcacaggtcctaggccaggccaatcacagctccttcttggattttccaatttgataaaatccaggctggctggataaaatccagagggagagtttactcccactcctagtgagagaacagctgccaaatttctagtcttatggagctggtgtctgacaaactgaagctgcgatgcagaaaaaagctgagatgagagacggggacatcttggtggtggccaggtggctagtgccatatacatccctgcccaacctcattttggttaggtgagcaccagtcattcccatttattcttttaacaacaggaagtatttaatgagcatctactattatgagccaatcattgaagacacagtgatgactaagccttccagtgaacacaaaatatatattaatgtaaaaagtactgcaagttatggacatttggaacctaagtaggcaaaccatgacttaaatctcatttaggctgggcacagtggctacacctgtaatcccagcactttgggaggctgaggcgggagggtcacttcagcccaggagttgagaccagcctgggcaacatggtgaaacccccatctcaaaaaaatacaaaaattaactggtcttggttttgcagcctgtagtctcagctaatcgggaggctgaggccagaggacagctagagccccggaagtcgaggcagcagtgactgcagtaagctgagagcacaccactgcactccagcctgggcgacagagcgagacactgttaaaaaaattaaaaaaaaaaaaaaaagaaagaaagaaagaaaagaaaaaagaaaaaggaaaagaaaacttatttaattctcaacaaatcctgttaggaagctcagagagggtcagtaattattgcaagtttctagcgctaatatatagcggaaccaagacttgaacataggttttcgactcaacaattgttttaattactctgcgctgcgtaaactgagaaacctctgaatccttacaattttaaaagaacaacttacagttttcagtttccatcagattccaattttctaccaaattgcagccctgaggtatgaatggttaccaaactttagttaaacaaacaaaattagctcattaagtaacagagaaaccactctgcccagcctgcatttttttttttttttttgtatgagtttgcctcctttatgcgcaaggctccttgggagttgtagtctgaggcatagtcctgtgggtggaggcgctgactcactgggacccaatcagcagagagtcaacttgctctccgcgcagcgattggctggaagtcagcggtctcccgcccgcggcgccatcgcgccattcctagttaaggcggcacagggccgaggcgtagtgtgggtgactcctccgttccttgggtcccgtcgtctgtgatactgcagcgcagccatggcagaaccgcagcccccgtccggcggcctcacggacgaggccgccctcagttgctgctccgacgcggaccccagtaccaaggtgggcacaggaccgaagggaacggctcc

SEQ ID NO: 36096 - DNA, 2300 bp, Homo sapien
taccatgtactactgtgctaagtgtttttatatgtgttccctcattgtattttcggggacacttaatactcaggatcgtgggcacttaatgtcttatataagtgctgcatggggtttaccttctgttaagcctcaagagaactctgtggaaggtacagttttcctgtatctcaggcattctcagggttgctatcatttggcagtattccatgaagctagttttctgccagagttaatgaaactattgcatggatcacggtgctacaaacctaatacagcaacacatgtctttagaaccaaagctctgtccatatttagtattatttcttaggaatatattttcaaaagaggcatttgtaggttaaggcatatgaatgaatatatttaaggctctttattaaggaatatggtattctggtttgtttcttactacatgagaatagagagacagcatagggacaggaaaagaaggcaagtataaaacctgccccagctccatcagtgccaaaagtaaacaatgagattcgatggacaagaggtagagcacttgtcctcaacactacctcaacaaatggcaggagtatcatatgggaggccggttcccccaaccccaagtcccaatgggcaaccccgtggacccagatgcaggcagtggactgggaggcaggtaaagaatctagggctaagtgctcagtatcttttgtatcgagcagtaaacaagctagtccctctccccaggaagtgagcaattgtgccttttcgtgccgtggttgctgtggcctgctgagttgcctaaagattggttaaggaagtggctcagagttagagggtaggtaggtcttgcatttcggcacagtcagcaaggatattcaggaactcccttgctcccataagcttatattgtataatcactgagtaatgtctattaatatggatggaccatggtttatttaatttgtgattttttatattcattcttgttttttttttcagttgacagacctttcagtcctcattccacattgatctgctctacattcaaagactgactttcacacctgtaagacaaaatagtttatgtaagaagctatatttgctcattctgcttgccagcagaatgtcagagaattctttggcagctacatttcacaaatcccctaactcagtgactaagtgcagcccctggaagaatgcccctgaagatgataacatctcttgcatgaatcttttcttgcaaaagttccaggatcctaactcatgcctcttcctgtacataataagataatagctgataggattaatgattatgcctctacaatctataaccagatgtacccttgaaccccacccttgatgagattttgctctaatgtaactgctgagctcatttgatgtaactgctgagcacatctgatgccacttcccatcacatgccaccacctgtacctaagctttggagcagtctcacagaaagtctctgaaagactctccggattgcaatccttagtaagacatctgaataaaactaatattaattatttaaatgactgatttttttttctttggttaacacacccaactaaaaacggaccgctcacatcatgtcaggcagtcacagcaaaagcagaaccgtactagagaggggagggggtggacttgggagagaagtcagttttcccccagaatctttctctctcatcagtcacaggtttctgaacacactgactcaccaggaaacactttttaggttctcaaggaaaacactaagtaacttcagaaactgtaaaggtcatagaaaacattattttatatatttccgtattaccacgtatacgcgggaatcctcccaagcccctggcaccgcactccaaatgtccatctccaggaacccgcccttcagtgcctggggtcccctaaacaatgtttcagtcctcgggctcggtgggtgcatcctttattggggagcgcgggggctgcccgtgcccctccagtcgctccccgtagggagctgcgcactgcggagccctcgcccccgagcgagcctgtctcggactcccaaccgtcagcctcgttccgggccgcggaggccggagcagctcccccggggcagcgcaaccgctggggccggcctcagtgggctgagtggtcggggcatcggggcccagagagcggctggtgagtacttggtcggagcgcgctgtgagcgcccggcccctgtccgggaggccctgatgcagccgggttccccgcccactttccttctttttaggggactggaatccacgctacagttcagtcct

SEQ ID NO: 36097 - DNA, 2300 bp, Homo sapien
gaatcttttcttgcaaaagttccaggatcctaactcatgcctcttcctgtacataataagataatagctgataggattaatgattatgcctctacaatctataaccagatgtacccttgaaccccacccttgatgagattttgctctaatgtaactgctgagctcatttgatgtaactgctgagcacatctgatgccacttcccatcacatgccaccacctgtacctaagctttggagcagtctcacagaaagtctctgaaagactctccggattgcaatccttagtaagacatctgaataaaactaatattaattatttaaatgactgatttttttttctttggttaacacacccaactaaaaacggaccgctcacatcatgtcaggcagtcacagcaaaagcagaaccgtactagagaggggagggggtggacttgggagagaagtcagttttcccccagaatctttctctctcatcagtcacaggtttctgaacacactgactcaccaggaaacactttttaggttctcaaggaaaacactaagtaacttcagaaactgtaaaggtcatagaaaacattattttatatatttccgtattaccacgtatacgcgggaatcctcccaagcccctggcaccgcactccaaatgtccatctccaggaacccgcccttcagtgcctggggtcccctaaacaatgtttcagtcctcgggctcggtgggtgcatcctttattggggagcgcgggggctgcccgtgcccctccagtcgctccccgtagggagctgcgcactgcggagccctcgcccccgagcgagcctgtctcggactcccaaccgtcagcctcgttccgggccgcggaggccggagcagctcccccggggcagcgcaaccgctggggccggcctcagtgggctgagtggtcggggcatcggggcccagagagcggctggtgagtacttggtcggagcgcgctgtgagcgcccggcccctgtccgggaggccctgatgcagccgggttccccgcccactttccttctttttaggggactggaatccacgctacagttcagtcctccacctctgttagttgaacccagggaacccctgcttcaaaaccccagctgagtcactaccctttgtcagtctctacactggacatctaagtgacttcacacccactccccgttttgagactagaaaaccaaataccgcacgttctcacctatgagtaggagctaagctattgctacgcaaaggcatccagaggggtatagtggacttcggagactcagaaggggaagggtgggaggggggtgagggatgaaacaactacatatcgcttgcaatgtatgctacctggatgaccctgaagtctcagacttcaccactatccaatgcatccatgtaaaaaaaccacctgtacccgaaaagctattaaaataaataaataaataaataaatatatatatatatatatatatatatatatatatattttttttttttttttgagacggagtctcactctgccgcccaggctggagtgcagtggtgcgatctcggctcactgcaatttctgcctccctggttcaagccattctcctgcctcagcctcccgagtagctggggctacaggcacccgccatcacgcccggctaattttttttggtattttcagtggagacggggtttcacagtgttagccaagatggtctcgatctcctgaccttgtgatccgcccacctcggcctcccaaagtgctgggattacaggcatgagccaccacgcccggccatatacctatatatttttaaaaattcaaaaataaaacaaaaaaaatgcctctccctccggcttatttcccgttcctctacccttctcattcccctctagcccaaaagtctcatcactgaatttaccacttttcccaagatagttgtgcctctttttgcttctctgcttttgtacgccactgttcccaccttctgcctataatgtttctctctcccatcctctcctgacaactcttctttagacccgactcgggtggtaccttctccgtcaagttttctttctttctttttttgtttttcagaagttttgctgcctgctaagctctcttagcccttcgttaattcacctgtcattgacattgaccatcttgtgttgtattcaatagtctgtcacaccaatttgattgtgcattttgctttggagaagtccttagtcttttatgtagccacagtggccagacatgcagaagacgttcaatattgctgaatgaactaatgcatt

SEQ ID NO: 36098 - DNA, 2300 bp, Homo sapien
tgcagaggagacaaaaggaaaaagaatgaagatgaacaaacttatagaaaattacctcaaacgaccagatttaagaattattgagtttgtgaccagtctgagcaacagagtgaaaccctgtctctaaaaataaaaaataaaaaaattaggcatgtatcgtggtgcattcctgttgtcccagcaactcagaaggctgaggtgggaagatcacttgagcccaggagcttgagtactggtactgtttggcagtaccatgagaccagtctcagcaacataatgagaccttgtctctatgaaaaataaaaataataaacaaacaaacaaacaaataaataaattagccaggctggtggcatgcacctgtagtcttagctacttgggaggctgaggtgggagggtcacaagcctgggaggtcaaagctgcagtgagctatgatcacgccactgcaccctagcccaggtggcagcgtgaggccctgtcacaaaagagaaagagagagagagagaggagagagaaagagagaagggggtggggagagggaaggctaaaaaaaccctgctgataatttgggaacaatggttcatgttgacacattctaggggacagtgggtgggtaaactggttaactagcagctaaaagataggtcagtttgtccttgagtaggccaactaagtgtatcaaacaaacaattatagctgtttatgagttctctggaaaacttggagagagcagttgtggggcataggtgacaggctggctctgtgtagtatctactgttgacccatcataagaagctccatcttgcttaggccaggtctgcatctgtgtcctcagaatttctcactagaaacctctttttctgtcttcttacgtgtttgggaatgtatccttttgttctccaagtatttactattattctggtttctggattttaaccacatcctgaaaacatatttatttggttggaggcatcattattgtcctacaatatggtttttgtctgtaactgacatctccttttccactggcgtcccctaatttccatggttatgtgctcataacttctacacttcttcattattagagcttttctgtttaggcaggctagatttatgctctctatagtaccattgcctcaataaatagtcacaatcacttttcagtgtgaactttctgtttggacttggggttatttattttggctgctaagaggatgttttatgcttttatggtagatgagatggcagacagtagaatgtctgattaatgaactgtattgcattacatagttccttgaagcaaggaacctttagagttcacgaagttctttgcttggtctcttgcacagtgagtacctcggcagtgatctacagtctgtcctctaattcagtggctctcatcttttttttttagccctaaggcacctcctcaggtgccctccaatgaattgctggggttactatggcagggatgggatgtgtgtggagggacagtcccctagagccataacataatcaggaggagcacttaaagtctgaaaaagctcccaggtgggtgggggtgtgtgtgtgtgtgtgtgtgctgtcctcactaaaaatatcacctctccagccccataaactaagcttccttagataatatggcaagggagaacttaatgattttgctacttgtctagctaaaaggggagtaataaaaacgtacaacactcaatttactgtagttttaaacgaacctatgttataattctaggtttcgaagtataaagcattccgcacgacgggggatggagaaggatgctgaagatggcgccccttctgagggagcagaggctcctccctctacggaagaggctgcccctccccgttcagaagaggaagaggccccgcgccctccgacagtggaggccccggcagaagatggtttctctccttccgcagaagatgctgtttcttctgtggtggattatcgggatctcattccttctgaagaagggatagttcttccagatgatcatgaagcggatctgaatagagttcgacagaggcttgcaccgcgaccggttcagtcagtgatttcggaagtgctgtccttgccgtcttcccggaggtcctccagataccgccggagtatgagtggccttcccaatctacaggaaacattaaaagagagacaggtttgcttctaatacgatttttcatgtgtgccacttttccttatcaaatacgaaatacttttactttacaaagtatgaaacagtttgatattttttcttcagaattgcaatttttgaacttg

SEQ ID NO: 36099 - DNA, 2300 bp, Homo sapien
gaatggaccaggcaatgtaaatagaagagaagagttaaaagaaatagtgtccatttccacgaagcttcttaggagccacattttcaggggtgcacaaatgtggtataccagaacacttctgttcttagtttctgcagccaggtcaactataacttgtccctggccccattccccttggctcccctggctttcaatctccctgctcatcttattcttggaaccttgcctggacatccttagctcaatgcatgctcctgtatcacttggacatgaatgctgctattttttctgatcttagctttatctctccatttctggattaaatttactgatagtcttcactgaagtcctttctgatgcaacccagtcccaggaaccttcttgtggaaggaatagaaatatgcccgaaactcttccttattttaaaaaccatccactgctgggatggaaatagactgaattgtattctccttactcagacaacattattttcttatgtggataagcacatgtacaaacacatgcaaatgaaaaacaaagcatagtttttatgcccagggctgtggtcaaccttggcagctttgccaaggctaccttcaatgccatctccaggacctacagctctgacttgtggaaagaggatgtatttaccaagtctccctatcaggaattcactggtcaccttgtaaagacccaataccagtctttgcgcaggtgaaccaggctctgggggtggctaccaaatagtgtttcacaagaaaaatccagtgaaataaacctgaaattgggattccaaaatactatttcaagtttctaaaagacattgaagatgactgaagataattatctccttacttgggaaagatatcacaaaaatagaatttaccccttgagaaataaagcaagatataagcaaatttagtcttactggtgcttttcttcaccttgtttattaagttcattaaagttctttgtttagattctttttccttattaacttacaggaaggtctttacagcacattatttgtataaagaaagctattcatccagggaaacaacttccttcatgtgcagaatttttttttagttatttcctttttaatcaaaacaggacaaaagtaggctgatttaattgttatatttcatatcttctttttatcatagtaattgagagatacatatttaattccattctcctaatcgcctgttgtcccagtggattcttccttgcatcttatggtctgcacccacaatagcctaaggcattagttgaattcagaagataggatacaaaaagttgagaaatgagcctttgggaatcttcacagttaggcagggggagggatcctaggtgaagtaagggttcaaatccaattggctcatgcagagatgaaccactacagtgtgtctattttaactaataacaaacgcattaatctaaacacgaagacccaaccaggaattcagaattgcagttttaaaaaaatgtaagcatatataaagtgaatgtctagtcttttaggttgactttacggaaagtgttaaattcttcccagtgccaataggagacagaatacatggatagaccctcagtgcgactcaatatatcatttctgacattcttatgtttactttttatcacttactcatcttgtaggggtcctgagaaaataaatgaatatccagatatgcaagttgctttgctttctctgagcgattatagctatgtaagtttgaaaggattaatccttgactattctcttccatctgtcaggagcagaactctgacattgcatctgagcaatgccccttaaccctcctcttttgatcatagagaccccattacacatctagaccccattcaacaaaatcatgactcaccaagttttagaaattaatttttgtatgttactttaatttttttaagtaagtcttcttctattgcccttaaaattcttgattacctgtccaacaaatctctcggtttcccttagcaatgggcacattctttgtaacacagatagaccaatgagttctttctgtttaggtgacatctctgaaccataaatattttcgcacacacttggaggacagcctttccttgggccgaccccttctcattgaggacattcatgaagagctggatccagccttggataatgtattagaaaagaattttattaaatctggcaccactttcaaggtgagctttgtaaaaaaaaaaaaaaagaaagaaagaaagaaaagaaaaagaaaaaaagaaaaaaattaagaaagagaaagaaagaaaagaacaat

SEQ ID NO: 36100 - DNA, 2300 bp, Homo sapien
gtcatcttatcacctatcatggctgcagctcactttgaagctctactgtggtcaagtcaaaattagcaggtggaaagtcagtaggtgaagaatagtcatccgctttcttcctgtgcctcagctgcagatgtggaggaggcctgtgggggacactgtgggcaggggcaaggtagggctcgcaacacccaggccctggcatgcaggcatcttctttgagggcagccaaccagagagagctgctgcaatcttcaggagatagatggcagttgtgaaacatttcagaaatcctcttcttttttttttttcttgagatggagtctcactctgttgcccaggctggagtgcaatggcgcaatctcagctcactgcaacctccagctcctgggttgaaacaattcttctgtctcagtctcctgagtagctaggattacagatacacgctgccacgcccagctaattttttgtattttagtagggacggagttccaccgtgttgcccaagctggtcgcgaactcctgagctcaggcactctgcccgcctctgcctcccaaagtgctgggattacaggcatgagccaccatgccaggccagaaatccccttcatcttttagtgccccagggacaaagtgggagcaactgagttgcagaataactgttctgttattaatttatactctatctgtatcctgtatgatgaattgttcacaccacagatatgagactttggacagttatttaacctctctatgcctcaataaaaagtaggggtcatagaggaaaaagtgtaatcctcaggtctggcatagggcatctgctatgtgagcctttgctatttgctattactgcttactgtggcttttttattttaattttaatttttttatttttttgtttttgagggggagtttcgctcttgttgcccagagctggagtgcaatggcacaatcttggctcacagcaacatctgcctcctcggttcaagtgattctcctgcctcagcctcccgagtagctgggattacaggcatgtgccaccacgcccggctaatttttttatttttagtagagacagggtttctccatgttggtcaggctggtctcgaactcccgacctcaggtgatctgcccgcctcggcctcccaaagtgcttacaggcatgagccactgtgtactgtggcttttttaaaagcacacttacaaacaccgtctaaataacccagcctgattgttgctgaagagcagggataggctcaataatctatagttttcgtacttagtcttgatggaacttgggcgtcagtgagcaccttttaatgcctctgaaaacctgaagtccttttcatgcttctgaacaatatttaagaccagctgttggagagactcctttcgttattaggctttaggtctcaaggtgggggatcactaggaaaataaaagttttgattttgtcatctatcattatttttaagtagagatcaacatttagaggttgggttatcagaatggtctgtcagtggttctcaactgagggtaatctacccacccccaggggcatttggctgtgtctggagacatttttgattgttaggacccgggtggagggtgctactggcatctagtggatagggacgctgctaaacatcctacaatgcccaggacagcaccccccacaaaaaaaattcagatccaaatgacagtaataccaagcttgagaaaccttgatttgtgtttcttctggcccaatcatttggtgcagttgacacacgatcctaattgtagcgaataatgtagaaaaataatggaagaactggaagggaatagtaatatccaagttattcaagtcattgatcctgaagaaaggtttaaactgtgctgttatgcttgaaaaattatctgcctgtaaagaatgaccctctcaggtgattcagaatcctttgtaatatattccacttacatatagttctgtggcttgctaattggcttgcttcttttagatatctcgtaatgagaaggggtggaaaagctggtttgataaagatgctccagaggaggaaattatccctgatggatataatgattcactagatacctgccataaacttttacttatcaggtgagaacaggcattatcagacctagaagcatcactcataatattgctaaattacagattttatctcagtgagtttacttcactatatcactgtcattgaaagtaacggcaaaaaccgcaattacttttgtgccaacctaatattataagaaatgtatgtacttccaaattatggttttggatagca

SEQ ID NO: 36101 - DNA, 2300 bp, Homo sapien
aggagttcaagaccagcctgggaaacataatgagacctcatctctacaaaaaaacagaaaacaaaatgtggctaggattagtggtgtgtgcctgtagtcccagctacttggaaggctgaggtaggaggatcacttgagcctgggaggtcaaggctttagtgagccatgattgcaccactgcactccagcctgggtgacagagtgggagcctgtctcaaaagaaaaaggaaaatgtattctctttttccatcttttggaacagaatatagcatatgagagtccttgaaagttttaaaggacttatcagaaaattatccaagcctagagcctttgctgatgtaataattttaaaacttctactttttctccccttgattattggtttattcagggttttctaccttttctgaggaaattttctaaattcatatgtttctataaatttgccaattttaatgagatgctgtaatttattttttttttttttttttttttttttgagacggagtttcgctctgtcgcccaggctggagtgcagtggcgcgatctcgactcactgcaagctccgcctcccgggttcacgccattctcctgcctcagcctcccgtgtagctgggactacaggcgcgcgccaccatgcccggctaatttttgtatttttagtagagacggggtttcaccgtgttagccaggatggtctcgatctcctgacctcgtgatccgcccgtctcggcctcccaaagtgctgggattacaggcgtgagccaccgcgcccggcctgtaatttattactataattatgagccattctcttattatttaaaatgttaaaatgtttcatctgtacatattgttatatcagttttcccactactacttttgtgtggttgtggggttttatgtatttgttctctttcgtttgtttttaggtgttctttttaagcccatccttcctctgagacctccctcctccagtagtcaggctcctagaaaggctctcgtgctaaacccatctgctttctccactttgcccatgtacccagtactctgtgcagagtttatctgctccaaatttctcactacagatcttgaccagtacaagacaatatctataaccaaagtttcccttctcctctttttctacaaaaacttattgattctgtcccatccgtatgttattttcgggtagctggttaattcattcaatgaaaacaatgagaaggaatgaaaaagaaagaccaatgagatcactgaagtggggttcctgagataagttctgaaccagatctgccacggactaggtctggggccttatctccagaccatagtttcccccaactgttaaaaaaaaaaaaaaaagtaattggatttcaagatttccagtcacattcacctgaagcattctatgattatttattatccagattttcaaataaaatattaatagctgagactacattaacatgttgttcggtatgtgtaatagttccattttaacagctatctttgggactttcaacccaaagcagcaagcagcctgagacttcctaatactgctcaaatgatttggcagtagaattgtttataaaattcatttgatccttcagtgttaaagccaaatctatgttgttccagtaccctaataaagtaatcaatagaagcctggattgttgttggaaaaagtaaggtaggaccaagaaacggaaaccaccaaattgccaagcaaagcagtatgataacactaaaggatataacacaagtctgcccttctgcattcatttaatgtcagttataatttctcccaaaggagaccttgaattttttaattatgttctcaaattacaacatttgaaatggtaactctagttgaatactccttcttctaggcgttgtatcttctaagaaatgtcccccattccagctctgtacataaggtttctactaggaacctatctccagagcgacagttcattgattggcccagaaaggagtgcatgaccaaagcaaagacaatgagttacttccctggatattggaacttggaaccatgacaataagaggagtttccctgagggtgctgaacattctgagcacgtaagcagtgaagcccatgagccactagaagccacatgttctgccatgtggagaagaatggtaagtgttaagagagaaaaaatatacctgtgtgcagagagaagtgaggcttagaggcagctggataaacactcatagagcaacagatttgagagagatttgcaaactataaggctactcgagaggcatcactctgagataaactc

SEQ ID NO: 36102 - DNA, 2300 bp, Homo sapien
agactcaaaatctggttacaggaccacatatatcaatatgaaacatcttaaaaaacccacaaaacaaaaaccaaggcaacatgaatgctgggactaggaagcaggaagctgtcaagagaagcaatgttagggaccaaggctcccacccttgcacctaggaccacacagtctctcctcccttccaggctatggcctctgctcctcctcacctcttctaagtacagggtggaagatggttcttcacagctcctgagtttacaagttttcttagtctaagccccagataacaattacaaaccctaagtccaaattcctgggagaaggggtctggtcagttctttttgggttggctgtctaccttggatcaaattagctaagggataggtgtgggtgtcacatagcgcaaatctctaatgcctgacaaccttaactaaagaagtttaggtctagaggtaacagtagtactttacgtttttaagagctactcctattattattattattattgttgctcttagtctgatctcccagggtcagaacatctagacccaaattaatcttaatggtttactaaatactttaaaagcataccctgaaactcagtaattcaaacctttgaattttctgaattccttctctgacttgttcatgaacttgtcccaacaaaaatttatttagatttttttttaaatggtggaattattcaggatcggaatcatggaacagctgcagcaagaaggattggaatggcttgtgaaaacggcagtgtgtgtgtgtgtgtgtgtgtgtgtgtgtgtgttgagttggggaaggcagaaaagaaaaagaaaagttagtatatacttagaggtaaaagagtagaattaaacattcccatagatgtatagggattctactctccacatgagtcctcaccttaggcactagaattagggtctaggaactaatctaataaatccctggcccttccttagagactgattatgtgttgcgataggaaaagctgatgccatagaaacatctggactcatctatgtgggttgttggatcatcaattcttggagctatcaggtctaatacttgccatacctttaaaatgctctctggaatatcaaaacaattgaatcatttgctctgagtccagtttgattatttattggtgatttgacaattgtaaacagttagccactattgcacaggagtctcttaggccctctttgattaagtagagggaaacaaatgagggtcatgtgaaagtttcaagacagacacgtcatgtatacaacagaaatttttagttttcaaaatctgaaatggcaagattgcaaagggaagccatcacagaatctaagtgctcttgagagaggtttagataatccaactgaaaaaattcaaacccttgcatttgacatttcaaactttcaagagtccattgtagaataacagttcattcaacaggtatttgttgagcatctactgcattttttgagttgtcagtggagacctagactttttttaaaacccaagaactccaacttggcaaatctttggagatttctttatataaaccccttagctatagagccatgaagtaatatttctaatatggctatatgccacataacgtttcagtcaacatggattgcatatacggtggtggtcctgtaagagtataatgtatttttactgtaccttttctgtgtttagatgtgtctagatacacaaatacctaccattgtgttacagttgcctgcagtattcagtcccgtaacatgctgcacaggtttgtagcctgggagcaatagactacatcatgtagcctaggtgcgtataggctgtaccatctaggtttgtgtaagtgccctctaagatgtttgcgtgaggaaattgcttaatgatgcatttctcagaaggtaaccccatcattaagcgacatgaatgtatatccaaaattgtatatactattcttttaaactaatgtcaatttattttgataatatagccttaattttactgtattttgatagcaataaaaatggaatcaggtacatgcaatacttacttttctttggtgtttttaaggagcgacgaaaatttggccccttaggatggaatattccctacgaattcaattctgctgacttttcagccagtgttcagtttattcagaatcaccttgatgaatgcgatattaagaaagtgagtgaaattatgccttttttcctgtttttattgctcttcttaaatcagggttctacagtcatttgaagtctatgataaggtgtgaatttgctgagccc

SEQ ID NO: 36103 - DNA, 2300 bp, Homo sapien
aaaaatgttctccaagtcagagaaagccccctggcagagaaaacatggccttataagtactgggggcatttgcttaccataatagtgcttacacaattataaatgactccaataattatttaatgtttccctcctgtattagaatataatctctctgaagatagggacagcatcaccaattgtatccccaggacctagaatggtgtctggcacatggtaggttttcgatagatacttgctgaatcaatgtaatctggaggctgacaaattcatgataaagaccccagttctgtctgaatagcttctctatctcttcctttctcctctctccaccctaaacttgatatagcagtgcctaaaactcacttccagtatcttttttaaaatttgccttcttctagagtataaaagcccagtatttaaccttgcccatggttgcctggaatagagggtgcttttcccaccctcctttgcagctagcagtgcctatgtgactaagttctgagcaagaggtgtggaattgatggctgccactttcaagatgtgtctttatgggtggaggtgcacccatctccttcccattcctccttcctgctggttggaatttggatatcgtggctggagcagccaccttggatcatgaggtggaaatcttggaccaaaggatggtggaagctagaagacccaggcaccctgatgatcagggagcagccactccaaccttgggctgaacctctggccttgctttacatgagagagcccttggttatgccattgttgtttggggtgggattttctgtcactcccaggtgaacaacctaatcctaagtgatacctagaaggtccctgctagactgacctcttgggaggggagggaataaacgagtctcaggtggtggaaccagagcttgctggagaggagagtctctcctggtgaatggaagccaggggcccctcccactggctgtctccttccctgggctcaggcaggtccagccttcctcaggactttgagaagttcagttctctccccaggagtagctactttcacaaacttcctgtccctttagtcgacatgccccacggcaggtccgaggctgggctctgccacaactcatctttcctaagagtggcatcaaggttctttggtgggggatcctcttttcccatccccacttctcaagagcattagggaagatacagtcagtgccctcttagcattctctttccacttgttgggtgtaagaagggaacctgagggccctgcagtgtttaggggtgggagtggaaacagacaggaaagatccagagtccccaagaagcgaagcagggagagagataaagaaggcaggaacaaccatggacacacattatcacacatacacaggttacaagagcaggaggctggagctgcaagaggtggcagggaagcttccagaaaggcagaccccagcctcatccctccctgccctgcaatgctgaagtttccaggtagaggggaacctctagacccttgcgactgtcagagttctgtggatccatttgtcagtctccccacccccaaccttgactatcctgggcctgccttcaggacagaacatgggaatgagaagaggacctgggaaggggtaatcctgggaaaaaaaagttcttattagtcacccctggctctgaggatactttccaggagtggcctgccaagccgtgtgaccttggacaagtcccgtccattcctcaggcctcagtttcctttgagggaccctgaatgggcgggggttgctgtagctttcctcagctgggagacccgggaggaggtccggggtgccagggtgggaggagggcctggcttgtcgctgaaagccggccaggcgcactgtcggcgctcagagctggtggccgcctcctgcgcttcctgattcccagccgcgctcgctcggagagcagtgcccgctatctcctggcccgggaccggcagaggggtgcggcggggcgggcccaggggtctctggcggccggaagaaccgggaccctgccaggcccctcccgcgggcagggcggcccctcgccggctcctcccccaccgcccgccaccagcccgggatcagtctccgcacgcggttccgcaggtggcagcgatggcccagtcctgaactccccgccatggccggcgcccccggcccgctgcgccttgcgctgctgctgctcgggatggtgggcagggccggcccccgcccccaggtgagatccagggaccccgacgacaccgggggaggcgggtggctctgcgggctgcaggcgca

SEQ ID NO: 36104 - DNA, 2300 bp, Homo sapien
gagcgcagcagagttcagacaatccatttccttgtgtgcagtttgtgttaattgtctttggataattttattgttgactagaactttctaagtacaacacttgcttaagattttagaaaccatttcccttattctttttctctctgcagttaaaaaacaatgtctaacccatgcaatgaacttttgactgtatgtctcatttccaaaggaatgagatcattgaggtggacccagagaaactgaattcagagaaaaacttccattattgagaacccaaacgctgattgccagacaaaaggatgagaggaaatgctggacctccagtttcttgttaattgctctgtttttccataagggactctgccttaagctcattttcattgacttatcatttctgggtttgctctggtgtgaaaattctcatttaattttttttcttcagattctgcctctagtttagaaaagaaaaagtctaatttacaattcatgtcagacaattttgatggcacactgtggcctgtcagagatttctttagcattctatttttttaaattatttttaatttttgtttttttaattgaaacagctttattgaaataaggtttacatactacagaatttatctcttttaacatacagttcaaagatttttagtaaatttattgagtcatgcaaccatcactgcaactttagaacgtctctatcactccaagaagacccctcttgcacattagcagttactacccatttccaaccccagccccgcacaaatgtcagtctgctttctatctatacatttgtcttttccggatgtttcatgtaaatggaattatacagtatggtaaacacattttttgtctattaatttttatattcaactaggttcaacatgtagccgtagccaaatattttaaattttccttctggaagtttgaaaatatttatcttttttgatacttacttctccttctgctttctctttttcatactgaaacagtcttttaaatgattgcattcattgattaattccttatttttcccttctagcagaagaccttccttttcactctcaagacagcatccttggatattaattaccttttgttcattatcccctttcttatgagcaccatctagttgttgaagcaacagattttcatgttgtagttgagatattctctcctctacgtagtcccactttccaaaggatttacttggcttaggtccttttgtacactttataaaaccaaaaccttttctctgagagaatttcttgtgtcatggagtttactttttagggtattgaattcgagcttcggaaagttgctcagttaaaaactcattattatcttttagttcagaaatatcagaactcattttctttcttgtaaagaaacgtcttgtgctctctgtaaagcaagttctaggtctctttttgttttcacactttgatcacactcacttatagcagcagccagtctagcatggaatgactcaacttcagcttccagtctttccttgttttgattttccttctccagtttagacttgagcattgtattctcagttttgaggtcgttaagctgttgaccatactgggatactgtttttgttaatgtttttccattcagttttatagtctcttgaaggtcatcattcatttctttaacaatttcaatgtcctttttccctttcgaggttcctattttttattgtgtatacttacatacacaataaaggcaatatctctcttcaacaagcaattttcatgcatcagatctttttttttcttaaagtatttcttcaagccttcaattctatttctagtgatccgatagtcagtttaagctgttcttttacttcaacttctttcctatgttgctccactttcctttctaactcttccctaattttttcatataacatattagcatttcttctcatcttcttctaagctgcaaactgtagagttcctgtttccattctactttttgatattgaactgtgacttcgtttcttgtgttttggatagctccttcagtacactaaactcagttttcatatttcttattgtctagtgtaagttgttcacagataattttttttaaggtccagtgacttttcacatgaaagaaatgcattctggacttccattaggatacgagaatcattacaatccattccatattgcttaatgagcatcataaacttcttacaatgagggtaaggtttctcatgatcctctgaagctgtttcagagggccgagttaagtcatcaggttcatctctaaatgagttt

SEQ ID NO: 36105 - DNA, 2300 bp, Homo sapien
tgtaactgccggtagtggcagaagcttattccagttccatagtgaatgttcaagacacaaacaaaaaaaagtgatttagtatgataaccttttcacatttaattgttttggtaatctcttgttttgcagatgaatttaatttgcatccttttgtgttttcatttagttttaactcagtaaaatggtaaggtggcttgcagtgaggttgaaatgtctatgtggaaatacaagacaaaacatatcaagggatgagtgctttgtaacaatttgtgcccagtgctttgttcctcataagtgcaataagaactaaaaaattccttttaaaatgaaaatatactggaagaaaagtgtaccttgctcaccttaaaattatttcctgtaagttcatctattattgcacaacatttgatttgagggaatttttaaaaattactgaacctattactcaattttgatttgatattctcagtgatatacaggattccagctgacttgcagaaaggtgaaaagagcgcagcagagttcagacaatccatttccttgtgtgcagtttgtgttaattgtctttggataattttattgttgactagaactttctaagtacaacacttgcttaagattttagaaaccatttcccttattctttttctctctgcagttaaaaaacaatgtctaacccatgcaatgaacttttgactgtatgtctcatttccaaaggaatgagatcattgaggtggacccagagaaactgaattcagagaaaaacttccattattgagaacccaaacgctgattgccagacaaaaggatgagaggaaatgctggacctccagtttcttgttaattgctctgtttttccataagggactctgccttaagctcattttcattgacttatcatttctgggtttgctctggtgtgaaaattctcatttaattttttttcttcagattctgcctctagtttagaaaagaaaaagtctaatttacaattcatgtcagacaattttgatggcacactgtggcctgtcagagatttctttagcattctatttttttaaattatttttaatttttgtttttttaattgaaacagctttattgaaataaggtttacatactacagaatttatctcttttaacatacagttcaaagatttttagtaaatttattgagtcatgcaaccatcactgcaactttagaacgtctctatcactccaagaagacccctcttgcacattagcagttactacccatttccaaccccagccccgcacaaatgtcagtctgctttctatctatacatttgtcttttccggatgtttcatgtaaatggaattatacagtatggtaaacacattttttgtctattaatttttatattcaactaggttcaacatgtagccgtagccaaatattttaaattttccttctggaagtttgaaaatatttatcttttttgatacttacttctccttctgctttctctttttcatactgaaacagtcttttaaatgattgcattcattgattaattccttatttttcccttctagcagaagaccttccttttcactctcaagacagcatccttggatattaattaccttttgttcattatcccctttcttatgagcaccatctagttgttgaagcaacagattttcatgttgtagttgagatattctctcctctacgtagtcccactttccaaaggatttacttggcttaggtccttttgtacactttataaaaccaaaaccttttctctgagagaatttcttgtgtcatggagtttactttttagggtattgaattcgagcttcggaaagttgctcagttaaaaactcattattatcttttagttcagaaatatcagaactcattttctttcttgtaaagaaacgtcttgtgctctctgtaaagcaagttctaggtctctttttgttttcacactttgatcacactcacttatagcagcagccagtctagcatggaatgactcaacttcagcttccagtctttccttgttttgattttccttctccagtttagacttgagcattgtattctcagttttgaggtcgttaagctgttgaccatactgggatactgtttttgttaatgtttttccattcagttttatagtctcttgaaggtcatcattcatttctttaacaatttcaatgtcctttttccctttcgaggttcctattttttattgtgtatacttacatacacaataaaggcaatatctctcttcaacaagcaattttcatgcatcagatctttttttttc

SEQ ID NO: 36106 - DNA, 2300 bp, Homo sapien
cctgactttcccctcaaatcattttcactatctaactgcctattttttggatatccaataggcatcccaagttctttgtatgtccaaaacaaaacttccagtgtttattctgtaattctctcctcccagtgtgccctcatttcaatagagggccccagcatcatttgcctggttgctcagggcatgtgtgtatgtatatgggggggcaggaggagtggggtagtaatggaagaaacctgtcatcctttttttttttttttttttttaatagcgatgaggtcttgctatgttccccaggctggtcttgaactcctaggttcaagcgatccccctgccttggcctcccaaagtgctgggattataggcgtgagccacgatggctggccctgtcatccttgataccttttttcctcacattccacatccaatccgtctcacaccatgttggctcaggtcttcaaaatacattcagaatctgaccaattctcgtgacctccatcactaccactctagctcaaactactacagtttctcattctaccatatttattcctaactagtttcccttcttctattcttgcaatcttccagggtcccacctccatcagccagtgtaatcctttaaaaatatgtcatatcatatcatctcctgctcaaaatccactaactgcttcccaccacacttagtcttcaccatggcctacagggccttacatgcacgatcttgcccctggcatctttattttctgtcactctttcctccctccctccctccctctctccccctctctccctccttccctccttccctccctccctccctgcctccctctccctccttccaatccagtcataacagcctccctgatgttctgtgaacaagtcaagcgtgctatttgaggcctcgggacctttgcacttgttcctctgactgaaacactcctgttcagatatctacatacctcactcatttaagtctatgcccaaatgacaaaccttcagggaggtcttctctaatacctccaccattgcctactttgcttcacttttcttcacagcacttatcagtacctgatatgacatgaaatatgtagatacacatttgtttattgtctgtatttccatttggagtgtaagctctaagaaaacaggtttttgtttgttttttcctttcatcccagcatccccagtgcctgtgactttagacagagcaggccctaggtaaacgtctgttaaatgaatggatgactctgttctaatttgtctaatttctcgagtcaccctcagccagatccaacaaatatttgagtcttaattatgtaagtgacacttagctagatgcttacagctttaagaacgtataaaacagcccctaacctgaactgtgtccttttgggagggtactgattgggagagggcacaaggaaactcccagagtacagaaatgttctttctctccatctgggtggtagttacacaggtgcatacataagagcaaatctactgagtcatattcttaagatgtgtattttatgttgcaccccaataaaagtttttgttgttggtttttttaaggttctgacgtatctagacacaaaacgagataatttcccaacgtggcaagaccaatgatggagctgcacagcctgctttgtgagcagtgagaaagtcaccctccaggtactaagattggcataccctttccttgataagagaaaaagggtaagatgtagcctgttattcctctgacgctggaatgtcgtagagatcacgggcctctcctaacccctggaaccatcttctcactgtggcgctgttcattggggcccagcaacagagatcccgaatacaggacgctggatcagtggggcctcgagcccttaagtgagatgcagcaaggcagagcggcctttgggagagggcaatggggcagccctgtgctttagacttggcttgaggaggtgacactgtgtccacgtgcctgtgaagagagaacggctgagtatacacgcgacccgccagacttcacaaacggaggagacgcgggtcacaccagtgcgcatgctcagcaggggcttctgccacgcaggcgcacggcggccggcgcgggccgagcggaggcaactgctgtgcggcctgcgggcgcgcgctcccttatcggccaacggacgcgaggcgcgcgccatggaacagcggttagctgagtttcgggcggcgcggaaacgggcgggtctggcggcccaaccccctgctgccagtcagggcgcacaaaccccaggagagaaggcggaagcagcagc

SEQ ID NO: 36107 - DNA, 2300 bp, Homo sapien
agagctagggttcaggccacagcctgggggacagggtaggcaggaggtcagcaaggcttagagaagatggatatgttgggttgggtgagaggcctggtgctgggagtgggttgtctacagagaagcacccccagggccttgtccaggatgatccttggccaggggggtcctgaggggactggcactgcacacctcagggatgcagtatcaggaaatctggggctccccagcttcctgctctggtcttcttctctggacacgctcatgttgccataaggagagacagaaacatcagcaaaatcagatcaatgcttccaactgtatccctaacccctccattccagccagatttggagatagtacagatacccccctccccaagtaaagtgtctcttgacaccttggggttcaggccacagcctgggtacagggtgggtaggaggtgagaaatgactccccttcttctcgatggaaagaaaaggccttggccaggggacagtgctcagggactctggccactccagtacctgcccctacagaggccagagaagggcagggccagcccctggtacagagcactgaaaggaggttccccctccaacttctgactggtgctggttgaaagactgaacaaactaacccactgagcttttttcctcactgcaaagtgggtcgaatgacagggcctgcttatgatgcatggaagggattcagtacttcctggggtttacaagagctcagagaatggcagcaaggcgagttagaaacatcctgggcacctgtttttaacaaattcattcactccttcattgcacacatggttattgagtgtctgctatgtatgtaacaagcactgtggatacatcattacacaagacagattctccatctccccagcagacatttccgtgtgtgtgtgtgtgtgtgtgtgtgtgtgtgtgtgtctgtgtgtgtgtggcggggagagggcacaatacagagtaaacaataaataaagttatataatatagcagagggaatttagtactaggaaggacataaagccaacgagggagataaggtggcgggggtggaattttaaatcagctggagcatatgtatgaaagtgggccgggcgcggtggctcacgcctgtaatcccagcactttgggaggctgaggcgggcggatcacctgaggtcaggaattgagaccagcctggccaacacggtgaaaccccgtctctactaaaaatacaaaaattagctgggcgtgatggcgtgcgcctgtagtcccagcttcttgagaggctgaggcagaagaactgcttgaactcgggaggcgggggttgcagtgagccgagatagtgccactgcactccagcctggcgacagagtgagactccgtctgaaagaaaagaggaaaggagaggaaaggagaagagaaaagaaaagagaaaagaaaaaaagaaaagaggccaagtgtttcccgtagagatactgtgtattgggggggcgcacaggggtgccacgaattgagctgcccactccttccagatgcagggttctcacccgggtaggtgagaacggggtgagggggaggaatcacgcgtgggtggctggattagttcctgatgtcctctgattccctacagcttcttcagccccgttctaacccccttcctcaggcttacaagaaagtgtgtggaagagagacacggagagactgagcattagacttttttggaagaaacatcagtaaatgaaaatggaattacaataaaaataacaaaagcaataaactcctgacctcagtcacaatcattttagttaacacgccagtcctaataacaaacacgagtccctgagaccgcaacccctcgggcaccgcagggcgtgcaggtctgggcgggcggcgcagcctcccctggcggctgaccctgggagcgcggggagcgccaagcctcttctagcgctcacctcgcgctcactcctgcgctcgccgggctgcttgtgcggggaaggggcggggcccgcctgggctcctccccggtcggagcccggagcaagggggcagagcgcgccgggcgctggttaaagaggcgtgcggaggcgggcgcggcgcatactgctagtggcgcgcggaggagcgacgcgtggagaagcggcccacgtgtctgcccagagtcaagtcctgtgttcttcccgctccttacgcatccgcggtccagggcgccctttcagccccgctggtgttcgcccaccccgggccgcgtgagtggggccccacgcagctccccgcactccgtgggccaacttggcc

SEQ ID NO: 36108 - DNA, 2300 bp, Homo sapien
gctgttccttgttatgaggaagagggagagagcatcctggctggtgagggtccctatggaaactggaggtggctatgccctgagacccctggcattgatgccattcccttccctggcaggcacagaccccagcaagcattatatctcagtgtatcggagcctggcagccatctggatcctcctgggcctggcgtggctggcgctgatcctcccactgggccccctgcttctgcacagatgctgccagctctggctgctcagtaggggcctcggcgtcaaggatggggcagcctctgaccccagtgggctccccaggcctcagaagatccccatctctgcatgaggcccccggggggggcccagaaacccctttcatcctccccagtcccaccctatctgctctctggatttccagccctgctttctcctctcccaaccccctcacttctcagccagggctggtctcaggagctctcccaagagagaaaggagacaggtatatccaagaaagtaacagagaggagacgtgagataggattaaagacatgtgtggatggggaggtgtacccttgtcccagagcccctgccacagccttccacccaaaggtagtggccagatctccactgccctccccatgcccccttccaggagaccttacacaaacaaaggatgactttacttttgcctcatttgatatgtgcacagtgcatttgccaagcccctactatgtgccaggtgctgtgccagggtctgtgccagggtctggggatacagcagtggaagtgcctgcccttgatgtgcctttagttgctaggcaagcaaagaggcagccccaacacagtgcccaaaatgctatgatgggaatagccccagggttgatgagagcccatgggaatggctggcagggagcatcaaagagaggggagacctgggcagagactttggaacaatcttagtgaaaagaggatctctgccctcaggaagctctcagccgaggggcaggcgagctgcctctcaaagctcgccagctccccttgcctagaagtccagggctgtctgtgaacaaagcttaggacctcttgggtgtcctacccactttcctgaacatggcctcccctgaccctcacaggccacccccttaacttcatcactccctctgggctcctgccttctcaagagcctttccaaacaccccatgggaagccagagagccagcagatcccaggatccttccagaaagtgagctccatgaacgtctggcctctctcaggaatgcattctccaggtctggcctttcccctgccagactgcaacatccctgaccaggagagatttagaccactccatcccggggcctggaaattttggcctttgcctctcccatcatccaacagcaagtgggctcctatgtggctgggttcctctgcacaggtctgaggcaaggctgtggagccaaggcggctccaggcaggagacccaggagaggctctacagcagcaagaggagtccaagtcacaccccaggacttccccatatccaagaaaggactgggaagctgaggacccacggactcttcacacagcctagacgcttcctccactccaggtagagggatttcgggggccttctcagaagcaaggagtggacaagcctcttggttaaggctcctcttacctcccaagctcatggacaagtggcaatcagctggggtccctcttttggggtacaaaggaaaggacagaggtgtgggagacccaaggtggtcttgagattgacagacagcaagtccttggagatagcccccgagtccaagaacttaggcaggggccccaagacaataaagttggtctctactatctcctacctctgagtgcggtttccagaagtccctcccattgttcatttcaggaaatgtgagggggctctgggccccttccctcagcgcctgcggtcacccagcagcttcctccttctccctggcctaggcctagcaggtgggcaccccgcacacatttgaggcggggccagatgcccacagttcagagcctctttttgtcccggggattggatcccagggctgggtggggccaggctgtcccattccccaacactcctcctccccggcgaaaccgggcaccagcaggcgtttgcgagaggagatacgagctggacgcctggcccttccctcccaccgggtcctagtccaccgctcccggcgccggctccccgcctctcccgctatgtaccgaccgcgagcccgggcggctcccgagggcagggtccggggctgcgcggtgcc

SEQ ID NO: 36109 - DNA, 2300 bp, Homo sapien
taaaaagaaatctagagaggagtgtgcaggaattggtccagtgtctttgcagtgcccatgacctttccctcagggacacaagatggctcagcaggtccagacagaaagaggcagaaatgcggggccagctgcagctgaacccttggtcaacagacaacaattttgcccaaacctcctcagccaactctgcccaatcatggctggacctgggcacgtggccagccccagctgcaagggagcttgggaaagtgggtgcaggggacgcttcgaccctggggtctcctccccaggctttaatgtgtttttctcccagtggcctagcctgcacctggagctctccttcaggggtctctccacaagctcctggagccatctttcctgcacgtgcgcaaagccagaaatgcatgagtgacggactaatgtggggatatgaaggcccaggtcccctgctgggactcactggggtgcacttcacctgccagagctcccaggaaccaggctgaggctgggactgtggtgccttgtttggctttctcctcagcctggccctcttgcccactgtcttatgggtcttcagtgacttcactgctctcaggggctgagacagaggggagcaagattagcactatgacttagaccaattatgctcaattacctggggttaacacttacaaagccggggttctgctagctggggaggagggaaaggatactcagcaggcaactcacagtgtctgcagccacagctcattaaaggaaacagcagaaaacacagcagagatattggaatcctcgccctgggctagtgagaatataaaatggttcagccactttggaaaatagcctggcagttcctcaaaaagttcaatacagagtggccagatagtccagaaattctactcctaggtatgtacctgtgagtaatgcaaacacatgtccacaaaaaaaactcatacacagaggttcatagctgctttgttcttaatagaaggaaacagggacaacccaaatgtccatcaactagaaatcaaatggataaacaaatgtgttatagccacacaatgaaatattactcagccagaaagaaggaagaagtactgttacatgttgcaacagggctggatcttgaagaccctgtgaatatactaaaacccactgaattgcacactttaaatgtgtggacgatacagcatgtgaattatatctgtataaagctgttatacatgtacataaacaagcatgtgtacacacacacacacaggcaaagagaaaggaaagcactctcaattccatccactcagagacagcccctcttaccatcccaggatcaggatatacttatagtttctttttaattcacacatatatttcaccgacatatcctctgaaggtaacccactagagggcttcatgcaagacaaattagcaagagttataaaaccaatgaatccaacttatcagcagaatcaaccctgatactcttaccatcaggctgagtgagacaatcacctgtctatttactttgccctgatttgtcacgcagtttactcatcctgaggttcccccaataggcagttcaattatcctgccccattttgtagccaaggcaactgagtagaaggtttattcatacccattctgacctcttcccagctcctaagctggggtcttacagccttcaagggtgaagacgctgggggcggccgagagagcccactggggcctggacagagtgagcacacctatccgatttagcccagaaacatctatccaacttggagacagagagagagacatgaagcactcaggagaacctggtaggtctctttgaagggtccctgacactgacttgctgctgtccatggaaacaaaggccgggtgggggtggccggcctgtttgcactcacagcatagcacttagtgcagccaagctgagccgcactgttcaaacagtctccccagcctccagacacctgtgccgaggaggagggcagggcaggcggcagcctgggcacaggcccctaggtgcttactcctcacctgtttcccacctctcccccatagccagccccacggccctggcagggtcctggccacagcatgcccagtgctgggctctgcagctgctggggtggccgggtgctgcccctgctgctggcctatgtctgctacctgctgctcggtgccactatcttccagctgctagagaggcaggcggaggctcagtccagggaccagtttcagttggagaagctgcgcttcctggagaactacacctgcctggaccagtgggccatgga

SEQ ID NO: 36110 - DNA, 2300 bp, Homo sapien
ttccagtgtaactttcccataatgtgtactttattccattgtaagtctttgaaagttggcgatgcatgtagaatatgttatgctgctggccccgaatttcttagtaggaccttcaagaccgtacacaacgatcccaaactgcctgcgcttgtctcctctgtgccctccacgtcctttctgctcccacggcccaggccccagtgcacctcagggaaggtgtgtttcatgttgtttcgtgttttcatattgtcacttacttttgtgttgttcgttgttgggaatatagttagtcccaatggttgctcagtgcattgtaagttctcccaggagtggctgccgccacagtgccgtgggctctggagtggtcctttccacccagctgtccattcacagtcagctctgcagaaaaagcagagcctgggagggaagaggctgtgaacccttcttccctgcagcttaagcaagctttcactcccaccccacacccctttcacccaccacccccacacctctgttggtggaaggctgctcatcagctcccctgcgggggggagcaatttggagatcccccaagcaggctccagtgtggtctctgtggagcttttctcttcccatctccagtccaaagtctcatgccctctactgtctgttattattttattatgtagcaaaaggcatgcactgttagaactgggtgcagacccggacaggggaaaggtatggaatgaatccgctggctcctaatgggctctgctggtgaaacgtgcccctcaatgtctctcatgcatcagggatcatctttctgcgtctcacacaagcggattcccaggcctacccaattctagagtgtgcaaggcagatgtggagacaaagctgagtcgtgcccatttgcttctgatcagaaaagggtggggtgtatttttgtgcctcaccatttagacattcttcacggtgctatttttatcaagagtaatcattaaattggtgtcagatgggctagtccagttactcacccttaggatgggtgatgggactcagagagttttttccaggcaagaggagacgtggtatgtggcccatatgaaagcctctgcggaacccttggcctcagagtgagcctcactaaccctggactgtgttcccgcagcaataacagcaaggctcagcaccacccagcttcattctcaacctgattcatttaacagatgtatgctgagcaccttctaaatgccagactttgaacaagacacaaggattcacaaaacaaacaaacaaaaaactattatctctaccccctgagaaacttacatttcaccagaaaggattgccatgtgaagtggcagtgtccactgggctgtgcatattataggtgtattgataaggaacatggtgaaaagagggtttgttctgcctgggctttgacgaaagctccacggaggtagagttactggaggaaaacatgagaaaaggcctcccaggcaaaggaaccaagggcagaagcattaaaaaaaaaaaaatggctctatagatgcatccaaaatccagcggtgaattcagctctcactgaggggtcccaggcatacatctgcgctgaccctcactccgggaggtggtgaggaggagagcctggtcctggctgtactgaccgtgggtcccagaagttgaactctgaacagcgcccagcagtgagggttggcctttattggcaaaggcgatacaggatattgaagttagagatgacctagggacccctgccatggccagctcatgagtcttgtaactgaggacctaactcctgaagaagagccgagaccccctcactaaccacaggaaacaagaatgaattgttatacagagactaagagcagaattttctagatgctatctttcagtttggattataattcctttaactaaatgcctggaaatttaacagaaaaacaaaatagggcataccagggagaaatgtggcactgaacgatggtaagaaaaggcatttgcagacatcctcggcagtccagggcttggcgctgtggttttcatttcccccgagcaggcattccaaaccccgccccccacgagtcacatggctgtgcaggcacagtcctgaggggtgcagcgggtggcactggaagggcctcctcagcaggttgtcagccagctggaagagcctggggccacctgtctggtcagagtctctctgctgtgggcctcttggagccagggctggttttgtggtctgactgaagtgacaatgaaattaataggatcctgatgctgtgactgaggccatttccctg

SEQ ID NO: 36111 - DNA, 2300 bp, Homo sapien
gctattgcaagagataccaggcaagaaattatggtagcgtggaccaaggtggtaacagtggaaatgttgagaaataattgaattctggatatattgtgaaggtctcacctgacagagtttgctgatggattagacataaagtatagtagaaacagaggagtcaagcagatcctaatggttttggactgaacatttagagggatagagctgttgctttctgagatgaggaagagcacaggaagtgcaccattctttagggtgggaagaagtcagcatatgctgagtttgaaatggagtttagaaaaagcctactcaagttcctaacaaatgaaaagacctcctaagaatcaggaaacctaagttatgtctcaaggcatattattgatgagctctaagactctgagtaattactttatctctgtggatctcgacttcttcctctgttaatcattagactgaacctgttaaaatcccttctaattgtgatcctattgtgctcttcagtggttttcagaagacagctgatcaaaatgccttttcagattactatgcaactatattgtataaaatgcaatattttgggatgatgacatttgatgcttaatatatagttaatggtttattgtaaactttggtgctaaaatcgttcttctaaaatgtgtggggaaaagtcaataaaaagggagatctggattgcttgtgtttctaccacctgctattttaaatagtggaggatgtcattttcccccaaggaattcaatatcctttatagatatttttaatttaaatcttgttagaagtgactggtacatggtaggccctcagtatgtgtttgtggaatgaatagatcaattagaaatgaaaatgctatcattaattttacacaaggtacctttcagaagatattctgtgtgtgattcactgccttctttaaaacttctgctatctcttttatttacatggtagtagatataattactctttttttaaagaagtggggtagaaaatggctaattgattcacccagtcatcacccatctgataaaagaagtgaaccagcgttatcatcattctcctcaaaagctgagaatatgtgctcagacctcatactacacagtgctctgaaaagcagttcagcagctatgtgttatgttgacctctgtgttatgttggtgttcatatctgaagctgtgatacatctatagagttttgagaagcaatctgggcacactaaacagtaaatattactgtctaaaatacaatcttccctgctaaatgacatactagccagagtgccttagattatctctttgtatagttcattgtttgcttctctaaaatggaggtaggtcagctgtctctactaaactctgtcgctactgaaaatatgaaaattagccaggagtgatggtgcacctgtaatcccagctactcgggaggctgaggcaggagaatcgcttgaacccaggaggcagaggttgcagtgaggcgagatagcgccactgcactccagcctgggtgacagagtgagactctgtctcaaaaaaaaaaaaaaaatagattctgtgtcttctaccccgagtgttccactgtgcttgcaatccagtactaagctaagtcagagaagcattgcaagaagagtgaaattgacaccacacctccactctcttcccctaagccattgccaatctgattaaaccttctctctgtgggacaggtctatcataatttactttttgacttttgactcatggtcaacaaaatgaaacaaaaccatcctgagaattaaatggttgatgctaggatatagcaccaaattagtggaaaaataaactttagttcaaaatactaaaactaagttcaataatcatacaattcacagttgcattcttttctcacaggtcagatattagaagttccttggctgtttacatcctgttcttggatttccatttcatgcagctatctggttttgaatttcttgccaattgtagacactgtccctcttgagagctaaaaagcacacaatttgttatttggttcaaagctgctgcagtttttcagagggatttattgtgcagatcttgtcaaagcaatactgtttacccaccatttgtatacaggagtacaacagcacagtgtggttgagactacagggcaaacattgtgctaagttaggtaagcccagtgatgtaaatatggggtaattaatagagctttcagaaaaacaagatttattaatctgatagtgtttggaggtgcagcttttaaataattactatttttcacattgcagattt

SEQ ID NO: 36112 - DNA, 2300 bp, Homo sapien
tattaggttttaacagtttgtatatattctggatgcaagtcctttatcaagatacgtgttttgcaaaagttttctcccaatctgtagttagtctttttgttttcttaagtgtctttcagctgggtgcagtggttcatggctgtaatccctgcactttgggaggctgaggtgggtggattgcttgacctcaggagttcaagaccagcctgggcaagatgatgaaatcctgtctctgcaaaaaatacaaaaattagctgagtgtgatggcacatgtctataagcccagctacttgtggggctgaggcaggagaatcgcttgagcccaggaggttgaggctgcagtgagccgtgttcatgccactgcactccagcctggggtacagagcaagaccttgtctcaaaaaagaaagaaagaaaaaagggtgtctttaataaactttttgttttgtaaaaaataatacagagagaactcgtatacccatctcccagttttccccagtggtaatgttttgcataactatagtacaatataaaaatcagggaattgacattgatacaatccatcaatcttattcaattttatgtgacttttgccagttttacatgtgcttatttgaacatgtgtgtaatttgttctatgcaatgctatcacatgtgtagatttctgtgatcaccatcacagtcaagatacagaacagcccatcacaaggatttcttttataaccataccctgcacacctccctggcaatagtaatagaaccatacggtagttagctttcgagtctggcttctttcatgaaacataattccccgaaaattcaaccaatttgttacgtgtatcaacacttccttccttcttaattgctgaatggtattccagttattttaaactatcagctgaagaacatctgggttttttttccagtttggggctattacaaataaaggtgctaaaactataaacacacatgcgcaggtttttgtgtgaacacacgttttcattcatctgagataaatgcccaagagtgcaattgctgtgtcttagagtagttgcacctttagttttgtaagaaactgtcaaactattttccagagtggctgtacctttatacagtgtatgttttacattatacattcctaccagtaaagtgcaactgattcagtttctccacatctttgctagcatctggtgttgccactttttttttttttttttttttttaagccattctgatagatgaatagtgatgcctcattgtggttttaacttatatttcccacgtggataataatgttgactatcttttcatgtgctaacagtgtttgaagagctcatcctttcttgccgtgaccattgtgtgggaaacagtccccttcatccagttttatccttttccaaaacagagctagccccacttctaattccatcatggcatagtttgtattccttggttttgatttcctgttgaaaatctgtctccttgtcacttgagagaccttgtgaaggaaaaaaaaaatctgtctccttcttcagactgtgatctccaagtgggctggagcagttctgcaatcttggctcactacagcttcgacctcccgggctcaagcgatcctcctgcctcaacctcccgagtagctgggatacaggcgcgccaccacgcttggctaacttttgtattttttgtagagacggagtctcactatgctgcccaggctggtctcaaattcctgggctctaagcgatcctaccacctcggcttcccaaaaactgctgggattacaagcatgagccaccacgcccggcccagtgctgtatttttttttaaaggcaagggcatggagaataaaatgggtgaatgagcggggcggggcaaggcatggtggttgttcccctttaaccacacggtccaggccgggtccggcgctaaacccagagcccagacactcgctcatgcgcatgcgcagcgctctcctctccacccccgccctcccctccctagccccgccccgtagtggcctccttccggtcgcgaccaattagagggaggaggcgggatcctggctgccaaggtgctcactgggtagtgtccctagctactgttgctaagactgtgggtcgccggaggtggtgggagttagttttggcagcccgggcctgagagaggtcaagggtcattgcagagccagggaggagatggtgaagcagactatccagatattcgcgagggtgaagccccctgtccggaagcaccaacaaggggtacgggctggagcctccggggcgccggcgcggcggggc

SEQ ID NO: 36113 - DNA, 2300 bp, Homo sapien
atttatttatttatttatttatttttttgagacggagtctcgctctgtcgcccaggctggagtgcagtggcgcaatctcggctcactgcaagctccgcctcctaggttcacgccattctcctgcctcagcctccgaagtagctgggactacaggcgcccaccaccacgcctggctaattttttgtattttttagtggagacggggtttaaccgtgttagccaggatggtctcgatctcctgacctcgtggtccgcccgcctcggtctcccaaagtgctgggaatacaggcgtgagccaccgcgcctggccaaatctgatcttctcttaaagagagtttgtggaaggcatcctctgtcttctgtattacaatctcactggtcagaacttggtctcatagcaattgtgagctaccagggagtctgggatggtgaatattgtagatttctaacttctttagttgagaaaggcaagggagaatgggtttgtcaatggcttctggaaacctatttgcagggtctgctgaagaacagagctcaccttgccagtggagccttgatatgagagagggaatggaaggaggtaaaagtggggtattatgccagggagagcaatcccacagtgaccaaacagcagctccctgctgcagggccctcggtggcttgggtcaaaacagcgtggcctctaccgagaggcccagccctaagacagctccttctggcaatcagctctaaccagctgctgccaaagaggtaaacacattccaagtccttgagtccctgctgcactgtaactgtggttaaaacacaaccccgcctctaccagtttgggctaatggaaagttcactatagttgtgttttaatgatgatttgcaattatccgtgccccctcccattcatggtgagatgaatacctaaacacttatgttgtctaaccatataagtattttgcatctcacgtgtatcattttaagttcatttcattctccaatccttgggaaccatgaaggataacacattacattctcttttttttttttttttcctctggaagatcatgcattacattctctttttttctctggaagggtggcccttaaaccaagccatttccctaagcccctttggtgaggtggagaaacagacaaccactaacacagaacaaccactgaacacccagaaaactgtatacaggtcatcacccagtgggggcaccatttgcttgcagagggagctggggaaaataggaaacagagaagatcaaatactccccgtgagggtgttgccaatcccagagaggacaattgctcttgaccaaagcaatctctagttcagtcaaggagacagaccacaatcacatttaaaaaaaaaagaaaaaaaaaaactaaaaggaaattttaaaagtatgaataagagctattgtaaactgctcaaactatgcatacaagcaatgaagtaagatgaattgactggcactgaattggaaaagctatacagaggcagggagtgtggaacataatttaataaaaataaacttaaaaaaatatatatacactcccaaaaaagaaatggaaaagttgttagggcgtggaccaggactcctaattagctgttctgttgtgcctgatttcgctcctgtcttgcccagcaccccttgggacacactgtccagtgcagggacactttggggagggacaggggattccttggcaccgggaccttcacctccgagccggcctcagaccaggccatttgcccgtagcccagaggaggagccggggagaaacccgctgcccaggtggccacttttgcctctttgacccttccatgtttccaaaacagaaggggccctgagaacgctccctgccaaagtggggaacagctaccctcattgtacgcctcgccctgccggtggcgctctccccccgcctgcgttcggtctgaaagtgtgaaaattacaaatcccaagaaactgcaatcagaagtctacctagggaaaattcagagtaaccttgccataaatatcccgctccaagacgcctgacgtcagagcggggcgggcggacgggcgcgaggccgggcctggaggggcggcagccgcggcttcccggggatagcgcggagcacgcagcagcgagcggagcgcgggcggcggcgccgtacctcgggctgcgggagcgcgggcgccctggggtcctcggagtaagtgcggccggccctggcgctccccgtcttggggcccgggccgcggggagccctctccgctgggctcccacacttctctccctctgctttctttagc

SEQ ID NO: 36114 - DNA, 2300 bp, Homo sapien
ctcggtggcttgggtcaaaacagcgtggcctctaccgagaggcccagccctaagacagctccttctggcaatcagctctaaccagctgctgccaaagaggtaaacacattccaagtccttgagtccctgctgcactgtaactgtggttaaaacacaaccccgcctctaccagtttgggctaatggaaagttcactatagttgtgttttaatgatgatttgcaattatccgtgccccctcccattcatggtgagatgaatacctaaacacttatgttgtctaaccatataagtattttgcatctcacgtgtatcattttaagttcatttcattctccaatccttgggaaccatgaaggataacacattacattctcttttttttttttttttcctctggaagatcatgcattacattctctttttttctctggaagggtggcccttaaaccaagccatttccctaagcccctttggtgaggtggagaaacagacaaccactaacacagaacaaccactgaacacccagaaaactgtatacaggtcatcacccagtgggggcaccatttgcttgcagagggagctggggaaaataggaaacagagaagatcaaatactccccgtgagggtgttgccaatcccagagaggacaattgctcttgaccaaagcaatctctagttcagtcaaggagacagaccacaatcacatttaaaaaaaaaagaaaaaaaaaaactaaaaggaaattttaaaagtatgaataagagctattgtaaactgctcaaactatgcatacaagcaatgaagtaagatgaattgactggcactgaattggaaaagctatacagaggcagggagtgtggaacataatttaataaaaataaacttaaaaaaatatatatacactcccaaaaaagaaatggaaaagttgttagggcgtggaccaggactcctaattagctgttctgttgtgcctgatttcgctcctgtcttgcccagcaccccttgggacacactgtccagtgcagggacactttggggagggacaggggattccttggcaccgggaccttcacctccgagccggcctcagaccaggccatttgcccgtagcccagaggaggagccggggagaaacccgctgcccaggtggccacttttgcctctttgacccttccatgtttccaaaacagaaggggccctgagaacgctccctgccaaagtggggaacagctaccctcattgtacgcctcgccctgccggtggcgctctccccccgcctgcgttcggtctgaaagtgtgaaaattacaaatcccaagaaactgcaatcagaagtctacctagggaaaattcagagtaaccttgccataaatatcccgctccaagacgcctgacgtcagagcggggcgggcggacgggcgcgaggccgggcctggaggggcggcagccgcggcttcccggggatagcgcggagcacgcagcagcgagcggagcgcgggcggcggcgccgtacctcgggctgcgggagcgcgggcgccctggggtcctcggagtaagtgcggccggccctggcgctccccgtcttggggcccgggccgcggggagccctctccgctgggctcccacacttctctccctctgctttctttagcatgccccgcggggcttggggaggcagcagctccgcaggctggcggttttgtttctccaaagtgtttgcaggagccgccgaccccggagtgggctcccagggcctgtgtgtgtgtgagttgtgtgtgtgtatgagtgtgattgcgtgtgtctgtactggcacatctggacataggaaatgtctttggaaaactttttaaaaatgttttttgcggctttgaaacctgacccctggttgtcacaagtggacaaacacagaagataccccgcaaaactgacaactttttggtggtggcttttccgggttcggcttgaaccttcacttggctgggctgaagtcttcacaagcccccagctcccacttgcaggcctggcctctggccagtgggcagggcagccgtaaggttcttgttctcagtggcagtgggaccctgggcgggggaaggagcatctcaggaaaggggtccccggactctggggctctcagcacctgcggtcgcaaaccaacctcatgccctgactttaccaggcgtcgggactctgacttaaccggggaatgagggacttggtctggcggcaggtaattttgtgaagaggatgagaaggaagagggggaggtggtggtgatggccaggacgctgtggccctgtgtc

SEQ ID NO: 36115 - DNA, 2300 bp, Homo sapien
caaggtgttttcaatctcctatggcatcaataaccctatgttggacttctgttcttgatctttggtagcatctctgagtattcccagctctcattctactctacgacgcctcctctaaaccatgtttatgagcagaaggtttagggtggactagaacccccgctgggctacagttctgcagacattccgcagattcaaacctttgtacttcccttatcataaccacatccacgctttttttttttttttgagacggggtctcgctctgttgccccacatccacactttattatatttatttgtctctcttcccaaccaaactgaactcatgcttattttacatttttacagctcttagcatggtacttaggggcccaacaaatatttgtttgaaagaacgaatgaagtggtgaaattgtacacacaacatttaggaggaggaaaggagtcaccctggatctacattttcaaccacatttgcctttcaggggccagctcagctcccatcctaccccctagttactgccccatcccagtctgccctccctgaggagatggactgtgcctgtgggtcctgaggcaggagcaggggcctttctggtagaaaggcaggaaggtcaccttgtactgcagaaggcacagccccgggggccaggtggggccatgtgcacaggccctgctgtgtttctagggcagagttggcctgacagaacctcaaggtccttccctcaagagtgacagaatgctttttgtgctgggaccctgggagagaggatcaggaatagtagccagtgggggcttctcccagtcctgggctgtggaacggtgctgaggcctcagcgatgggttgctctggtgggagagctgggagtggagcacagaagaaagctggaggctcctttccctgcgcctttcagtaacagcaaccccgtctgtgtgagccggaggaggggcttggcttctggaagcagagggggcgaggcctcgggttctcctgtgtagggtgatttccctttggccaggagccccagacttacggcgctaatgggtagcagagacatgggcgctaaaattccttctctttcacttcatagctgttgcccagagagctctccatgctccccaggttcatagtcagcccaggtccttgctctgtgtgtccagcccctcatcctctcactcacgtgccggcacccctccgtggcaccaccagcatccaccccttcctctctattcttggcggttcagggtctcattcccttctacccagacacacagacttgcctcccaactcttccactcttccacttctccctcttgtcttcccaccccatacagtgccaccagaaatgtctcttctaatctcagacctcacaaactctctcctctaccataagtcaaggaactaatcaacagcaagccacacactctccaatggcttcttccttcttcccctggcactcaaggccctcctttttctggctgtagttttggttcccactgcacctttttgagccctgagaggtgcagtggaaccaccctagtagagcttctcattcatctgggctgtcgttgtgccaggttctcactctggcatgccacttgttgagaatgctttcctggacacccctgagcccctggcatgtgctgacgccctctcttcttctgaggcccagcttcattgacacttcttctggtgaatgttccagatccttccagccagaagtcactcttccccacctacagtcccagggcctggagccgcacctccttgcctcccttacatcctaggatctgatgtcaggctcatctaagatacccagaacattgctttatacatggcatttactcggtgggtgggtggatgaatggataaatgaatgaatgaatatttgaccatgaccttggagaactatcatctgcttgtttagtgccctagtgagtcaaagaaacctttattctctttatcatttctcaaaatgagaaaaacagttggaaaatcctcaactcccaccctcacccccaagtttgagaaatgccactctgagggattttcagtttcacttttctggaaagacgttcctttctctccttcctcttctcgggtctcagcgatgccccctgtgtctcccacccctaggcctgcacagaggggactcagaggccgagataatttacttttgctttctttgccttttccagagcatagggggaaaccgtaatttaggcggctgctaagaatagctcccccaatcctggaaagagcgtgtgcttatttttgaaagtgctccttgtctctc

SEQ ID NO: 36116 - DNA, 2300 bp, Homo sapien
agccgtgacctcctgggctgaagcaatactcccacctcaggtcctgagtagctgggaatataggcatgtagcacatactgggttaattttttttatttttttattttgtaagactggacctcactacgtagccctggctggtctttacctcccgagctcaagcagtcctctcacttcagcctccaaaagtgctgagattataggtgggagccaccacgtctagcctaaagtacactattcttcaatgtacagctcagtgatttttcttttcttttaaacaaacttgaggtatagtctacataaaataaaatgcacccattttaaatgtgcagttcagtgatttttgtcaaatctccatccattgaatcatcattcagattaagatagagaacatttccatcccccaggaaagttatttttcatcacttcagtaagccattcaagtgaatataggctctcaactgaattctaggaccttagccagatttgcctgtccttgaactcatgctgtatgctctcttttatgtctgacttctccccagcataatgtctaaggttcatccatgtcatggtagtttatttattgctgagtaggattctactgtatgaatataccacagtctacttattcactttcctattgatggacagttgggttgttcacagttcggggaatttataaataaagttgctataaatagagttggcccctgagtaacacagggttgaactgtgcaggaccacttgtatgtggattttcttctgcctctgccatccctgagacagcaagaccaaccattcctcttcctcctcctcagcgtgaagacaatgaggatgaagacctttatgatgatccacctccactcaatgaacagtgtcttttaatgattttttttctttttttttgatggagtctcactctgttgcccaggctggagtgcaatggcaccatctcacctcactgcaacctccgcctcctgggttcaagtgattctcctgcctcagcctcccaagtagctgggactacaggcatgcaccatcacacctggctaatttttgtatttttagtaaagatggggtctcaccatactggccaggctgggcttgaactcctgacctcaagtaatttgtccacctcagcctcccaaagtgctgggattacaggcatgagccactgtgcccggacttccttctaataattttcttaataacgttttcttttctttagcttactgtgttataaaaatacagcatataatacatgtaacataaaaatatgtgttaattggttgtttatcttatcagtaaggcttctggtcaacagtaggcaattagcggctaagttgttgggaagtcaaaagttatatgtggatttttgactgcatggagggtcaatgcctccagcccccacattattaagggtcaactttattcttgtgtatttattttagtcagtatttgtactcatttccctggagttatacctaagagtgggattactaggcaatagggcgggtatatgtttagctgtagagtgtacttccaagtagttttccaaaataattgtgccaaatgagaattccaattgcttcacatcctcgtcagcacatggcattgtcagtctttttaattttagctactctagtgggtgtgtggtgcccccttattgtggttgactgtatttctctgataactaatcatattgaacaccttttcatattcttattgtctatttggaaatcctctttcatgaagcaccccttcaagtcttctgctcatttttaagttgatttcatcattttctcattgatttgtagagttctttgttctgaatatgatctttgttatatgtatgtatagcaaatatcttcttctaaggtttgtcttcttttcactcagtaaccatgcccttgatgaacagaagttcttaactgtaatgaagtccaattgatgatgtttctttgtgtgttttctaggtttcccaaaggatccaaaaaactgagagggaagagatttggggaagatgtcacttttcctcatctgactttgccttggagtcagatgggagaatgactcctggagaacacttagccttttccagctttccccaagaaaggctggcccagggaggcttctataaaccttctccctaactcttccagcctgatttctccttgacccaagaatcgcagcctcctgggggctgttgggaaggggcgtggctgcccgctgggttcagttccccttccttcccacgagggtcctcacctgctccagcatgtccttagcaaggtcctcct

SEQ ID NO: 36117 - DNA, 2300 bp, Homo sapien
gccagctaggggcaggaagcacgcaatgtggcagtgggaccgatgtacccagaaggttcttccttatgtctctctgcctgtttcctgggccagtggaggacccaggtcttttgttcccaccattcccgttctgatggcttctcggctgatactatctctggccctagccttccagaaaacaccagtagaggagtggggaagtgagccagactggcccagtatggggatgtctctaagtcttgtcccccacacctaggaagaagggacccgttccgtcttcactgaggagagaggcagtgggtaagggaagaatggactttagagacagattaaggatgacaaagaacgttttgttgccactacggtgggggaagatgatttccaaatttacaattttatagtcctgttaagtgctactcaaagtgcggtacatggaccagcagcttctgaatcagctgggagctttagaaaaatgtctctttaatttgtgcatgagtcacctggagtcttgtaaagatgagtcttgttaaaatgcagcttctgatcctgtgggtctgagagtctgtatttctcataatttcctaggtgatgctgctggccccaggtcacatgttgggtctcagtgctctagagaaagaaagatggcagggtgggctggctgctaatgttagctcatagtctttgccatccttagaactttgagatgcagggtgttccctcttccaaagggctcaatgtcctgtgagtgacgaggggagatgtggtgacccctgcacccgactctcatcttggcaccagtctaagcagcacttcaccctccctcctcaggagctggagtatcagaggcgccaggtacgggagcccagtgacaagtttgtccctgtcatgagcgacttcatcacggtgtccagcttcagcttctccgagctggaggaccagctaaatgaggccagggacaaggtaagggtgccccaacccccactgcttgccaacccagccttatctaaacaagctccttcacccattcctaccacagacagcccaggagggacaaacccagagttacagagctttgagagaaaaccgtttcttcgctcttaacaagacaagcaatgataaccacataccgcaaagatcatggtccatttatcagatatcaggcaccatgttaagtgttttaatgatttgtcaccacctaccttatgggtttgttgaaaggttatttcccacttgacagatatgaacgctaaaatcagagatgctaagtaacttgcccaagattgcccagctgtaagttatagaactgggttagaatctgacaccacagctcagcagtggacatgattaccatgcctctatctgcttctcacactaacgtgtccatagacctcatgtatgggggtcttattaaaacatggattctcatttaggaggcctggggtctgagattctgcatttctaacaggaggtgaatctgctgctagtccatgaagcacacttttgagtagtgagatctttcttagaggatactgagtgagttgaattaacaatggtagctctcagtaactcagaacagtgcctggcctatataaatatagccactgttttatagccaccaactcatctaaccccccaacaccactatgatgtagattctattattcccatttgacagtggaggaagctgaggcacagaggggttattaacataactagaggatctttgaagttctgagttctgccagcctcttcctgacctcaggaagggcttcccaaggtctatacccctgacctcatgcctaccccttacaggcccaggggtggctctaaggtggactgagtgagcccaactctttacctgcctctccttagccttgtctctgatcctgatgatgatgggggtgtcttctcacctcttccagccctgccccctgtgccaacagtccccagccttgcgctgggctctgctctggctagaacccagctaacctcaggggctgagcccagcatgctccagggcactctccaccaatcctgttctgtcccttgacagttcgccaaggccttgatgcacttcggggagcatgacagcaagatgcagccagacgaattctttggcatctttgataccttcttgcaggccttctcagaggcccggcaggatctagaggccatgaggaggaggaaggaggaggaggagcggcgggcgcgcatggaagccatggtgaggggcagtgccaggcctgggactgaggggagacgggtgctacttggggagaacacccccaaactggggtgtg

SEQ ID NO: 36118 - DNA, 2300 bp, Homo sapien
actcgcgccaccacagccagctaacttttgtattttttagtagagacggggttttgccatgttgcccaggctagtctcacactcctggcctcaaatgatctgccctcctcggcctcccaaagtgctgggattccaggcgtgaaccaccacacccggcccctaattccattcttgattgctccatcacactgcttgctctcaggtttctgctgaataatgctccttggtcctctcaacttccaattctttgatgtattttgactcctcccccatccagccaccccatccccccatcatgtcaagactgggttgagggggggtatcttggcaagtgaagaggcagaatctagggtgactaacatgactgaattgcaaatagctgttgatgaaaaagagggcacagcactgcaatacatccagattcccaggtatctcatctggactccggtggctgatgggattcttgattatggagtgctccccgccccaaccctgaggctatctgtggaaaggcaatgggttgagtttgagttttctccatcataccgcagggagggaggaagtgactgttgtgattatagcagacggcagttagagaagtgactgctgcttactccccacaggatggtgagcagggcttctcagaggaggtgggaaattctcccgcggtgggtagagtgaggaatgttttatgggcccagaaaatcaagagcagcttcacacatactctcatgtctcttatctttgagccactcagtggctcttgacccagtcaagggctgccgatgagaattacctggagagattgaaaacgtaacagattcagagatccagatttagttggtctccactggaatgtttttttaaagttctccagatggttctaatgtgcagctggagctgaggaacttactgaagcaaatgcttcttcctcctaattgtaggcatagttgcgctagacctttggagggcctgagaccttctgttcttcatcataattttaagtgttcacctaccatcttctgataccaccactaccactccacccctgtctttactcctagcaagacaaccttagcctgtagctgtattcttattttacaactgggaaagcaggcctggagaagttaagggactttcacagtgtaccaggtcatacctactgcagaaaccagggtttcttattcccattccagaaccttgtctgtagatctcatgcatgacttccagggtcgtgatttttttgtctgaaatattctagagaagtgacttctacccaccctagttgtcatcctccctatcttcttggactctctctgtgatagaagggagtaatttagaacctggaatcagggtcgggtgtggtggctcatgcctgtaatcccagcactttggggggccaaggcaggtggatcacgaggtcaggagatcgagaccatcctggctaacacagcgaaaccccgtctctactaaagatacaaaaaattagccgggtgcagtggcgggtgcctgtagtcccagctacttgggagactgaggcaggagaatggcatgaatctgggaggtggagtttgcagtgagccaagatcgcgctactgcactccagcctgggcaaaagagcgagactccatctcaaaaaaaaaaaaaaagaacctggaatcagaagacctggatttgaatcctgcttctgccgagggtgttcttggaccccatccaagccttagttataataatcccttgtggagtgggtgtgggaatgaaacagaacgttctttggaaactttaagatgcttggtaaatgctacttccttggagcaattatctcatcagcatctgtcgggacccaggttgtactctccaaggaccgataggtcagggggagacggatcagactagatcagacttgtacatgggaaagagtgaagccggctccctcctttctctctgcaggacgggtttgggccttgcttgtggccttcagcagtctcttctcatttatgcccgagaccatgggtgcacaatcctttttttggcactggctagagtgaagaataagggctaatagatttccccacacccttgcctccaccttgctgcccagccagaaatcttcccagtagagatcaccatccgcccccgacccccaagctgaatacttaaggggtgggtccttcccatcaagctgatttctcaacgagagggacaatcccagcttccccaacattgcagagcccaaacatgtggaagagttggaagctccgcacagatgtcagagtaagggagggggcaggcggttctcc

SEQ ID NO: 36119 - DNA, 2300 bp, Homo sapien
gcgcgggtcccgccctccccctgcccctccccgcccttgctgggatgaccccgggggcgagtgcccggccagtgtgctcccgaagcgggctgcggttccgctcgtatcaggcttcatggcggcgcggccactgtcccggatgctgcggcggcttctgaggtccagcgcccggagctgcagctcaggggctccggtgacccagccctgccccggggagtccgcgcgagctgcctcggaggtgagcccaccccgcctgcgtccacagcttcccggggcaggagtggccccggcacactgcccttttcccccagtagctcccggcctatctgcttgaccgcttctgggagggacccgttggcactcctcagtggagcgatgttctccagatggaccgcccggtctcacccgctagcccagcgggagaggttcctgggagtcccgcttcagaacctccctgccccccagccacgccaccccttctagccctgagcttggccagaaattcgggtaagcagaggactgggactttgggtccagtgaggtgtcttagtacctttcagccttgccttgcacccaccctctttcttaaacattttccctccctatcccaagagctgagagatcaggtgtccctgtgacacctgcttcatagtgcgactgactaaacatgtcacctcggtgtcaccaacgatgagttgttactgtagtcccagggctctgtaacccatcctttgctgactctccttgtcttttttattaaccttgggagggttcagccttatcctagagcagaacagggcaggacgtggcttcttccaggtgagaaattaattcctctgtctttagggttttgggtaagatccctcagtccttgccagcacccctcagagtgtttcaagtcattaaaagttttaggttttggttgttcttctgctcaggtggttagggaataatttggggggaaaagtacctcttttcatttagtgaaacctcttttcggtacctatctaggcgtttttttccccgtctcccagaactaggcttcctgtcctgggattcataagatcactgctccctcctcccctatattgctcaatgacttccgccaaatttgctttccccaaatctaagcccctctgggatcctcagataagcaggcccatggttgggaagtgaagactttttagtatcctcaaactctgaacatcattgaggaagagataggaaagcaaagatggctgagagatctttaaagaattcaagaaaagggacttttcttctccagccccccaccccctagtttattttgtactggtctttcatgagagaacctgtgttgagtgactcacatgtggaagcatttagtcctcactaagccatgtgaggtgagtagagtttgtatgttcagatgagggggctaatctaagttaactttcctccagtcgcagagctgtagagggcaggaactcaactctaatgcttttccgtcctccctgtgtggaggccagggagagagcctgctcctatccatccctttacactgtgaagggaggggtaatgtggcagaaaggagaacatagactctggggcagccccatcccttattagggattcaccaagtccccttacctctcagtgtctgttttctcatctgcaaagtaagaataaaagtgtctacttcataggatgtcacagggattaaaagagttaacgtatgttaacgtatatacttagaacaaagcttagcccatgtaagtgctgtgttatgtaaatgttggtggtaattactattatccatgctgccactggcacatgctctgtcctgtgagtcccctcccatctggacttgttggatagctattctgtcaactcacattgaatcctggacatctcattaggattatcttcagcagactgggagttcctgagggctgggtgcacctccgcctttctatccccacaagcgcttaacgcagggttgtgcaggcagtggattcagccaataattgtagctgcttgaaacttaactagtgaggagtcacgtggcatagtagaccacactggacagggagtcccatgttttcacccgccagtttcgcctccaatttcacctggctcctggggctgtcacttccctttgcttcatgtttataaaatgagaggactgggccagcccatcataagatgggggagggcacagaaacttgtcttgaggagactctaaggggaggtgagtctggaaatggatatgttctgctcatctccagagcttgccagttggggtggggacaccttgaacc

SEQ ID NO: 36120 - DNA, 2300 bp, Homo sapien
taactgctgctgtttatcactaagagagtacttgggttaaagtctcaaagagaggatgtatatgcctagggggctaaaactagggccaataggagggtatcacaaaagagagatttctaggacagtatgttccatgaggctctttgagcatgtgacaaaaagccaccattccccaggaaaaaaaaatacagtattatgcattcaagttcaggggtctacagaaccctccaaatcaatccatggacttgtcacatcagagccctactgcaggctgtgagcccttgaaagtatttccttattcccagccattagcagaggattcggccctgatgacacttaatcaccatatgttgacagaaaggggcacttttttgctgaatacaagtaagaactttaataggtggggaaacatttaagtggaccagacaacatcaggaagccagaaagtttcccagcactacaggagtccaagtagatgtatgataatatggagaggatttcagccttcaaacagaactgagtaagccttaggtcttgccttggagacccaagttctataaaagatgacagtaaagcccaagtgaagggatgatcacatacaacttgtatgaagagggtggaatctagagaggctccaaggagctggtgacattcttggatcaagttcatatgtcagatggcttcttccctgaggttgagtcctctctagaaggctcttcaagcctcatacatacaaaaaaaaaaaaagtttttatccttctctcccccatacccagttttcctgataaatccagacatatctaaacttagcagtggacagagcttgaacagtcctcagttggtcttcaggccccttgcaaacagacctctggcatacttgtctcatcagtttcaaacacaccccagatacactttcatcccctacaatatattttctgaattttgagtatcattgtgagaaattcacattgaatctaaggctaaaatcatctcagcttttctgacagtcccactgcacttgtaaaagtcagttatattcagttattttttcctctcccactattcggtcaattcttcaagatcaggagctatattcccacttcctaagcatgcacttggcagctgtatgttccagccggtgttttattcttgcaattccacagggacagggttttggatacaacaggctggtttgagcataattattcttagtacataagctcattattgtgtgtgttatccaaaatcttaaaggactacagcactctgctttttatagagaggaagaggcacaccccaccattcctaacacatactgaatcttgactgaatgactgtagaaagcagattgccctgggtttgaaacccactatcagctgtgtgacttcgagaaaattacctggtctctctaagcctcaatgtcctcagttgcaaaaaggacattctattcataccaggattgttttaaataacatttagcatggtgcttggtgtataagaagcatttcaaaaatgttgtccactcattctgtgacttctcatatactcttgccttctccacgaaaaaaaaaaaaaaaaaaaagattgttaatatccttttggggcacaactggagaagtgtatcttgaaagacctaactgaccgttttacaaccacaatctgcactatggtgcactgagtgatgtgagtcatgcaagtgtaggctaaatctttttatttagaatgttgatatttcacggacttctgaaaatttattacgattttttgaaatattacattaaaaaattacttactttgataaccgcagtttacctggcaccctcttaaattttgcatccaaggcagtgcctcattcgtttggcccttgtcctgtcctgcctactgtcacaccacgacctaaatctgagactagagcagccagaaaaactggaaggaaaagaaccccgttccttacctgagtttacccttctgccctagagcgctaccccggcccaggaaagtgggcacagggagcgtactacagctcccacaaggccacgcgggactgcgtcctcgcctattggctgcgcgggtcccgccctccccctgcccctccccgcccttgctgggatgaccccgggggcgagtgcccggccagtgtgctcccgaagcgggctgcggttccgctcgtatcaggcttcatggcggcgcggccactgtcccggatgctgcggcggcttctgaggtccagcgcccggagctgcagctcaggggctccggtgacccagccctgccccggggagtccgcgcgagctgcctcg

SEQ ID NO: 36121 - DNA, 2300 bp, Homo sapien
agacgtagaaatcaaaacaactcacatttagtaacttgctgaatgctagacagtcttccccatgttgtgagaaatgaaagaacatagccccatgactttgaggtctttacaagcctccctgaagaactagcttctcgagctgacagacaggcatgttttcacaaatttaccaggtacctgtgactctgaggaacacaccgcctgggcaaggatggattggccagaaaatcactcagtccaaggtagttcttacagccagaagaattcacgggtgctcttagtggttctcagacctgcttgtctcatttattgaagctcaactaatgccttgaaggggaagaaattagctttccatccagttaggaatgactgttgtggcctggcgcagtggctcacgcctgtaatcccagcactttgggaggatgaggcgggaggatcacgaggtcaggagttcaagaccagcctggccaatatggtgaaaccccatctcactaaaaatacaaaaattagctgggcgtggtggcacgcgcctgtcatcccagctactcaggagtctgagggagaagaatcgcctgaacccggaggcggaggttgcagttagcagagattgcgccactgcactccagcctgggcaacaaagcgagacaccttcaaaaaaaaaaaaaagaatgactgttttttctgaggaccaaggaggcctgagggagcaaactcctttggagtttcggggatgtggttgtgtgagcttgtgggggagggcaaacagtgtgggctatagggtggtggcctgggaagaacaagaaggtccttcagcagcctagatagggggaagctgcttgtctcttcgtgagtgaggaaggtggggttttattctatgaccttaatttgtaaaattccttaatttgtaaaatggcattggagaaatatctagctcaggggatggtatactgataaactgtgaagtgctaaagtaattaaatgcataacacagacttggagaagtggaagtgctaacggcctccattatattaattatatgcatcactgagcacattgtaatcaatggcagcatattaatgataacattgggcatattgggttctagaatcactgaactggcacagcaagtatttcagaggccatccagcctggtcttccttatctgaggttagaattctctgtgagatatttgtgctaaggagtaccaatattttcctcagtaatactgggcatgttgaatatcagagttcatccagggcctgggagagtgggaaatcctgcctgtcccccatgagtcttccccaggttgaccagatccactcttgccctcctagatccctgagaaccgacagatttggcatccagagtgggctgtggtcatcatttgaaaggaaaaaccagctatgagtcagggcttagactggagaaaatttctaaggaggtggggccagctgcttacttcccccaggcccagcaggaaattgagcctcactgtcccaaatgtgaactgaaaggcatccaagagcccttgatataacttcagacataaacgacataagcacagggtcccaattccctgggagtcacctccccacccacatgaagatggcactgctgccacagtcatctgtgacccaagagtcatcctttccactattcttggtacaattaccaataaaccacagcagggaaaccataccccatagctctccccagccttgcccagtgtgccagtggtgaagaagccattccttagtgttctagaaccccctctgcaaaacataattatgcataagaagatggtccccactcccagcaaatcacagctctgctctagggagcctgcagggtaacaggaggccatcgctcctctaggggagatgggagtccctcccttttattctcatcccgcttctctctcaggtacagtccacctggttgtagtggaaagtaacaataaactcttgtcttaatccacttcacccccaagtacaacttcaagcagtaagaaatacaatataaaaccttcattcaagaaccctgttctccccaccctgatgcaagggtggctctgttggaacaagagtggctgcccaggccctttgaaccatgggagaagatgttctggggtcaacttcaagacagggctggcagtactgggacacttggctgagaaacagggggcctgcccaggtaaagagcttccccccatggacgtaaatggagggtcacagctgagcttcaggaagggaaggaaaggaaaagaaggagcaaggagtatgggggcacactttctcctc

SEQ ID NO: 36122 - DNA, 2300 bp, Homo sapien
ggatatatatgcaaaaatcctcaatatactatcagcaaactgaatccaatagcatattataaaaatcatacattatgaccaagtggtatttatcctgaaatgaaaggtgattcaacatacaaaaattaatgtgatataccacattaagagaataaaagattaaaattacatgattgtcacaatagatgtgggaaaagtgtttggcaaagttcaacactctgtcatgataaaaattctcaacaaactagaaatagaaggaaactacgtcaccataatagaggtcatatatgaaaacttcacagctaacaccatactcaatggtgaaaaactaaaaacttttcctgtaagattagcaccaaggcaaagatgcccactcttgccacttctattcaacatagtattggatgtgctacccaaagcaattaggcaagaaaaagaaagaaaaggtatccaatttggaaagcaagacataaaattatccctcttgcagatggcttaatcttatatatagaaaactctaaagactccattaaaaaaactatgagaactggccagccacagtggctcacacctgtaatcccagcactttgggaggctgaactaataaatagattcagtaaagttgtagaatacaaaaataacaacaaaaatcaattgtgtttctatataccaaaaacaaactatctgaagaggaaattaggaaaacaatcccatgcacaataacaccacaaagaataaaaatacctaggaataaacataaccaaggaggtaaaagacttgtataataaaaatggctgatttcaaaatattttacattacaaagttatgataatcaaaacaatataatgccagcataaaaacagacatatagaccaatgaaacaaaatagcgagcccagaaataagtccgctcataaatgctcaactgatcatccacaaaggagtgccaaaactacacaatgggtgaaagaatctcttcaagaaatgattatggaaaactggatattcacatgcaaagaaataaaactggacccttatcttacaccacccacaaaaaccaaaattgattaaagatttaattgtaagactgaagttgtaaaacacctacaaaaagcatagaagaaaagcttcatgacttagtcttggcaatgattttatggatatgacagaaaagcacaggcaataaaaacaaaaataaataagtgagactacattagactaagaagcttctgcacaggaagtcattgataaagtgaaaagacaaactacaaaacagaagaaaatatttgcaagctttatatctgataaggggttaatctccaaaatatgtaaggaactcctacaactcaataggcaaaaaacaaactattaacctgatagttaggttactaaacatcaacgttcaacatcaataaacatcaaggaaatgtaagtcaaaaccacaatgagctaacatctcacacttctcaggatggctattatcagaaaaaccaaagtgttgaagaggatgtggaaaaactggaatccttgtacattgttggtgagaatgcaaaatgttgcagctgctatagaaaacagtatagaagaagatcctcaaaaaaataaatagtaggattatcatatgatctagctattccatttctgggtatttatccaagagaattaaaatcaggatatcaaagaggtattagcattcctctactcattacagcattattcacaaaagccaacatgtggaagcaacctaaatgtccatagacggatagatgaataaagaaaacatggtatatacatatgatggaataatattcagccttaaaaaggaaggaaattatgtaatgtgtgacaacatagatgaatcttgaggacattatgctaagtgaaataaaccagtgatatgatttggctgtgtccccacccaaatctcatcttgaattgtaatccccataatccccacatgtctagggacagacctggtcggaagtgattggatcctgggggcagtttcccccatgctattctcgtgagagtgagtgagttttcatgagatctgatggctataaggcagttttccctgctcttgctcacacttctctctcctgtcaccatgtgaagaagatccttgcttccccttcaccttctgccatgattttaagtttcttgaggcctccccagccatgtggaactgtgagtcaattaaacctcctccttttataaattatctagtctcaggtattttttttatagtactgtgaaaatggactaatgcagccagtcacagaaagactgcatgattccact

SEQ ID NO: 36123 - DNA, 2300 bp, Homo sapien
agggaaatgcaaatcaaaaccataatgagataacacttcacacctactaggatagctagaatttaacaatcacaacaaaaagaaaacaagtgttgacaaggatgtggagagatcagaacccttatgtattgctggtagaaacacaaaatggttcagccactgtgggaagcattttggcagttcctcaaaaatctaaatataggattaccacatgaccccgcaattctactcctaggtacatatccagcagaactggaaacatgtccaaacaaaaacaggtgtacacaatgtccacagcagaattattcctaacagtcaaaaagtagaaacaatccaaatgtccatcaattggatacacaatatatggtatattcatgcagtggaatataaaccttaccaataatgaagaactggcacaggctatgatactcatgagccttgaaaatattatgctaattgaaagaagccaaacacaaaaggttacctattgtatgactccgtttacatgaaatgcccagaacgggcaaatgcattgaaacagaaagccaatcagaggatgaagggagggcagaacggggagtggctgcttaatgaatgcgttagtctgttctatcactgctataaagaaatacttgagactgggtgatttataaagaagtttctgctgcactccagcctgggtgacagaatgagaccttgtttcaaaaacaaacaaacaaaaaaaggtttaattggctcacagttccacaggctgtacagaaagcatacatagcagtttctgcttctggggaggcctcaggacacttccagtcatggtagaaggcaaagggggagaaagcacttcctatggccagagcaggagaaagagagggaggagggaggtgccacacacttttaaacaaccagatatcaggagaattcattattgccatgacagcatcaaggaggatggtattaaaccataagaagtcacccctatgatccaatcacctcccactaggccccacctccaacagtggagattattatttgacaagagatttgggcaggacacagatctaaaccataccagtgtgtatggagcttcttttgagggtgataaaaatattctgcaatagggttagtgataatgattgcacaattttatgattgaactgaaagccactaaattgtacactaaatactgttaattctatgctacattaattttatatcaattttttaaaaagggatatgggaggctcaaatataatggtacatttgaacttttcagaacaaggtctttcaaaacacttgcccaataaatataaatatatgggcatcccccaattggcctttaaggcattctcttccattggccaagagcattctcatctgctcagcaactttctcccattggccggacccttgatgctgaggctttgaagcagagcctgggttttccaggcactgctgattagccgggggaagaaaagtagggtgttgtagcaaaccctccagttaggactttgggtccctaggagctgactgagtctgttcaagcattttctctctagtgccaggcctttggttggtgggaaaaagtcataggatggcactgggggggtctatttgcagtcgtactcttaactcttgtgagacctcaaaacaagtgccttctgggtggtgctttccactggggtaaaatgaaaagactccaggatcacaggcacccagggttcaaaggcctgttaagtagagagcaggagacagtaccagcacagccctaactctgtcgggcctgtcctctcagaagccaggccatggcccacctaaattctggaaggccccacctcccttagccccaacaggcagtgctcatcatcaacgactttcctccaagcccccgccctctgcatactgcatggactccaggagtcccctgcccccactcccacccaggaaagctggtctaggaccaatcagaggctgtggaactttctggaaggcccagggcttctccctgggtggggcagggcctctgattggaggaggcctgccagaagggtggggcgatgggcgtggctaacgggataactgccagagcagaagacagttggcagttatttcgcaaccttcatctgttcctggaagatacccgtagcctgccttccttcttgacaggctgatttaggggtgctccccaagaagatcaggactgctgaaagaatgaagaagaacttacttggcctaggatgtggctagagaacggagcgcactttcacttacctggcaaggtggttttggaagtttccacggaa

SEQ ID NO: 36124 - DNA, 2300 bp, Homo sapien
catggaatatccatgtttctgacttgagaaaacttcttgatggagtattgggttcactctagagcagagattgatccatccttcctatatccctcattcacatcattctaatgcttttctggtttctaaaagcagctccatttctactctggtgccagcttggtcctatccctgccactccgttctggttgtctcatgggtgactgagggttaggggagataacctagcccactgcccccaacccttgggagaattcaaaggcttgagcccaggctgtggttcttcctaagcctttcttcctgggagctcccgccaatagtaggcaagccctcaggtaagcaaagagtaaggcagtttccctgctgttctcccctccttcttcccttccccttcctcttccctacttgccctccccagtttctactccacacctccttttactcacctcttccttcctcattactttccttctcatgactcttccctacctctatccctcactccctgctcctgagttagatcccttctctccaaggcccaccccatataccttgagtttcatcttggccatgcccctcccccaccaggctttccagaattcctgcagggagaggcttgtcttcaaggatatgcagcatgccagtttggcagtttcccggggtgcacatgtggagggtgcacacatgaggaccagctgcctcggcttctgcagttatgcatgtgtgtagagaggacacagggtcgtatgttacagatgtatccagccgagccaatcctgggctgcagagacacatccacatgcaacatgtgcctccctgtgggtaaccgggacaggtgcacgggatgtgttagccaccaggagagaagagaaggactgcaacattgacattcttcctgcccctggatttaccagctggagtaccaacaggaatctcaaaatttcatttcctttagaaggaaggaaatgcctcttggggagtccagtaaggcagaggacggtcctacctttctggtaactagttgtttatagtgaaccgagaggataaccaaagacgagaccttggccagacctgggtgttctgactgtgagctcacagtctgctttgagtagggtctccgctacctaccacatgccttggacaagtcactttactcttttgggcctcagtttccttatacatcaaatgagggttgctgagaagatcaaacaagtgaagagttgtaaagatgctgtgcaaacacttggcgccactgcacccttcactgattcttgtaataatcatgaaaagtcaaagtgcgtgtgtgtgcgtgcacggggcgctcgttattcataggtcccttaccaggattcgagaatctgaactgggccccaggactgggtgggcgcgatcgccccagcccccactcccagcctagggccggcgcggtcgggttttcctccagcaggcggcgggctgacggctgcagggcgcgctaggcacgtgaggtggcagcgccgtcgccagctgcagaggtgcagccctggccgcccggctcgccttccgcaggggctgcccgtgccgctggaccgcggagaccgccctcccggttccggggctcgcggcctgcccacctccctccgcgactgcggccccagcccactcccgccccaccgtgcgtccccgcgccacccctgccaggaccgtgaatccctctggtttccgcggcggtgttggtcgtctcggaagcgggtgcgctcggcagcgggcagggcagcgggcgcagaggctgccttcggctcctgcagctccgcggttcgccactgggggctgccgcgccggagagctcggcggggacggtgcgcacggccgccgggttcctgggcgcctctggccgctgggttttctccactgctggccctgcgctgtctccgcagcccgcccgactccctcccagattggagcgtgtgatccgtgtgtgtgtgtgtgtgcgtgtgtgtgtgtgtgtgtgtgtggagcggagagagaaaccgggtacgcgcgtatgcgcgcgcgcgtggggggcagtgtgcatgcggggagtacgggggagtgtgtttgtgtgtgcgtgtgggtgtgagtgcctggctccctctcgctgagacacacatacactcacacatacacaacccggcaggctcgtctgaacttgaagacaccccacattccaagatgcccgaggttcctgggaatgcctggggttcttcgatccggaaaatcctaccggcatcctcctagggagggattattattattatttttctttaatctggaagagaaga

SEQ ID NO: 36125 - DNA, 2300 bp, Homo sapien
aaagttttccaaaaatgggattaggtatcagtttttaaattttagttcactgaaataaaataaaaattcagttcctcaattgcactagccacatttcagttgtttagtggccatgtgtggctagtgggtactgttaatggacagcacagatctgggttaggaatccagctgggtataactttatagtgtttttaccattcacttatttattaattcgtcaaacatttgctgaatacctactctgtgctaagccctgcacaaattgttggtgataacaatccagtgaagaagaaacattcttgttctgtaggagctcctggaaagctgggagtcagaaggaagtacgctttcctcccatccttctttgtacctgactcaagaaggcaatgggagatgaggttcaggccgatactctctgttgcagaaatggttcacactgcagcctggtgtagaggcagtagattcagggtcagtgttcctggcttatctagcacatcaagtgggttgttggttgctgacaacaggattcactctggctagttgaggcagatgggatttaataaaggaaactgaaggacaaacaatcatttggagggtggagaaatagatttggggtaaagtttccaagaacaatgccctaaactgtgctgtagggctagatcatggagggaaactggtattactatggctgctgctactgagcactggacaccaggaacttgactttattgcagccactcttgccaccaccactgatgctacttctgaggcaggaaccagacctcaccaccacattttttttttttttttttgagatggagtcttgctctgtcacccaggctggagtgcagtggtgcgatctcggctcactgcaagctccacctcccgggttcacgccattctgctacctcagccttctgagtagctgggactacaggtgcccgccaccacgcctggctaatttctttttgtatttttagtagagacggggtttcaccatgttggccaggatggtcttgctctcttgacctcgtgattggcccccgtcggcctcccaaagtgctgggaatacaggcgtgagccactgtgcccggcccctcaccaccacttctgaaagctaaggcctctgctgccttccatgccagcaaaaacagaagctccgtgcactgcctgctctttatgctactcacttctgaatcaaatctctagtggaggccttgggttgtgagagctcagaccacatccctgaatcttagctgcaaagacacctgaacgctctgaactctgactcgatctctgacttcaatattagggagatgagacttattacatgagaatatccccagatacgggaaagctactcaaaagttgatgagaagccacaaatatgacagatgtctactacagtcagagtgtggtcatgctgtagcctcaggcagcaaattcccttcttaagaacagccattcactcagtaggtgccatatcaaggttctggcagcagagtagactgaggatgtactatggattgaatgtttctatgcccctaaaattcatatgttaaaatcctaaccctcaataagatggtattaggaagtggggcctttaggaggtaattaggtcatgaaggtggagccctcatgaatggcattagcacccttataagaagagacacaggagagcttgcttcctttctgtctgctttttatcacatgggcgcacacaatgagaagatggtggtctgagaaccaggaagagggccctcactagacaccatatctgtcagaaccttgataaggtgcctgtgtaagaccactgaccttcagaatcttctcaataaagcgtgactgcacacattccttaggatggctctcatgccagtacacccaaatgtgattctgtaacccaggcttagaccttgacatgttttagaagtgctgtggtctgacaaaaagctcaccaacagtggctaactggttcactccatgccttctccagcccctgtgcctccctgtactgcagaggctgaaaactaaaactacgtttcccagactccttggcagatggggatctagatatgcttaggttcagccaatcagctgggactcatgcaggactttgatttggaatatggaggggtaatttggaataatggagggagctgaacagggcacagagctggtgctcattttgaggagctagagtggtcagcggctgtggcagcagctccctcagtggtaagttacgtggcatagtttggggtgttaatatggaattcaacttggagtatatccctacagcc

SEQ ID NO: 36126 - DNA, 2300 bp, Homo sapien
gaagggtggtgacactggctgggaagtccaagttgctgtttcatggccccaaagagttcctctcaggaggagcccctctggtctgccagaccctccttggtgcctggcctctggaggctaccccttgatggaatgtttgagggcttgtggtgagggtttgacactggccctcctgtgacagctcagcccccagttataatgctgttgatgcctgtggtctttgcatcccatgaaccagctctgtggccatgggagtgagtggtaggagccttcacatttcttcagagcctccttataattgggattgtccccaagagtggcaagaactagcttgggaagtgagttcataatccatgaacacagcccctggttatagcctcctggttggcatgaccttcctggcttagaaccctagcttgacagatctttcacaaacccctaggactttatgactcagaggagaaggcagctgacaagtggaggtgggtggggagtcaaggaggagtgacctggcgcttcctggcagaaagtcctgcctcccagccgccctaaagaggggtaggggagagtgtccctgtctgttggcaaagtccagcctcctgtgtgactcagacagagctttgttcaacaaagacaaacacccctaccccactcctttcattccctatcaaagttctgagcaccccttcctggcttgtctttaggcatgaggtctgcttcccaggttgcccgctctctaccatctctgcactttggggtactgggctcccctgggaggtttattccaccctctcacctccaccagggaaggaagcagaggggagggcattgcagtcagagacaagaggctagagaattattaactgagacaaaagcagaggaagttacttattttctatgggagatgataactaggggcctgggggggcgttcaccatgcctcctcaactgcaggaggccagaccctggtgacaacggttaccatctattgaccacccattctgtggtgggcatttgacatttattagctcaataatgacaattattatctcacacaaggtagatattcttaactgcatttgacagacaagggaattgaggttcagaggagttaagtagcttgcccaatattacatacccaacgtgtggctcacctgggctcagtgttggccagttggagccaaaatgcatccttttccctctcaactgcttcactcattcattcaagacatgtttattgaacaccttctatctatcaggctgtaccaggagctgaggagacagccgaaaacatgggaaaagttccacaaggagttttcattcttgtggtgccaccgctcctaggcagagttttaagaactcagaatggcaaatggccccaaagttcagttgtctcccaaccggcagtgtctctgccaactttgggtgggggaagtagaaagcaccttgtgtaaggaaaaatatgggtacatctcaggtccaccagcaactggtgagtcattaaccgtctcagtggctccactgtcttctctgtgtggggagcgggtggaactagatgctctctaagctccttggaccggttgcattggcatcagctgggagcttctttgagctgcagaatctcaggccccatactagacctacagaatcagagcctgcattttaacaagatctcccaggtgactgttgtgcacattatagtttaagaaactcagatgaaggttccctcctcctcctatctgctattttaataatagcctctggctggggacagccactcaccagcagagggcactgtaaggaggggtttcaaggtgcagcacctacacccaggttgtctccctgcctccctccttccttccagacctagactggaaagttcactgacttctgggatcctcagctaatcccttacctgggctggactttgccaatagacagggacactctccctcacccctctttagacagctgggaggcagggctctgccaggaaatgccaggccactcctgcctggattccccgcccacctccacttgtctgctggcctgccgactgaatctggctgacccttgtttctcggagaaggaactggaccagccagcagcctctaagagctcctagacggtaagttgagcacccccttggggcagctggagaggggatgggcattgtgatggggttacctggagcttcgggggaggagccaggccagcttagcctgcctgctggagtgtagggaccctctgctggaggaggggaggaaaatgggacttggccaatgggtatgaggaccact

SEQ ID NO: 36127 - DNA, 2300 bp, Homo sapien
gactgcaatgccctcccctctgcttccttccctggtggaggtgagagggtggaataaacctcccaggggagcccagtaccccaaagtgcagagatggtagagagcgggcaacctgggaagcagacctcatgcctaaagacaagccaggaaggggtgctcagaactttgatagggaatgaaaggagtggggtaggggtgtttgtctttgttgaacaaagctctgtctgagtcacacaggaggctggactttgccaacagacagggacactctcccctacccctctttagggcggctgggaggcaggactttctgccaggaagcgccaggtcactcctccttgactccccacccacctccacttgtcagctgccttctcctctgagtcataaagtcctaggggtttgtgaaagatctgtcaagctagggttctaagccaggaaggtcatgccaaccaggaggctataaccaggggctgtgttcatggattatgaactcacttcccaagctagttcttgccactcttggggacaatcccaattataaggaggctctgaagaaatgtgaaggctcctaccactcactcccatggccacagagctggttcatgggatgcaaagaccacaggcatcaacagcattataactgggggctgagctgtcacaggagggccagtgtcaaaccctcaccacaagccctcaaacattccatcaaggggtagcctccagaggccaggcaccaaggagggtctggcagaccagaggggctcctcctgagaggaactctttggggccatgaaacagcaacttggacttcccagccagtgtcaccacccttctcatctgagaaaggcagatcagcagggagcaccactccaccctcctcccagccccaccctcctcccagccccaccctcctctgccttccacacatcatatgtcatcaggccccccgcctgggaggtgtgctgccagaggtaaggggagcacaggcctaggaaccaggaggcactgggagaggcaggtgtcaggagaaaagaggatgggggcagggaggggcagggagggggcctccaccactggacagaaatgtagaaaaacaggaaggcagaagatgagcaaacggacagtcaggagcacagaaagacaagtagaaatatgcacaggtgggcatgctgctcagctctgtcccagaacctccaggaccagtgtccctgacccttgacagaaaaggatggattagggccaggcacagtggctcatgcctgtaatcccagcactttgggaggccaaggcgggtggatcacctgaggtcaggagttcgagaccagcctgaccaacatggcaaaaccccatctctactaaaaatacaaaattagccgggcatggtggcgcacgcctgtaatcccagctactagggaggctgagacaggagaatcacttgaactagggaggcagaggttgcagtgagccgagattgcaccactgcactccagcctggacaacaagagtgaaactctgtatgaaaagaaaaaaaaaaaaaggatggattagatagtcagtccagaatactgaaaataatcagattgttttctctccttcaaatctggttaatcatggggggaggctgaaatatcatgaacaaatgagaagaatgatatttgtggggccttggtggggccttggctggaggagggtctgtacattgtcccacatgcaaatgacatgcaaagcaacatgccaccttggcagctttttaatcaaagaccaggcagttgtttccttgaaaagtcaggccacaagaaacctggatgcttgtgcttacatcctgacactctgggaatggaaagatggagcaggaagctcataccccatggctccaggggtagaagagagctaaaagttcagaaaaaggaatccacggtgtcaacaggccaagtttgaatttgggcaggagatcagcctgggtgggccccatgagtgtgccagtctgatatggtgagataagcctgggacagatgtgctgccgcattcgtgactagaaaagagtccccaggaatttctggctcctgccttcagattgtgaactttccaggttggtagatcagcttaggtagaacagttctcggtgagggccagctacatacctggctaagcgctgcccactgcagaaaagctcatcacccgggacctgatctccaggactcagaagcacttggaggaaggcctattcacttagaagcagttaccagtgctgggcagtgtcctccaagtgccagaggagtgctgtggagaaaagaagt

SEQ ID NO: 36128 - DNA, 2300 bp, Homo sapien
gctgggcctggtggcacatgccagtagtcccagctactttggaggctgaggcaggagaatcggttgaactcgggaggcggaggttgcagtgagccaagatcgtgccactgcactccagtctggtgacagagtgagactccatctcaaaaaataaataataataatccttttagtagtaaatccaaaaggtaggggaccatataatttattgtccacagcgggacacctttgggagtaaaggggtgctattagtaattatgtctggacaacaggaagaaaccatgactggcaaaccaaaatgctgggcatcacactaacagagcactctgctgctcagactctctggaggagtgagccctaaatcttccaaaccatcttgactcctcttctttagtcagaccctccaaagggtgccctaccctctcatccccaccagccaaacccatttggagctgttttcagatccgttccccagtgttcttaggttcctcattttcaacctacaagtgaccctgaccccttccttctgcttccctgagaatggcctagagtgtttgcactgctccaaacacgaagacttttgcctctgctaagtacccatcatgagagctgcaaaaatcatctagccatcctctgctgctgttccggctcagggtcttttctatgggcccccatcatctctctctggcctcagtaggcttctcactggtcccctgcctctgctcttcccaagtgctcagaccacctgtctcacctgttcagagacaatggcttcccacctcagtctgagaaaaagcaaggtacttatgacagcccataaggccccagtcccttttacccttgttatctctctggcttaatctcttagaactcttcagtcacccagatgtatgtcctcgctagttcctcaaacaccccaggaatgctcccttctcagagcctttgctcacgttgttcccttccttggaacgctttcctcttagacaaccaaatgattagttcccttgccttcttcacgtcttcttcaattgtctccttttcaaagtccttcaccctggccatcctataagtacgtaaccccacctcttagcacttcctgtttccatttcctgtcttttctccttggcacttgtcatcacaaaatagaccatgtattttacttaccttatttgttgttcagttcctcaagctccacaaatcatcacagcagggattttcatttgctttgttcttttgccatattcccagtacctgaaacagcacctggcatagagtagatactcaataaatatttgttaagaagaataaaagactgactgtgagggcacatagcatggaggttgaatatttggcctgaagtacaaaagcctgcattttaatcccggctctgcacacttctgtgactcagtttacctgtaacttgggataatacacatcgcctcccatggctgtggcaagcatgcatctgatttcatttaaacccctaaacccactgcctggcctgtttcaaaatctctgagctaagtaaatggcagctattgttactcagggaggctcctgatcgatttgacattacattatggctttgtaacaggcaaatcagcacccaccgcttttgagtcataactcacacacttactccccaaattgtcagttttgatcccacctctgccaggacccctcctttcctgaacccacgttcccccaaagcaaatggcctgggtctttttgcagtcagcccctttcaacacacatctcctcctgtttaaatctcagaaggccaccctcctaaatctcaggatgcctgccctggggccccttccacactctcccccagtggagctagggaatttgggtgggaaacaaaggggagaacataaggtgagctgagagggagagggagaagagagcaggccaagccatacccacctgccaggttcctgtctttgcctactgataaataggggatactaatggccagattttccattcccccaccccagcacccgctgtcactcaattaaaaaaagatagagggagagagcctgggggaggggcaggaggccttggctataaagcctgtggctaagtggggaaagcacgaagcctggcctgctgggtccttttcccgtcatccccagccagatttagctgctgacagctgcttgggactctgccgccagggcctggcccagacctgcctgcctctctcctctccctcagtgactcctgagccacagcccctccatggcccagaaggaagaggctgctgtggccactgaggctgcctcccagaatgg

SEQ ID NO: 36129 - DNA, 2300 bp, Homo sapien
cagagttatttcaagtttcagagaagtacagtaatatcgtcaagaaagtttcatgatacaagaggaagagattaaaaaccttcacaggagttgggttttgatatggtaaacgtctaaactagaggccattcttggggaggaaaatcttaaaaacatttggttcttaggaatcccctctttacacgcatattttattaaagtgtaacagattaaaaggtgctctagccagggcaaaccaggtaagtggtttccaaaactcacgttgatttaaaagttcttgcacccctccaaatttcttcttaaagaggacagctatcccagcgcccatgcgacaatcctcactgatacagtgggctaaagagtctgttttcgggcatgcaaaaaggtctcctttcacataagtgatctaaaaaatgtgcaaaggaaaagacaatgttttattagatacagtaaaatactaagctatttttctgtattttgtgtcccccacgactacctctcccggcaccccttcctccaatctgatttaaagccaaaccaattacagcatgtgtaaaaggaaagtaatggatgatccctgcctagaattttgagcctttttaaagtaaatcagctagagagaaaaaaagataatgcaatcattaatttaattaaaaagtgtttatgcttttgacctccattattacgaatttcagttcaccaataagtcaatagttgttacgcactctgcttccttctggatcttcattaaggctgctggccatgatactgagtcgctatttccagaatttaagtgtttcttcagctatgagaagggaaaaggaagtaaaaatgcttaggcagccttagtatataatattctgattgccctgtacaaccacttaataggcttttttccccaacgtttatcgatgaatgtgagtttgttcggcccctgggacgtaatacaaaacccttctggggcaaagaggaagaacgcttaggttcggaggctgtctcgacccgctctcatttcgtgctttcctggagcgccccgctccgtcagcggaagcaaagcccatccctaagacacgcctcctcctttctccagggccactccggagcaaggccgatttaggacggtctccttttctctgcacgacgcaaaagtatttccccagtgggtctggcttagaagaaaacagaagggacttggccacagtcccgttaagccgcaaccacagagtgtacagggtactggcgtgctgagccccaggcgtggggaaaggaaggcggcctctcaaggaacgttcaccccccacttttttggggggtgcgtgggagaaggaaagagtctattgaagcctcccattctctgtctcctaccctagggcgggtcagcgaggacgcagtctgtcctggggtcctatgggagggtgcggggaggctcgctcaaagccccaacgtacccaagtcacccttcacctggaaaggagtcggttgtttggaggtccccgccccgcggggaagggctccggatccgaccctggtaggtggggagcagcggaccagcccaaacgcggagccaatcccgccaaagcccttaattgcacgcatctaagatggccgcccccgcccggtagcggggcggaaacgagcccctctagcttgctagccgagcccacactctttggcgaaggccgccgaacttccggcagtaaattccgtggtttcccgccgccgcccgcgcatgcgtaacgaaactgccccacgagtcgggaaaagtggcgcttgcgcattagccgcaggggtgtgtcctagtggccacttggaaaggggtgggcagctggcaaaggggctagttagcgcctgcgtagtactaagctcaaggcagcgttttgagttgaagggtctggcgcgtctggaaagcgcctgcgtattcctttcactgggggtggtgtcaaagcgggaaggtgggcgtggcttcagggaacgcctgcgcgttgctcctccgaaggggtggggcgatccctgaactggagttagtgggcgtggcctcagaggcgcctgcgcggaggcggttggagggaggcccgattcccctttgttcgggttcgccattttgctaggcagcggcagtggcggcggcagcggcggctggagcctctgattgggtttcggagtccggtactggagccaatcagcgcgggcagcgaaccgggggagcgaggcacggtgagtgtgaggagccaatatccagcggcccagagccggccccagcgccccgattggcgggtctcgctgaccactcaggagaggcc

SEQ ID NO: 36130 - DNA, 2300 bp, Homo sapien
caaaactcacgttgatttaaaagttcttgcacccctccaaatttcttcttaaagaggacagctatcccagcgcccatgcgacaatcctcactgatacagtgggctaaagagtctgttttcgggcatgcaaaaaggtctcctttcacataagtgatctaaaaaatgtgcaaaggaaaagacaatgttttattagatacagtaaaatactaagctatttttctgtattttgtgtcccccacgactacctctcccggcaccccttcctccaatctgatttaaagccaaaccaattacagcatgtgtaaaaggaaagtaatggatgatccctgcctagaattttgagcctttttaaagtaaatcagctagagagaaaaaaagataatgcaatcattaatttaattaaaaagtgtttatgcttttgacctccattattacgaatttcagttcaccaataagtcaatagttgttacgcactctgcttccttctggatcttcattaaggctgctggccatgatactgagtcgctatttccagaatttaagtgtttcttcagctatgagaagggaaaaggaagtaaaaatgcttaggcagccttagtatataatattctgattgccctgtacaaccacttaataggcttttttccccaacgtttatcgatgaatgtgagtttgttcggcccctgggacgtaatacaaaacccttctggggcaaagaggaagaacgcttaggttcggaggctgtctcgacccgctctcatttcgtgctttcctggagcgccccgctccgtcagcggaagcaaagcccatccctaagacacgcctcctcctttctccagggccactccggagcaaggccgatttaggacggtctccttttctctgcacgacgcaaaagtatttccccagtgggtctggcttagaagaaaacagaagggacttggccacagtcccgttaagccgcaaccacagagtgtacagggtactggcgtgctgagccccaggcgtggggaaaggaaggcggcctctcaaggaacgttcaccccccacttttttggggggtgcgtgggagaaggaaagagtctattgaagcctcccattctctgtctcctaccctagggcgggtcagcgaggacgcagtctgtcctggggtcctatgggagggtgcggggaggctcgctcaaagccccaacgtacccaagtcacccttcacctggaaaggagtcggttgtttggaggtccccgccccgcggggaagggctccggatccgaccctggtaggtggggagcagcggaccagcccaaacgcggagccaatcccgccaaagcccttaattgcacgcatctaagatggccgcccccgcccggtagcggggcggaaacgagcccctctagcttgctagccgagcccacactctttggcgaaggccgccgaacttccggcagtaaattccgtggtttcccgccgccgcccgcgcatgcgtaacgaaactgccccacgagtcgggaaaagtggcgcttgcgcattagccgcaggggtgtgtcctagtggccacttggaaaggggtgggcagctggcaaaggggctagttagcgcctgcgtagtactaagctcaaggcagcgttttgagttgaagggtctggcgcgtctggaaagcgcctgcgtattcctttcactgggggtggtgtcaaagcgggaaggtgggcgtggcttcagggaacgcctgcgcgttgctcctccgaaggggtggggcgatccctgaactggagttagtgggcgtggcctcagaggcgcctgcgcggaggcggttggagggaggcccgattcccctttgttcgggttcgccattttgctaggcagcggcagtggcggcggcagcggcggctggagcctctgattgggtttcggagtccggtactggagccaatcagcgcgggcagcgaaccgggggagcgaggcacggtgagtgtgaggagccaatatccagcggcccagagccggccccagcgccccgattggcgggtctcgctgaccactcaggagaggcccaggcgcccgtcgagcccggggagtcgagctgagcctagccgagccgggcggccagcggccccggcccggggcctgcgagcgcctcggggcactcccggccgaggcctgcaggggccgccccgcgcggggatggcgcctcggggagcaggcacctcggggctccgaccctcgcagggtgccagggccagttgggaatgcgtccctgttccccgactcaggcccaggttctcaggccccaggcctggggcca

SEQ ID NO: 36131 - DNA, 2300 bp, Homo sapien
tgggctttcccccctaaactatcacaactactgcccacttccctatcccatcttcctgcctccaacagtgtaatttgattcctctgcacatgcttttcttctcttcgagcaagctcttccatctttcctgtggaagaattaccatcattcttcaaggccagtcaaaagtgcggtggtgataagcctttcacggaggctagctcacgcatggatacttcacagcaactgaacttggcccctttatagcactaaccgttaggtattaactacctgttcacctgtcaatttccatcaggtaggcacagttcttattgacctctacgtactccctccctaacacacggattatacctggcatatactaactgctggataattggttgccaacagcaacctctcaccctaaggaaaaccccacaacactgttagtttctaaacatctgctgagaaaacgttaacacaggacttgaaagtgtatcagaaaaacataaaccaagagatgagtggactgggtcaagcctgacacaaagtaacatagaaaggcgaaggcaaaaacaaagggaaaaaaaacccccaaaactgtactatattcccaagggagggagatttcacaaaatgagcagtggataagattagtaatatgaacagcaagttgtgcagcctccggaaagaatgcgcaagggtatcaatcttctaagagtgaggttccaggcaccgaatggactggtcttacagcccggacaagaaacggagaccgcttggttgggctccaagacggaggtgtgcggtcctgccactgcgaacggggcggggaagagaggaaatgacgagccaaaaggggtggtaacggcgccgggccggagacccgggcggagcgggctgggaggaggggcgcggcggagcagggggagtgggcgaactaacggccccctctccccaccagggagacagcgggggcgggcccatagggctccgaggcgtgggcgggccagccccgttgccagccgcacacgggaccccgcggccgcggcgcgcaccctccccaggcctccctcccgacctagaggggctgcagataagacagacccggctcgctgggagcggggagcggggggcgcgggccccggggaggcttcctgtcccaagggccggagagtggagagtgcaagggcaggtttaagtttgcggccagaacgaccaggaggaaatcgccgaggcccagggcgcgcatgtgtcccctagtgtagggccattcgtggccccaggcctggggcctgagaacctgggcctgagtcggggaacagggacgcattcccaactggccctggcaccctgcgagggtcggagccccgaggtgcctgctccccgaggcgccatccccgcgcggggcggcccctgcaggcctcggccgggagtgccccgaggcgctcgcaggccccgggccggggccgctggccgcccggctcggctaggctcagctcgactccccgggctcgacgggcgcctgggcctctcctgagtggtcagcgagacccgccaatcggggcgctggggccggctctgggccgctggatattggctcctcacactcaccgtgcctcgctcccccggttcgctgcccgcgctgattggctccagtaccggactccgaaacccaatcagaggctccagccgccgctgccgccgccactgccgctgcctagcaaaatggcgaacccgaacaaaggggaatcgggcctccctccaaccgcctccgcgcaggcgcctctgaggccacgcccactaactccagttcagggatcgccccaccccttcggaggagcaacgcgcaggcgttccctgaagccacgcccaccttcccgctttgacaccacccccagtgaaaggaatacgcaggcgctttccagacgcgccagacccttcaactcaaaacgctgccttgagcttagtactacgcaggcgctaactagcccctttgccagctgcccacccctttccaagtggccactaggacacacccctgcggctaatgcgcaagcgccacttttcccgactcgtggggcagtttcgttacgcatgcgcgggcggcggcgggaaaccacggaatttactgccggaagttcggcggccttcgccaaagagtgtgggctcggctagcaagctagaggggctcgtttccgccccgctaccgggcgggggcggccatcttagatgcgtgcaattaagggctttggcgggattggctccgcgtttgggctggtccgctgctccccacctaccagggtcggatccggagccct

SEQ ID NO: 36132 - DNA, 2300 bp, Homo sapien
tgtgacagcatttggggaactaaaagattcatgtgtttcagcctagtgggagagagtgggggagaggaagagagagagagagcatgtatacccgtatgttatcatagagcacgattctccagtggatggatacctggaatggatcattaagatgaagagagtaattcacatttactctagaacctttaacaagcactgaaaggaagaagcctgagatttgatccttgacaatttctggaaagcactggtcagtcacactgtcctggacagagtccaagttacccactaaagcttgaggtggatgttggcttcactcctgcagcacaatgctggccctagaaagcgagcattttcattcttcccatggcagctgattctttggtgccagttttcatgttttctccataggccttgtgcagaaaggttttctcattgcatccatactgtgagaataaactgcagactgaaagaaacatgcctgcagggtcaggaactgggccactgttcccagaacgggttgtgcctcagaaatctatttctcttttagatgttgaaccctgagagaactaagatgatatttcagaagagttggctgccttctctggaaacaaggaaaacccaataattccgaggaacattgggggttaaataccaagaataaaaattggttcttctttgacttcagcttaactgtattaagacagaaattaagccctctaaaaacaccacaaagagagatgattgtaatgatagaaatagaggtacagagctatgcaaaggaaacaggaagtgaaatattcctagtcccagggatctggtaatcgctcctggcttccagatgtcaaaggactgatcctttggtaagctcactagaaacttctagctctacaagagtttgggatattaatgttattcagtaagtcccaagtttttcagagaatagattactaacaatgaggaatttatattccttggttaatttaggagtctaagatgcagagttcagaaagaaattactcagacctaactttgagtgcttaagctgccaacagttagaagatgctatttatttgtgtctgtaagtttgtacatagtaatgccagccttgttgctgaattttttatttggggggagatgactttgaattttgtttgaaatgcttcagttgtcattttgtcattgcatttcaaatagctcatgacccttttcttgtggtcactttggcacaccatagtagcccacaaagtgggggcagggtattgacatttggattttttctttgatactagttcttttattcatttttatttgtgactgtagtgataactttacagatggagaaagagtgaatggatgaatgaataattggtttaatgcctagttatgcaacttgagtgcttttttttttttttgcaggataattttaagtgtatatattttaactgcactggtacattgaacatgtcagtgtcgatgccactggaccaacagagcattttgtggctatagggtgcctgataataatgtcttgatttttctttgggattcaactatatcgaaggtttttcccccagcagtatgggggcgtacaggtgatcgatcattaatgtcattgcaattgttattttttaaaataaatttataaaaataaccgaaaagtaatgtgacttttgaggaatctgcaactcctgggttctagtttgtgtttccagtgttgaaattttgatctcccccgacaagacttgtctgcatggacggtgtctctgtaaacagtatcaaacttgtaatgtctgagcctcttagctttatctccccttaatttcttcccttttggcccttccaccctgttgaggagattttttctgtcacctgcaggctgatcatacatttgatgctactactgaaagtgtttatcaaaatgtgatgaagtaattccatgaggaaaattagccgttatcacaaaaacagccttaagtattgtagaatttcaggtagtgaagatgtactatttacgttttgttagattttgttttggcagaagaccaaaacaaaagtacttttctgattgttaaaaatccacagcatgctcaccttgttactgttttaccttacggtcgctgggaatctaagcaacaaagactagaagcctccgatatgccattatcaacacacaagagacaaacagcccgaggaagcactcaatgatgagagcagtagacctgccctggcagatgagagaggagaaactctccacaatgaaggaaaagcactgacagtatttgatagctttagtcaaactg

SEQ ID NO: 36133 - DNA, 2300 bp, Homo sapien
agttccttttataagcagcccaagaggtagggctaggaaattacgatttataaacatgaaagtccagaaaaaagaattgtacactattgatgagaaggatgacttgaggatttggatgggggatgggagaagggaggaaattaggagaggaataaagggtagaagtatgtataaaagcagaaggcatcccagagctgtgatgtaatagaagcaagagctgttataaggtgaacaggaatagtgattagttgtaagataccgattggtacagagaatgttgttagtttataagagaaaattagagaacaggcagacaggtggggtaaaacactttaaaccatggtacactccagtcatcttcatcctttaggtttttttttttttttgactaaattattatatttttgtgcctttaaaactacagtcactgagaatggtgctttcctcagtcatagcctgttttctttatagccaatgccatgaaatccataatgtatagtatttctcctgccaactctgaggaaggccaggaactttatgtctgcacagtcaaggatgatgtgaacttggatacagtacttctcctaccctttttgaaaggtaagtcccttgaagacttcaagtgaaccaattacagatatcattgcaattagtgatttggtgagtagttgagtataggtctctcattatcattctggcttcatttcttctaaaaaagaaatccaccttctagaaataagttctggcattgcctgaagagctctttgaagacttgtaatgctacttgagtaaggttttacttaagcgagcttattgttctctttggggctgactgatgacctggaaaagttttccaattatttaatacaaaataggtcgtgagtttccctttgtgcatattcttgttccagagtagacagtaagcaaagaagatgatgttgctaagatttaagaaaatccatggtgttagtgaagatacaatgttatgcacatagcaagagtttaataaaaaaagagtgcaaagtagaatgactgatgccataaagaataatgaaactatcagaatcaggtaggcatagttggagaggggatgttcttcttagaaatgaatttttcttattttaatatttaattcaagtgtttggtgggcaaggtactaatactaagccttcttgaggaatattgtaatgaacagcataccttcaagtaaagtatggtcttgttgagaaaataagacacacacatgaaacagcagttcaggacaccatggtagttaagggccagggctctagagtcagaaaaccctgggcaccatgggctcctgcactaaccaactatggaactttgaataagttagtcaacttctcactcatcagtcaaatgaggataataatagtccctacctcttggggctagttgaggattaaattaaataaattatggcacataataaatattccatgactgttagctattatattataagctttttactctgaaggttttaggttcaactagacagtttacactgatagaactatgatagaccatacttaacaatggcttttcttactcagaaggaaatacaggatgctaacaggacaacagcaggtacttttcttcagtgagagtttttacaggagtttacatagcactccaggggctattctctggaacctcaagtaatagctcagctgtgaggaatgaaaccatgactcatgggtgcttagaggcctcatggaccaactgaaggccatatctcttataatggcccgaacaggcatcactttcaggctctgcaagaggcatgaccttttacaagaattattatacccaaggaagcccaaatctgtggcttgccaccagttcattcagttttcccagtccaaattcagtttcccaagcagaggttgttcttagcataagcaaagaagtttggctaagtggagaagggaggattgaggtgggagcagtagacaggggtagatgaaaagttttcatctttatttaaaaaaaaaactgtacacattttcaacatgatatattctagatttgtagaaatcttgttcactgctgattgactgattgattgattttggcagaaatagcagtaagccaactggatcaactgagcccagaggaacagttgctggtcaagtgtgctgcaatcattggtcactccttccatatagatttgctgcagcacctcctgcctggctgggataaaaataagctacttcaggtcttgagagctcttgtggatatacatgtgctctgctggtctgacaagagccaagagc

SEQ ID NO: 36134 - DNA, 2300 bp, Homo sapien
gtggtttgtagttctccttgaagaggtccttcacgtcccttgtaagttggattcctaggtattttattctctttgaagcaattgtgaatgggagttcactcatgatttggctctttgtctgttattggtgtataagaatgcttgtgatttttgtacattgattttgtatcctgagactttgctgaagttgcttatcagcttaaggagattttgggctgagacaatggggttttctagatatacaatcatgtcatctgcaaacagggacaatttgacttcctcttttcctaattgaataccctttatttccttctcctgcctaattgccctggccagaacttccaacactatgttgaataggagtggtgagagagggcatccctgtcttgtgccagttttcaaagggaatgcttccagtttttgcccattcagtatgatattggctgtgggtttgtcatagatagctcttattattttgagatacgtcccatcaatacctaatttactgagagtttttagcatgaagggttgttgaattttgtcaaaggccttttctgcatctattgagataatcatgtggtttttgtctttggttctgtttatatgctggattacatttattgatttgtgtatattgaaccagccttgcatcccagggatgaagcccacttgatcatggtggataagctttttgatgtgctgctggattcggtttgccagtattttattgaggatttttgcatcaatgttcatcaaggataatggttgagaaaaacttttttaaaatacctttttttttgagatggagtctccctctgtcacccgggctggagtgcagtggcaccatctcggctcactacaacctccacctcccaggttcaagcaattctcctgcctcagcctcccaagtagctagaattacaggcatatgccaccacgcctggctaatttttgtatttttcgtatacatgaggtttcaccgtgttggccaggctgacctcaaactcctgacctcaggtgatccgccagcttcagcctcccaaagtgctgggattataggcgtgagccatcacacccagcattttaatagcttttaagtgcattttatatgtagcatatttatttccagctataaatttgtcttgttaattattttagcccagatgatattaaaatgaatatacatttcctaaccatgtacctcctgggtctctaatgcttatcagtgttcaatgtccctacctggagttcaccagccactctatatacagttttccatcccacttatctaacttgatttcttattgttttcaaacaaaaatctattccacatgaaccactcccacactaacctgtgtgtctttgctcacacaattctcccttgttaaatgctgagtgacctccacatctctctacctattaatatgttgaccatccttcaaggccctcctcagtctccacttttttagatcattataactcagagagatctgacttttgagctcagcgtgcctgtgaaaagtacactagatcagtagtcagagtggtaagctctagttttggtttggcttctcaatagctacgaagctatatgtaatctctctgagcctcaatgacctaaaagaggtaatttttgcctgcctgaatgacagggttgttgtaggattagatgatgatatataaaataatattaaaatgtggtattagaaaattcaaaaatgctaacagaaaaaatgtattattattgctttgtatcatttttatgttttatttaatatttagttgttatttaactattcaagtgtggtatttccccatttagattgaggtatttagattggctttcagcttttaaaaattcctaatagagctttgcagttacagctgtagtccctgacttttaaaattttatggagtaatggaggagaaggataggcaaataattaatgaatgatacaggaagacttcctggaaaaagtgactttgagacccggtaatgccccagtaaaggtggccactctcagtttttcattttctttccacaaagaacagaggaagagttcctagatcaagtgaagaggaagctggctcagaccagccctgagaaagacctgttgaccacaaagccttgtcactgtaaggatatcctgaagttagtgctcttacccctcacccagcattgcttggtcgttggagaaaccacctgtgcattttattacctgctggaggctgcggctgcctgcttggacctgtcagataattatatggtgagcaggctctgtaatctgcccttcagctga

SEQ ID NO: 36135 - DNA, 2300 bp, Homo sapien
aaaattagtcaggcatgtggtgcatgcctatagtcccagctacttgggaggctgaggcagagaattgcttgaatctaggaggccaaggttgcagtgagccaagattgcgccactgcactcccgcctgggtgacagagtgagactgtctcaaaagaaaaaaaaaaaagaaagaaataacattgtgaaggtccttggccaggtgactggcacatagtaggtcctcaataaacactggtttccttcatctaacgcccagcaacatgatgtctccatgaaggccaggatcttgcctggtcacctctgtctcagcacccagcagtggaccatattcaacacttagtccagtgttgaatacagttcacctcttcacacaacacgcctgggtggcttgttagtatgaaaataactttcttataaggaaatcaaagaaagcctgatatgcattggcaagacagacataagcacatcaccaactagggtgacccgtcctggtttgttcaggactttttcagtttttgcacagaaagtcccaagaaacccctcaatcccaagcaaaaacgggaagttggtcacccaatctcccacttccacaaggcccagcttaacacattaactgattttctcatgctcctgctcccagtttcccattcctcactcccttgttcccaaaggaaggaaggaaaaagaggaaaaaaggtgagacgggaggagatgggagtgagggagaatggcctttccaggcccttttctaggtcttaccctccagattagggcaatacgcccctcccacccatccccagctgctgtagtctctctgaccactggtgcttcccctgtgtctgaggtcagatagtttattaggtttattactcacactttgtcccagttcctcgagcccaattccacagggcaacatgaatgagagccaggtgcctcctgtgcaggcagtgagtttggatcacaggagagaaacccccaaattaggagacttggagtttatatagagaatctggtatatcttcctctctggaagagagagagagagagagagagagagagagaaacgtttactctggaatgtaaatctccggtgaagaagaggaagaatgcgagcaaatctctggacgttgcactcaaggtatgtttgctattcaatcacccttcagcaaaacttggccaataccctttgcacagaaggactagaacatgcagcaatgtgaaaatatttgtgaagaattgtcttccaacagagaagatagagcattcatgaaacaaaaatagtatgccagaatttaaaaatgctcaaagaataaggaatatcttgtcttgtaaattaaaaatattaaaaaataacattttaaaagacaaaaatagaaggatggaagaaaatgaggaaatctccttgaaggcagaacaaaagagacaaaaagatggaaaatgagatagaaaagatatgaaaatgagatgaacacacgacattcaataaccaactagttaaggaattgcagaaaaatggaaggggagaagaaaatggacatgtaattatcaaagtaagaatttgtttcccagaactgaagaatgtggatccagatggaagggttctatagtgtccaggacaataaatgaagaaagacccagtccagggcacaggatcaaggtgaaacttcctgtttgaggttgtactgcatacaacctcctaaaagcttgggtggtcgtggggcactcccaaagaattgagagcaagaatggcattgagtgaggtgcagggcactctaccttcctccttcatagctgtgcaccctcagattctgtattaggaagatcctgaagatcatctttcctcttcctctcctgtcctccaattgtcacaatcctcccatctcaccccttagccgggccccagcccctgcaggcttctagctttcttcgggtcttctcatcctgtcttgcccacccttaccctcagggcagttcctgagcactgagccaaccagggcttggaagaactccctttccccacccctggaggtgcccatcatttcctttctcccaccccaagtgactttctgaggcagatgtttcctgccctcaggcgaatgctgcatcagtgcccaggcaagcccaggagttgacatttctctgcccagccatgggcctcaccctgctcttgctgctgctcctgggactagaaggtaaggttcaggaggagctgcagctctgggccccatatgctcagccccatgtccaggagtaacgtgttattgtgaatgccacacccataccagcagctgggctgggag

SEQ ID NO: 36136 - DNA, 2300 bp, Homo sapien
aactaatactttgctgaagaaggtacagatggcaataaacaacaaaaagatgtccaatatcgttactcactagaaaaatacaagttaaaattgaaggagatatcaccttaaacctattagaaaggctttttaaaacctgacaatattaactgttgacaaggatgtaaaaatggtacagcctctttggaaaagactttggcagcttttatagacttaaacatacacttacatgtgacccagcagtcccattcttaggattttatccaagggtaatagaaacatatgtccacacaaaacatatgtacatgaatgtttatagtggcttcatttataattgtcccaaactggaaacaacccaaatatccatcagcgggtgaatgaatacgctacttgtggttcaaccatagaatgaaagatggtttagcaataaaaaggaatacattcttgagaagtgaaacttcacgcatgctgaatttattctgatgagtgaataaagactgacccaagaggctacatactatttaattccatgtctatgacattttaggaagggcaggaagctacagaaacagatgtcagcttagtagttgccaggccctggattggagagaaagagactggctaaaatgggcacaaaggctctcgcttaagctaaatgaaactttctatattatggtattgtgttacacagacatggtgattgtggtggttgttatagagatgcatgagtttgtcaacatttacacaactagacatttaaaaggggtaaatttttgtatatgtaaattatgggccaataaacctgacttctagaaaaagaccctagaagagtacctacagagtgatcttcaggcagcctcagacttcagcccccaggcccttggggcaaggccgggcagttggccctttgagtggaggcctgtcttctcctcactatgaattccccatctccaagcacattccctgtccgtaagttagatgcacagtaaatatgagtaaataaatgaataaaagaacaaataagtgagtgtttgcaggaaactaaagtagaccctgataatctacaggctcctgcaggcttctccagcctcttctgccactcccagcacaactccatttcccactcctagaattgactcaagcctcctccatccaatccccgactcactgggccatttcacacttttgtgcctttgcacacgtgggtccctgtgcttggatcaccatgggaacctgtacgtgtagaaaaacacacccctacccccagaactctgagaaatatcctgtcctgtcctgtaggataggatgatcaggagttcaagcatgtgtgtgcacaaaataaacaccagtgtgagcatgtgtgcacaggagacacccaacagttccaagaaggctaaacttgggcagaaaattccaggtgggagagaaaattttctgtcttatggacagcccatttcccttttcccttctaactaggataatggtaatagttagtatttgttgaatgctgtgtgtcaggccctactggaaagcactttacctgtaggaacccatatggtgctcctgataaccctttgcactatcattattcccactgtatagatcagggaacagacacaggtaggttttggatgtgtggttacacacccagaaagtcaggaagtctggctccagagctgtgtacttaactgctgccacactacaggaatgacagccctggggggatgaactaagaggtgctggatgagggtcctggcctctaaaggcacagctgttctccaactcttgcaaggctgaaaccagaagatggcgggcattgcagctggtggagggtctgaatacagctgtgaggatagtgatccctgggctaggctctgcaaggaaactgagcagtgcagggccttaccagccccaaccatctgggggccaccctggctggcaccagcaggagggtgggctggcttctcagaggtctgggagactcagcctccttctgccagggctgcagtggccgactcctcctcccctctgtccccaccctgcaccgcctccagaccccagtcctgactattgcttaatccccaggagcccagttcctgtgggcagcgcctgacatgcctgatcctctcttttctgcagttcaagggaaagacgagatcttgcacaaggcactctgcttctgcccttggctggggaagggtggcatggagcctctccggctgctcatcttactctttgtcacaggtaggatcccctccgtgccctgtgatgccttctctccctcactttgagcatgtggt

SEQ ID NO: 36137 - DNA, 2300 bp, Homo sapien
tcgatcagcgaatgaatgtttgattctttctaccctcatcagcacagtgatcccaagggtcacactttagacgatgattggctcagtgctgggcgcactgtatcagtttcatagaatcatggattccaagcgcataaagtccccacaagagataaatcccccactcctgaagcaacttactgttctgatgggggaagggatggaggaacttactgtgtgtgctggggaggggagatggcccctgaactcagggagctcaggaagttctgaggactgggtgagaaacattgaaaaaggaagggtgaataaggaaaacaaaacacgtctgtgagctgagaggtctcaagtgacaatcgtgtctcattcctacgcccccagtgcctacctagccccatgcatagcaatgaggttgtgggaatgaacaaatgaatgaatgaattaatgagtgagtgaatgagttgagagactacaaaagcttagggtcagccgagatagacttctttgcttggagcttggggcttcaaggtcaatttaagattgtggccatgcaagcttgaggactttttgctctgagtcctgttaaaattaatgaaaatggagaccaggcctgaagagtccctgagcaaaaattaaaaaaacagttaggcctcataagtgacctcaactttgcttgatttgcaaatatcagtgaaacttaacacgagctatttcttgtaaatgtgtatattaaggaaaaatagaacttaagctcaaccaatcaaaagaaacttatataattaactagggtctttccaacaggataggccaaataagggaactatataactataactaattaaatattttcttcagtttacttgtcctgtaggagtcttccccttgcattcccccagtggagctcctcaacctcttctgtttggagctgcctgattcatgaattgttgtttgctgaaataatctgtttaaaattttattgtgcctcagtttaccttttgacagtcccatctaaggagtagaaacatggcactagtgagtagggggagcatacataatcacgggagtccagctgggtccccacacactgaaggagcagatgacacaggtaccggacatcaaaaattgatgcttctgattctaggccttggggtaagtgaagggtgtggtcttgggcctagtgctgggtcatttccactggagctggtggctgtacaggcgagatagcattgagcaggaggaagtggagggcacttgcctgcgtgctgacgtaggctggaggcaggggaggaagggggtcttgagatgaggtgggtgaggggaagtactgcggaggctgtaggaagcctgcacgagggactaggagtctagagggagctgatggtgagtagagtcgacaggaggagaggcagggagagggacagagagaggagacgtatggatagggaaaaggagaggctgctggggtgtgtgtgagactgtgtgcatgggcgtgtgtgtgtgtgtgtgaaagtgaataaaagacaaagtgagactgtgagtgtgagtgcatgtgcatgcacacctgtgtgtgagagtacaggaacccctccctcaacccaaaatttatgccctgagtcttaacaatttgcatttttcccgcttgacaaaagtaagatttcaagtgagcctgtaagaggttatttgcaacagtgaacacaagtgactgttctgagcagccaggagcctgggagagagagagaggaaggaacagaaagaatctgcaatgaatgaatgaatgagagtttataagaacttccctgtgaatgtatatatgtaagaaactagggtctgagatgctccatctcagcctaagagcccgcacccctgggtctctgagcccagaagattccaggaaggtctatacctgacgttccagaagcctcaccccagcccccttgctggatcctagggaccagtttctgggggaggttggggagggcggggagccctctgactgtgagtcctcccggcttggggccccagactgggtggagcagccacacctgcctgaagttccgaggaaaagggcggaaacagctgccagcaccgccctcataataggctcaatgaatccctgcggttggctgggggcagtgggtcccacactgcctcacttccctaaatgggcagcttcacttttagaaccccgggtccttccctggcaggcccaggtggcacatcctgtgtcgggtgggccctcaccttggatctccaggcctgacactgcccagctggatggaaccatggccccagccttcctgctg

SEQ ID NO: 36138 - DNA, 2300 bp, Homo sapien
aaaatgatcatgctacatggaaatagaaaaataacctaaaaattcatgtggaaccataaaagaacccaaattagcaaaagctatttcgagcaaaaacaacaaagctgaattttcagatttcaaaatatactacaaaactatagtgaccaaaaaagcatggcactgacataaacacagacatatagactaatggaacagaatagagaacaaataaattaattcatgtatatacagccaactgatttttaagaacagcatcatgaacttgttttaggagaagggcaatctcttcaattaatagtcctggcaaaactggatattaatatgcagaagaataaatctagatttccatctctcaccctatccaaaaatcaattcaaatggattaaagaccaaagtgtaagttctgaaactatacaactgctagaaaaaaagaagaaactcttcaagataatgatttgtaaaaaaagattgtatgataagacttcaaaagcacagcatgaaaagcaaaaataaacaaaggggatcataacaaaatacaaaacttctgcacagcaaaggaaacaagcaacgaagtggaaagacaacctacagaatgaaagaaaatatttgcaaactactcatctgacaggggaataatatccagaatatacatggagctcaaaaatctcaacagcaaaaccccaaaaaatccagtttaaaaatgtggaaatgatctgcacagacatttcatatatatatatatacacatatatacgcatatatatgtacatttcgtatatacgcatatatgtacatttcgtatatacgcatatatatgtacatttcgtatatacgcatatatatgtacatttcgtatatacgcatatatatgtacatttcgtatatacgcatatatatgtatatatatataccaaaatgtcaatttttattattattggtgtcctgtctgaaaggcagatttagctgcataaactacccaagtctccaccctcctgacataggtatatcatagcttttggttaagtccatatgcatcattcacaatcttttactagtatttttggggggttatcccttaatattcttcttattattattgtactttaagttctgggatacatgtgcagaacttgtagatttgttacataggtatacgcgtgccatggtggtttgctgcattcatcaacccgtcatctacattaggtatttctcctaaagctatccctcccctagccccgcaacccctgacaggccccagtgtgtgatgttcccctccccgtgtccatgtgttctcattgtacaactcccacttatgaatgagaacatgtggtgtttggttttctgttcctgtgttagtttgctgagaatgatggcttccagcttcatccaagtccctgcaaagaacatgaactcatcctttttttggtgcatagtattccatggtgtgtatgtgccacattttctttatccagtctatcattgatagacatttgggttggttccaagtctttgctactgcgaacagtgctgcaataaacatacgtgtgcatgtgtctttatagtagaatgatttataatcctacatttatgcagccaacaaacataagaaaaaaagctcatcatcattgatcattagagaaatgcaaatcaaaaccacaatgagatatcatctcatgccggttagaatggcaatcattaaaaagtcaggaaacaacagatgctggagaggatgtggagaaataggaacacttttacactgttggtgggagtgtaaatgagtccaaccattgtggaagacagtgtggcaattcctcaaggatctagaaccagaaataccatttgacccagcaatcccttttactagtgtttttacaagtgtttttcacagctgaactatgaagattggtggattacattttattttttgtcattatttggtttccttaaaaaaaaaccttttagtttcaggtgttcatgtgcagggtttttagttaggtaaattgtgtgtcatgcatctctccagagctctgacctgggtttctttctgcaggttcctgggtaaagggcgctgtgcctgaagaacttcacaaacactaaggacagaccctcttcctgcaatgccagtactcacccaagagagggtcctatcagcccaaatcctggtgtcagcagacatcgccaagtcggtgtaccttacttgtcaccagctccaagccccagacagcagttcagaagtctcattacacaatctgggacaagccaaatgctagcatcttcaaaatcaccatgattcagct

SEQ ID NO: 36139 - DNA, 2300 bp, Homo sapien
atatagtccaatagtatgctacatttctcacaattaatgagttgatattgatacattactataattttacaaaattgatgagtagaactcatatatttataatgcgtggtaggatagtttgatgtgtgtattaactgtgaaattactaaatcaagcaataccacatatacttacttgttttgtggtgagaacatttaaaatctattttctgtcattttcaattgtacaattcatagttatgaactgcactcaccatactgtgcaatagatctcttgaacttattttttctgtctaacatattgtgtttcttcaacaatacctacccagtttgtccaattcccagcctctggtaatgccattctactctgtttctgtggtagattttattaattgaagtccttacttcattcagattaccctggcttttacctcatgtactttctgtgctccaggatcccacctaggaagccacattgcttttagtcttcatgtctgcttaggctcctcttattcatagcagtttctgagaattatttcttagttttgatggccttgacagttttgaggaacgctgctcaggtattttgtagaatgtccctcatgtggaatttgtttgatgtttttctcctggggccagcggctttggggaaggagactgcacagctaattgccctgtcatcacatcaagtcaatgacacattctaacaacctgagttatccctgtgggtctgcactttggttgcctggctgccacagtaagtgtcaggtttctccactgtacagttactcttctcttccttcccatgctatcctctggaggaaagtcacctgcacagcccatgcttaagccgtgggaatttatgcttctgccttgagggcagaatacctataagaattgtttgcaatctctctcagtcccttcaggctgctatgagaagatgccttagactggagactttctaaataatagaaatctctttctcaaagttctggagtctgggaagtcaaagatcaaggtgtcagtggatgtggtatctgctgagggctgctctctgcttccaaggtggtgctttcttgcagtaacctcagttgactgaaggcatgaacactgtcctcatatggcagacagcgcaaatctgcttcctgcaatctctggtataagggcattaattgcattcttgaggatgacgccctcatgacttaagattttcccacaagatcccacctcttaacgctatcacatggaaattaagtttgaatatatgagatgggggaacaacattctgaacacagcagaatccttatgcatgggatatttgtctattcccccccccagttctttattcagtcatttacttacatcagcatggactcctagagatttaatatatacattgggtagtaatccagtaccacttggttttgttgctagatagttctcacttcggccattttctttttctgtacattttacacacgcgttgttctttcatccactgatgtattcatccaacaagcactgattgagatgatcccaagctaccataactgatccactcctacctgccttcccctccaactttccctgaccagcactctctttcctccctgctttcctggccccaccatttccagggaacatcttgtaattcctgggattaaaatctgccctctacaaaatgtctcagggtcaaaactcatcatcaacccaccatggctagaccagaaggattcaggggtctggtcgtgcctccaagggccctgaccacctataggaagtgcacagagagaaggaaagagggatgaccccagctttattcaccagctttattcttggccatgctgagagctgcccctagcaatagaggagcagtatgactggctggaaggcataaagcagcagacatggggagaagttcagtgaaaggcggcagagcaacacagcagggctgaggtgcccaggcccagagacagaccctgtagctggtggcccctttcaaggcctggctgcccctcctcccctggtctgcagagcccgccctcccaggccgaccatttccccagcaagacattgacttcctcaattttaccagctgagagacactgggaacctggggcagaatcagacccagcgtctgactcctcctgagagggctcccttttttctcctctcctccgctgtcagaaacagatctgggctggaatggcctggggtggggtccacacctgctgcttccacctgtgctgctgctgctcctggcctcaggtgacatggagggaaagagtgcagggggtgtaa

SEQ ID NO: 36140 - DNA, 2300 bp, Homo sapien
gggccagcggctttggggaaggagactgcacagctaattgccctgtcatcacatcaagtcaatgacacattctaacaacctgagttatccctgtgggtctgcactttggttgcctggctgccacagtaagtgtcaggtttctccactgtacagttactcttctcttccttcccatgctatcctctggaggaaagtcacctgcacagcccatgcttaagccgtgggaatttatgcttctgccttgagggcagaatacctataagaattgtttgcaatctctctcagtcccttcaggctgctatgagaagatgccttagactggagactttctaaataatagaaatctctttctcaaagttctggagtctgggaagtcaaagatcaaggtgtcagtggatgtggtatctgctgagggctgctctctgcttccaaggtggtgctttcttgcagtaacctcagttgactgaaggcatgaacactgtcctcatatggcagacagcgcaaatctgcttcctgcaatctctggtataagggcattaattgcattcttgaggatgacgccctcatgacttaagattttcccacaagatcccacctcttaacgctatcacatggaaattaagtttgaatatatgagatgggggaacaacattctgaacacagcagaatccttatgcatgggatatttgtctattcccccccccagttctttattcagtcatttacttacatcagcatggactcctagagatttaatatatacattgggtagtaatccagtaccacttggttttgttgctagatagttctcacttcggccattttctttttctgtacattttacacacgcgttgttctttcatccactgatgtattcatccaacaagcactgattgagatgatcccaagctaccataactgatccactcctacctgccttcccctccaactttccctgaccagcactctctttcctccctgctttcctggccccaccatttccagggaacatcttgtaattcctgggattaaaatctgccctctacaaaatgtctcagggtcaaaactcatcatcaacccaccatggctagaccagaaggattcaggggtctggtcgtgcctccaagggccctgaccacctataggaagtgcacagagagaaggaaagagggatgaccccagctttattcaccagctttattcttggccatgctgagagctgcccctagcaatagaggagcagtatgactggctggaaggcataaagcagcagacatggggagaagttcagtgaaaggcggcagagcaacacagcagggctgaggtgcccaggcccagagacagaccctgtagctggtggcccctttcaaggcctggctgcccctcctcccctggtctgcagagcccgccctcccaggccgaccatttccccagcaagacattgacttcctcaattttaccagctgagagacactgggaacctggggcagaatcagacccagcgtctgactcctcctgagagggctcccttttttctcctctcctccgctgtcagaaacagatctgggctggaatggcctggggtggggtccacacctgctgcttccacctgtgctgctgctgctcctggcctcaggtgacatggagggaaagagtgcagggggtgtaaggagtgggatgaagaatgagtggggcagggagcagcatggctgtgtgaccataggacagaatttaggggccctcttccatgtgtgggcatcagaactagttccccctccccttccccagcctgtgatgggggaggttgggtcccttcagagctctgacctgggtttctttctgccggttcctgggtaaagggtgctgtgcctgaagaacttcacaaacacccaggacagaccctcctcctgcaatgccagtactcacccaagagagggccctatcagcccaaatcctggtgtcagcagacatctccaagtcggtgtaccttacttgtcaccagctccaagccctggacagcagttcagaagtctcattacacaatctgggacaagcccaatgctggcttcttcaacatcaccatgattcagctgacacagaatgactcgggattctactggtgtggaatctacaacgcttccgaaaacatcatcactgttcttagaaatatcagcctggtggtgtctccaggtgagctcttttcttgaggaaatacctctgtgccaccccccagggacctgaaggaaatgtcatgcaccccctcccatgcctctatcatcccccatcctgccaggtattct

SEQ ID NO: 36141 - DNA, 2300 bp, Homo sapien
atggagagggggcctccggagagcaaagggccctctgttccccttcctaatattaataggctataccatacagcctaggtgtacagtaggctgtgccatgttaagttcgtgtaagtgcactccatgatgttcctgcaacacaaaatcacctagcaacacatttctcagaatgtatctgtcattaagtgacacgtgactatttgcactgttgacctcaagtacacaaatagatcagacaagtggagaaagacctcattctacttcattctaatttaaatgcaggtgctgtccgtagttaggaaaatgtgaaggagcaatcagcctccagtgatattcaagtctaattaaaaattcttcttggactgtttagttcaaagctccctcttaatcttccaggagcttaatcctccacacaaagtatatgaagacacaaaaatgtagaaagtatgtgaaatagctattatttaagtgtggaatattaattttgttgtaaggaggggatttattcactgaaataaactttattaatttgactcatcgccacagaagtcacgtaggctcctctctgagtcagaaaatgtcaagagctttctgtctatttttcctctttagggactgcttgagtacagcaaaaggaggggccagcagatttcagttcaagcatgtttgaagcctgttttccgacattatttgtagaacaaaaaataaacatagtaaaatctccactacaaatgatctctataaagtgtaataacatgatttaagtttatgtattattttctatattttataaattgctgcattgaacagctttaataaaaaaaattaaagttagccttgaaaatttttttggttgttgtttgttttaatttacagacatgatagtaccttttagctgttcctatacttgagtagcaatcaatttgggtgtaaaatattagggtcataatgttctttatacctcatcccactctctcatggtatttgttactcagagaagaaatctgagtcctgattatttcaattcctttgaagaaaccaagttatttttttgtttatttagcagtaggaatctttttatttaaatttaaaaattttcacctggaaacttcctattctaggtctcactttgtgaattttttccttgcccatgttgaactctcaacctccaattttagatttcttctcagacctggaaagcatattttttaagataaaatttttaatcttgcttgtgatccaccattccattttatgctttaaggacatctctgatttgtagattggaattctgtgatttgtcctcccttaaatttctgagctcttctaaatgtctttattcatttcacatttgggaatatttctgaagtgaatcctctccattattgatttgattttcacactgtcaaatctgtcttttcttgcttctagtacaaaacctgctggattttttcttcttgcttcagcgtcttgaaccaagtttcctttttaaatctaagtctgttcttgttgggtggtggcagtgtcctctcaaattgtttctggggtccctacacccccgtgagctcccaggccatgtctgtggcaatgctgaaggacaaatgcagggtgtggccctcctggtgatgaagaggaggtgcaccccaggtcaccagaagccaagagaacccacggggctgagcagggcaggatgaagcaacatgttctcacaaaaaccctgaagatgagatacgattgtcgcagcctctccctatgtgggcctgactctcttcactacactaaactggatgtgaatggagagggggcctctggagagcaaagggccctctgttccccttcctaatatgaatgccttactttgatttacattcaagtatcattctcccttagattttgtaaggttgaaaggtaattgtcattattaccacagaaaggaaaactggagttcaaagaaacttaactgagaagtgagtcttggtctctgtattattgtgttgatgtcaggagtcagagcaactggtgatgaaacagaacccaaactcagtgactcccaggaatggcctcatatcctgttgtgcaactttccgaagcctctaggtcattgtggtgccttgtagctgtcccgggagccctcagcagcagttggagctggtgcacaggaaggatgaggaagaccaggctctgggggctgctgtggatgctctttgtctcaggtaagacaaggaagaggactgagcaggggaggcgtttggtccaggatctcggggagcccttttctgttgaagcttcagagcacaggg

SEQ ID NO: 36142 - DNA, 2300 bp, Homo sapien
tgacaagggctgttgtgggtccccagggagcagggccagtcccagcctggatgaggggctgcctaagcccaggcttccctgcccccaggtcccagatgccagaggaagctgagcgtgcagatggttccagcaggggcctccccctagggtgctcaaggccccaagtctatgtggagggtgcccaccccactcacacaggtggggaagccacaacacagagagaggggcagattccccgctttgagagctcctgtcccctggggagagacgacacactctgacacagcagagaacgatacagagctggctgcaggctgaagagacacacagctagtggcacatagcaaggggtgctcttgtaagctacaagaaggagctgtcacttagagtcagcaggggtcagagaaggggaaagtcagcatgggaacacagttgctgacacacacacacacacacacacacacacacacacacacacggtgacgtgcctcggtgccatctgaggacagggccgccttcctccccctcgggaggatgcccccaccctgatttggtatgtaattatgttcagggagaagctgggccccactgtcggcgaggaaaccccctaaaagctcacctccgcctgtgtgtgcaattcagtgggagcctctttctcacccctggtttcctgtcatgtctgtgggtcgcatttcaaccagaccagccggaaggctccagaccgaagtcaggaggcctgttctggtcctgtgtgactctgagcaggtggctgaccatatctgggcctcagttctcacatctgtgaaaaagagaagtaatgtctccctcgcgaacctgctgagggtcttgagaaagtgtgcatgagaatgctttgtaaataatgcttgtgtgagtgagtggcgggcatcgctccctgagctgtcttctagctctggagctccagcctgctttcccaccttgggcccttgggcgccaacatctgatagccctactgtgtcctccttttgcatacccctctgcctttcccattctcagtctctgcatactcctactgtaaggagaagggcagtgtactgagatggagtggagagcaggagtccaggggcaggcaaagcagtggacttggaatcgagtccacttgacaagttccaattcccgtctcagttattacctctgttcacagagctcccggcagcagatcgccagtccagcagagcccccagtggtgcaactgcaattacacacagtgtctctaccagtcctaagatatattagctcgttctctttgtaaattgcatcgtattttaaaactgaatcttcaaagtgctgacattaactaaagaaaaatatgctagagtctttcatctgtttatgttttaattaaacaatatttctccagggtccttaagtggcagaggtccaggatgcagagatgaggccaggtcctggttcctgggctccctctaccccaccccactgatgcatcccatgctccgtgtgctcttcccaccctcccctccccgacctttgccagggaccctccctagcctcccttgctggttttgaatctccacctcctctcccctctcctttcccgcacccacgaaactcccagagtggaagcacatcactgacccaccatggaggcctgggcatgacgtccctggccatcctgtgaccagtgaggcttggggcttgtgatcagggttccaagtgcccctgagtttgtcatccaccctcagcctgcctttccctggaaagggcggcaaagctagggccctgcaaagaagagaggcagcacacagagggagcaagggggaagcagtccataactcgcccacagtttcctcctggccttttcagctcctccctcaggggtaggtcatggtggggaggggcagctgggcacaggggagagcaggcatcttctacagaggcctgggaagctgtgtgccagacagcgccgagcccaccagacccagactcacctacagctggagatccccacttccctgtgcccacagaatctgccctttgcagtctcccatctccccaacccaggcctcagcctgtctcatttttctatcagacgtgctggaagagcagcagaatcaggcccagctcccaattccctctccccagtcttctccaggtgtcccctcccatgagcgcacaggaaaaggaccacatggcctggcgagccctacacccactgctactgctgctgctgctgttcccaggtgagggggaggaggagcccagggagcagaggagatgggtgtggtggggactgtcaggac

SEQ ID NO: 36143 - DNA, 2300 bp, Homo sapien
accaagcactgggcactttcaaatctaattgtttcaaaagcccttgaagggtttgagtctgagctcttaaaatgccagagaagagggaaatcagtgatggtgggaagtgtgcggggcccagctctcttcccctgcccctgtttctgctctccatcttcttgaggatggagcgagtggacaatttagagcagaagggtccctcctccccaggctctgaaggttctgtatccccttccctgccctacttcaggtatccaagtaactgtttaatcaaactctatgccctccccaccaaattgatgagaactagggccgtccagtagggagaccctgaccccagtgggcaaagcatctcaccatcacccaagaaaacatgtcagcagcctcactgtgattgcacacctactcatgggctggaggcttgggattttttaaaaacctcctgacctcaaggagaccaacagcctgacaagggagaaaagagctgcttcaaatgggcagaaatgagaggttgaacttaagagagatgcaaaagcagtgagctccaggaacaccgaactgggtgggagtagggccagaactggaggagagaattgaggaacgctccatggtggagggtgacatttgagctgagcctgaagagtccgtagaattgtgcaggtcaagttagaaagaagggtacattatgagtccagggaatgaacatgagccagaagtgatcatggaagggtggaggcccctaaggactcacatccatcccatcatgctctgactcagtttctttgtctataaaatggatcactagactggctcagtggattctattcgtgttctcctgagctttggaggtccacagagaagctttggaccacttatgggccaagtgggagagcagaggaggcagggtctagacctttgccttcaactggagctttaactcttagctgttttatattttggatttcggtatacttttgagtcattttgtcctctgcaaactactgggtggatgggtccctggatatcttccagctctgagctcagggtcttcctcatgatcagccacttccctaccaagaaggacagagagagaaatctatgcagagccctgagggccagtggggtggaaattctaccccaagttctgatgtcctggaagggctcctgcccagctgccctggggagctcagcccatgaccaaactcagatggactgatgggtttgattcctggagatatatcattaaagcacctccctttacatttaggtaaagtctcccaaacttttttcatgaggagaaattgcctttccttccattgaaggtgcaaaaaagacagcttgggttgctgccaatatacctacatgctgtcagagggtgtggatgccactacccacaaagcccagagtttggacagcagcccaccaaacagcttagaggtgtcccagctaagccttcgagataggatggagggtctccaggaatgccaaaggaaattgttgaggaaatcaaagaatgaatgaacaaataaagaggccactgccaaaatgcccttgaaaggatcactttggaagctgttattagtcgtgtttaccttggtgtgaattaagtatcttagggtaagagttgctaggaggaaggaaaggttttggaaactggatgtcactatataaggaaagaataatacaaaaagaaagatgatgggtgcaagacaatcactcacataacttcatcctagtctccactacccccagctcctcaccttccctcaacccacccccagcctcctcctcataccctctcccttctttcctccctggaaatgctccccagctcagggcccaggtgctgaaaggtgctttaacgtgagtgaaaaagtatttggcctggagcagggggaccggaagggggtgtcagtctgtgccatctgaaggggtgtggcccgctgcatgtaaacatggaggaagggagtggcttccggcctgagctatgggcccagggaaggactggaaattcctacctggccttctgctgcctccccacctgccactgcagcaacttcgcttcacaaacaaaacagagacggaagtcagtggagtctttgcaatgacatctgcccctgctcaagtcctctgcccttgggaggtcccacgacaggccttggctccaaccttcagcacccaagaccccaggatggcccatactctcaggggcccctgccctggccctggcccactttcctggtcatgttctcttaggagtggcttctagctataaaagcccaggtaggcttaagacaagc

SEQ ID NO: 36144 - DNA, 2300 bp, Homo sapien
cagaaattctctcttttgtctccaaagcccctagttctcaccccaccctcagcctttgctgcaagaaggataggaaggagaactgaggacatagtcactggcccagctggtctgacacaaggacttgccactccaggcttggcctagggctgtccacacaccatgatttccaccagagctgggcctcaacagaaggtaaatcagatagtactaccaagggctttctttctcccagaatatccttcccctcagctaacccacaagcaggcagtgtcgcttcagagaccaccatgagcttctttcttgtcctcactgaagtggctctagttggaatctggctcatcactgaccagcagctgtgtaagcctgggcaagttacttgatctctttgtgcctcagtttcctcttctataaaatggagataatacaaatatctccctcctggggttactgtgaagattaaatggctggtgggtggtacgactcagatgttagctgttattttattcttatggctatggttatctcagttgccacactggaaaggacactgagatatccacataaatggcacttagagtcttccctgcacaatttcacacctagaaatctaaaacgctccagcaggacctaagtatgcctgtcccacctgcccaaaaaggcaaatacataaaatgtggacctgtgcaggtgtcactaacattgcagaaaagggacagaagtgatgaaaaacaacccaagagggtgcctcctctctgaggtccccttttctttcaaggaccactggaacggccaagaaatcccctccccccaggcaactaagcatcaatccttgcagctccgaccccacacctcaggcttccagctcccactccacaggggctcacatactatgccagcctcttgtccacctgcctgaggatttagggccaggagaggcttcaagagccactgtcttcttgtcctgatcccacaacaggatcctcccttggtcatggggacccggcatcactgagctgggttggggtacttcatgaggacccctgaggcctccttcacttctccccacccccaacacatgcagacagatgggagatgtttccggcgtgtgtggggcggggagggggacgggtattgagatttccacgggactctgagtggtgcgtctgctaacaacacagccctcccccttgggccgtgggcatttcctcacccagacctccccctcccaacccaaacacaccatcgccgccaccaccacaatccctccagtccccctgggcaaaagcgatgttcagagacgcggggttttgtttacaatctaatttgtccggataattgcctcaactttgcacttcactttgcccgcatggctctggccttgggccccttcttcactggttcgcagagcactttacgggaaattccctttccgcagagggaggcagtgcgcgccagggggtgaccgttcacaaagccctgaaggggcctccccaccttctaccctcggctcaggaagcccacccccagcccccacgcagtggggagcaggagggaggccagacagggcccgggcctgacactggctccgtctctgggcccccggccactccccgcgccgagcgcagcccgccgggaaccagtgaaccgtgtgggatcaggacttggccgtaccttcagactccaggggatggccggggtttgcaagcgccccataggattagtccgaggccagggtgaatccctggggtccctccacctaccatctttttcagatctgccgcctcacgtcttctccccacgttcccatttttcctcccctaaagtttggtgcacgtggttttctctcgctctcagcgggctgccaggcggggtgaaagttgctgcacctgctttaggcgaattatggtagcactagaagttggtctcccctccctccgccgcttgctctctcgctccctcctccctcgctctccgcgcgctccctccttccctctccaccctcctcctcccccgccccctcccgccccgcccgcgcgccgcccgctcgcagccactcgcagcccaggctcagtcgcagcccctcggagtccggagcccgccgtccctgcggaccggacagtgcggccggcggccggcggccgggacggagcccccagcccgcgaggagggcgcggcgcaggcggcggcggcgcggcggggaggagcccgggccggaaccagggctgggccgggggcggggacgccggggtccgggagcccgggagccggagcgagctgacgagcgtcgcggaaggacc

SEQ ID NO: 36145 - DNA, 2300 bp, Homo sapien
tcctgcccccaggagcccagatgggacagggctggggttgtggggatagcagtaccctgccagtggtaaccctcctccacccccccagctacaggagtactacaagaagcagcaggagcagctccacctgcagctcctcacccagcagcaggctgggaaaccgcagcccaaagaggtaaggggctgtaccagggcccaccaccgccctcaccccctgcccagagctgggtgtccagagctggtcaggagggaattgccttgcaggaatagtagaaaaatctagaaaaggctgaggaaggggaccaaggatcagtgtgggggaaatggggatggtggttcttacgtgtctccatctcccctcatccccattcattctttctctccttgcctcgtgttgttgtctctgtgcacatgggtgtagacaggtgtgtacgtgtcacccccgtgtgtggtgtctgccgggccacgctcatgtgccttgtggtcgcaccatcttcctgcccccttgtctctttgtgacccagcacctcagccctcccctccttgtcctgcgaatctctgagtccctcagcaaaccacctccccttacctcagcctgcccccagcttcttccccttcttcttatgacttgcccagccacccctcggtctcctctcagagctccccagcctacatcccctaccccatcggagcttctataccaggccctggaggcccttctcccctgggtcccagacctgtgcatctctcctgctgcccaaccgcagccccaagctctaagtttcctcttcccagaaggctgccctgacacccaggaattctccagcacccccagtctccccctcagcagtcttgtaattgctgtgttatcagcaggtaaatctctaggctaagtttatcctgtgtctctctattgaatagccagcccccaccctaccccatgcttcccacccccagcaggcaggcagagacatctctgcctctcaacccacccaggacatgcttggctcatggggctcaagagagacttgctgacagcctgacttgtcagtgcctgtgtgaagaactgaatgggtgggggtaggtagagtgggtgagccaacgagtacagggcgcctgggcagtggtgatgtgactgttctccgagcctgggtcccagtgagtcccgtcagactccttgattctctgtatctaaaaagcaagagaggaaaagagctgggggagagaaaactccctccccagagcagaagggggcaccccgggcatgtgggaagggtgccctccaggcaggagtggcccccagaatctgacaggctcatcgatcattgtgatgaggcacccccaggcgtgcacagctgcggtgcagggagctgaagcagcggaaggagggaggcgggaggagggagggcgtcgtgctgcgtgtctgggtctggctgtgtgtgtttgcgcgcgtgcgtgcgtgcgtgcatgcgtgtgtttactgcgaggaggcatgcagccttatggaagctgggccgggagcagagacactgcagctgcagacgccacaacgacagctccaggggctgacaggccctgggagggggtggccgcggggtgggggccagatggcatgcctgaagctgatggcacccctctctgcccgccccctcgggcccctcaccaggcactggggaacaagcagctggccttccagcagcagctcctgcaaatgcaacagttgcagcagcagcacctgctcaacctgcagaggcaggggctggtcagcctgcagcccaaccaagcctcggggcccctccagacccttccgcaaggtgagcacccgccactcctcccctcccagccccaaccccacagccctgcctgtacgcaacagctggcagcccctgttcttggggccaggtagaaagccgagtgttcgtggggccctgccagcctcccctgtctctcccacagcagctgtttgcccaacagacctgccccagctgtggaagggcgagggtgcccccgggcagcctgccgaggacagcgtcaagcaggaggggctggacctcactggcacggccgccaccgctacctcgtttgccgctccccccaaggtctcaccccccctctcccaccataccctgcccaacggacagcctactgtgctcacatctcggagagacaggtacaggggtccaggctgggaggggcatcaaaggcctgcctgggggtagacctggccccccacccatgagggctgactgtgagggagggggtggagcccacggaccggaggttcactccctctccactcc

SEQ ID NO: 36146 - DNA, 2300 bp, Homo sapien
cctgtgtgaagacctgggccagtttatcaagtaggtgtcacccccagcccctcccccagcagcctttccccacagggcctctcccccaaccctgcccactagcttgccccttctgggagccctcctcactagctgtactactgtcctcactccagagggttctagttctttctctgccccccacggactccctgatcacccactccctaccctgtctatatttctgggcctgcattcccctgactccatccccagcgcagggtgcgggtaggagaaggagaggacaaacataagcattactcctccccccaccctcccctgctcccctccagcctcagccccggggagtgatggcgagtgacaggctgagggccgcagacaggcagggcgggaggtggacgggcggctggcagcaggcggccagctgccacagccgtgccaggctctgtcactgactgattaactccgctgtctcccagacccttgcagcatcagggtcaaacaaattgttttcacgcttcgtcagaggtttacttaattagttcatttgcaattagatctctctgtagctgggattttagcaaagacatcaaaggaggctgacgagaagggagaagccttcctccattgccccgtttttccacctctttctcttctttgtatctcttggtctgtctgcttttcaggccatgggtgggattagaggataggatgggaggatggtggcagcagggaaaccggagccaactttctctcctcctctcttccccttgaagacacctcaacacagagcacgccctggatgaccggagtacagcccagtgccgggtacagatgcaggtggtgcagcagctggagatccaggtgtggcccggaagatgctggggagggacatggtgggctccagcccctgcccacccacagcactgacttgctaggtgggctctgttgggagggtctcatggaagggtcctatggtcaaagccaccatcttatgctttctaggtcctaatgaccatggttgtgaggtgaggacagctggattctgaggggtaaaccaaggttgggggcgtctctgctgggaggtccagaagagactcacgctacatagaaacatcaaaaataattattagcagctaacatatggagcacttactttgtgctgtgctaaatactttatatagctcaaggaatcctctcaacaaccttatgtggtgggtaccattattctccccattttccagatggagaaaacaggcacacagagctaaagtaacttgcctgtgagtggcagagctgggattagaacccaggcagcctggctttcccaagggagtatcccagctacttgagaggggacactcagcagcacagggttcccaggaagcaactcagggcagctcctctgtgcttacccatctccctccagcacctagcagagcatcctgctgtgagagggtggtcatgagagacccattgagtttatgaatggggtgtctgagccattcatcagttcctgcatctgcattcagtatgcaaggccctcacacacaagtgccactgcacaaggcacagtggccgcccccccgtgggtgggtaggaagaagcctcccaacatgtagaggcagggataagctccagccaggacgcactgggagggctcaaatggtcaccatccaggggagaaagggagaggcttcatggagctggcagcccttgaggggtagagcattgctgaggcctccctggagcgggtcacagagggagcatggatgctgaggcaaggaggcgaatgggggtgggaatcggcggccttctgaagagcctggcggtggaggggtgggacaacactgcctccagggttcagcctcccgctcacctcctgctttgccaccctccacagctcgccaaggagagcgagcggctgcaggccatgatggcccacctgcacatgcggccctcggagcccaagcccttcagccagccagtgagtgctgctcccctccccgcccctcccagagccttccacagaccctggagcctcgggacccccaccctcgggcactggtctcagtaccctccccgttgctcacagctgaacccggtccccggctcctcctcattctccaaggtgaccgtctctgcagcagactcattcccagatggtctcgtgcaccccccgacctcggccgcagcccctgtcacccctctacggccccctggcctgggctctgcctccctgcatggtgggggcccagcccgtcggagaagcagtgacaagttctgctcccccatctcct

SEQ ID NO: 36147 - DNA, 2300 bp, Homo sapien
agtgaccatcctgaagccacccccctgatattctaaccctgccgcccttgcccagcccagcctttcacatctctgtggtgtgttcctcctagttcttcacccccatctcccctcacctagtctagggtccagtaagaagcatctgggctggggaaagtgaacgactaagtgggtgactttgccagttagcagtgttctgctgctgcctctgtgcctgaggccactgcctgagccttcctcatggcacagcagaatccatccagcttgaggtccactttgaccttctggtttttttcagccaaatgcattcatgttacttgggaaatacaccatctacacccaactctgcttcccttccacctctactttccactcatttctcagcccctcaggtcatctctgctcctctcccgaattatttgtgctttcttctttcccttcttcacctttgctggctcccaccctgagatactttccacctcagaccagggcagaagggttgggagcgggcatggtgtgggcccagccagctgccgttcatccagggacagagctgccatctgccaagctgatggtccttgctggccctccccgtgtccatcccctcccaaggcccgtgttgtgggcccgtccttttgtttacgaagcccctgccagaccccttaaattgccgttaatgtttcagcgtaacgaattagtctctcatcacgaatcaggcttcgaaatgagggaaaaaagccccggtgaggccatcctcggaaattggggtcattctcatttgcaaagcggaggatcggagccccgtaatgcgggcaaatttattccgaggcaggagccccggcgtgattaggccctttgtaattatcgctccaagagattccactccagccgcccgcctccctcgtggattagcaagcgagtcggaaaaatacacaggatttaattagaggcaaattaaaattggtaatgaaatcgggccagttgcaagtggcaagagttggaagggagagagggagagggatctccaggggcacgggctgcctgccctacccgctttcttccccgtttagaaatgtaaagaggagacaaggatggggacgaggcgggggaggctaagggaggacaggtaacagggtccagggatgcaggcagggatggtgataactgggagctggccgtgggggcagcacagctgagagaggagggtgcagggacaggactgagggacacgatgaggtggggcagactagggccctagtccgggctcccatggtggtgaggggggaattgggccaagcaccccgccctcgcccaagcgtcctacaaaccagatgacctcaattcttgaagttatcctgccaggaggaggtgggacagacaaggtgacttatcttctttctctcctctttctgcctctgggttgtcaacccacactctcctctctccctgtttatttcaacaagtatgtatgaggcctttactgtataccttgtgctctcaaaatataagctgcctgttctgagccacagccaaagcatggctcccagactcctgtgggtcagtggaggtggcagtgagggtttatgagctctttcccaaacttttaaaagctttgtggaaattctgcatgcagctgagatgaagcatcctgggctcgcagagatgccggggcccgaatgtgatctgctgctgatccaaagccctgagtaacaattacatgtgtctttgattaacgaagatgatgaaacagattattactaactggatagcatttagttagtagacagaactttccaagatgtggcagggagagaggaggcagctaataaaatgggtcatccatggtgaagaggctgggaacccctggctctatggaaagggtaggggcccgccttccctttggctgggtctcctcccagcccacccccctcccctgctcatccctgagctggggaaggtgggccgctgctgcgtgggacatgggatgggatgaggactatcatgtttgtgcttggccaagcaagccgcctctgagctcctcttcactgcacccacagaacgccgtgcgccacaacctcagcctgcacaagtgcttcgtccgcgtggagaacgtcaagggtgccgtgtggactgtggacgagcgggagtatcagaagcggagaccgccaaagatgacagggtatgtgggtccagagctggatgggctgtacctgcccagggggcaggagccaactcacccccaccccctacctctccagggtacacatgtgcaccagatccttcctggctgggggaagggg

SEQ ID NO: 36148 - DNA, 2300 bp, Homo sapien
ttcgggtagctagaattacaggtgcccacgaccacgcccggctaattttttttgtatttagtagaaatgtggtttcaccacgttggtcaggctggtctcgaattcccaacttcaggtgatccacctgccttggcctcccaaagtgctaggattataggcgtgcaccagcgcacctggcctattatttttttgagacagagtcttgctctgttgcccaggctggagtgcagtggcacgattttggctcactgcaacctccaccttgtgggttcaagcgattctcctgccttagcctcccgagaagctgaaattacaggcgcccaccaccacacccagctaattattttacttttggtagagacggggtttcaccctgttgaccaggctgatctcgaactcctgacctcaggtgatctgcccgcatcggcctcccaaaatgctgggattacaggcgtgagctaccgcacctagcctccacctggcagtttaaacagaaactgaggagcctgggacagggtcaggacctccctttggcttccacgtagcagcagtggccttctcccgacctcaaacagccccaccccagccacctgcttgctgtgccccttgggccagagcccctgggtaaggagaggagagcaagttagatggatgtctctgaggtgtggggtgtctgctcccctcaaagatgcctgcttaccaggcaggagcctttgcaccccaggcagtgtgcagcctggagaatggagggaagccatcccctggtgaatgcctaggggccagtctccaggcctggctgcgcttgcacctctgcttctcaccagtttggtgacctttggctgtttccttaagctctgtgagagctctgtgatggtgtcatcactggaagagggacagcccccagccactgcttttcctgtcccaactcccgaacaccttcccgtgcagagaagccttctgtatggaggcttccatacagaagcctccatgtgggacaggctgagcatatgtctgacatgtcccaaaatctaggatggcaagacagtgtgggcagaccaggtgtgtaactactgagactatagattagaccttgccaaacattggaaaatctagaccggagagaaaacgggtgggggggcagcatgctgtgaaggcagacactggggggatgccagttcccacttcccagctccgagacctggacaggtccctgaaccaagcccatcgcacccacctgtgaaggggctgctcctgcagggccagttgagcgtgaagaccgaatcagaccaagtacacacacagctccaagacagcggctgatccgccctggcctcccggaatagggaatgggacccattcccagcacaggccgttacttagtgagagtaaagagatgcgaatgaagagctaagtgaatgagtgagccaaagatggccttctctgtcctccaggagccccaccctggtgaagaacatgatctctggcctcagctatggagcacttaatgccagctaccaggtgacctgcccagagcccacccactcacctctacctcccgcccccttgctttctcatacaagagacccccatcctcccctgcagaggactcaccagaggagggaaggagggtgaagacccaaactctccgagaccccacctctctgccccaccccaactcggggccagcctccacctctgctttcaaggctgggttcagacaaggcaggcagctgggaggatggcatacctatagcatcccctttcctggtttgtcagtctgggggttctctgttccctgggagaggggataagccaggcccaggttccaggaaagctaggaggtaggaggtcggggggtcagagttccagccatgggggaggggtgctacattcaaaggctgagttggggcttgggggttgcccagacagatccgcccgtggggccagtaggcagacacacaggcagctctctagtgggcggggaaggcacagcacttgactgagtgtgccccatcctgtggagccactgacgaggcccaaccctgtgcccctgcaggccgccctggccgagagcagcttccccctcctcaacagccctggcatgctgaaccctggctccgccagcagcctgctgcccctcagccacgatgacgtgggtgcccccgtggagccgctgcccagcaacggcagcagcagccctcctcgcctctccccgccccagtacaggtgagcacacagcacggacccccacccaccccagcacccctcaaccaccagggaggaggcgtcatcccccaccc

SEQ ID NO: 36149 - DNA, 2300 bp, Homo sapien
ccaacctctgaaattggaaaatgtattgcactctctgtggcagacacatctctagggaatacactagtagacaagccagtccctgctctcagggcctttcactctaccaacagatgagcaaatatagaataggccaagtgctgaaaaagtctgggtagaataataaaatggtgttgggggcagagagtgagaagtctgggacggcctctcttagaagctgacataagcagaagaaacgaggaaagggccaatgtgggtatctaggggatgcacattctgggcagaggaaagagcaagggcaaaggccctgaggcgagaaggtgcctggcaaattaaccgagaaaaggaagtagcatggctggcagggaataagtaaggggagatgagggccaaggcaggtggggcccagttcatggagactgagggactttgcgctttattctgaactgatcggtgggccccggggaagctgggcctgggcttgggtgcagagcccacttggtgctgtgcatatgtgtgtgtgtgacagtgttgggtgggggaacacctttgatctcccctcatttaccctggcttcctggacaggtccttcaggaagagacaataacagggccgggtctagggtgaggcatgtgaaacctggagtgaatgaggcacttggctcaggttcaaaacttaagggggcatcaaaaaactcagtaattaagataaaacaatattttcctgcaatatgtataaaaatccaaattaatgccaaaaagtctatgataaacaaaatgccaacattttagataaagacaggatctgaccctgaacttgcgtgattaattaccttaatcctggtcctgtttccaatacaactttatttaaaaaaaacaaggcagctggcccaaagaactgtagtttgcccatttggtatattaaaatattgccttaaaatattcctcatcagtctgggcacggtggctcatgcctgtaatctcagcactttgagaggccaaggcaggcagatcacttgaggtcaggagttccagaccagcctggccaacacggtaaaaccccgtctctactaaaaaaaattagccaggtgtggtggcaagcacctgtagtcccagctgctttaacttgggaagtggagattgtaatgagctgagatctcaccaccacactccagcctggcggacagagcaaaatcctgcctccaaaaaaaaaattccttatcttggcatccccgaaatcttgcacaccaggtgagtgtctcacttacctcaccccagtcctggtcctgggccccagtgctcatccctcctgaggctgagaggcaaagggatttccccaaagaaatatagtagatggtgggtctggaaactgggctcccatgccaggcctccagcctggccatcatatcctatcatgctctgaactggaatgttgattttaatgtgttgatttttaaaaactttttattcaagtataatagtcatacaaacaagtgcctgcatcataaatgttcagcttgctgcatccttacaaaatgagcacacctgtataaccagcatgcgtgattaaatttaaagcataatttacatttccaacaaaacagacattagtactgggccagattcagaggacttttgagatcaagcaggcgacttggaatagtaaggctccgggactgagctgatgcagagtttaggggccctggattgagacgagaaagcagggggaggggtgcagcactgaggtctggggttcgggagggggccctatacgcgggaggaaacggagagagacggtgaggattgccttcggaggtgggtgaggcccagcgtgcgcgcccaggtaagcaggtaagaatgcagcagccgccaggcccaggcgcgggcgcgtcccgtccgggtgactcagcccgtgccaggaagcgggagttggctcagctctccagagctcccggacagcagccggatcccggccggctcctggggcactaggacagacccccgcggctagcagcccggcctggggggcggaacactctcttcttgtcccgccccaccttcctccgggccgcaaccaccccagcccatcgctgggacgtggccgcgggtgccgagagcgctgccggcgccgtgggggccatcccggtcctggccccgacggcgccccaggacctgcgatagccgtaagtagcgactatgggggctaggagagtccaagaagtggggagctgggacgcccggcctcctgcgtcccagctctccacttccagacccggctggactcgggactagaaaaggtgg

SEQ ID NO: 36150 - DNA, 2300 bp, Homo sapien
tacctcaccccagtcctggtcctgggccccagtgctcatccctcctgaggctgagaggcaaagggatttccccaaagaaatatagtagatggtgggtctggaaactgggctcccatgccaggcctccagcctggccatcatatcctatcatgctctgaactggaatgttgattttaatgtgttgatttttaaaaactttttattcaagtataatagtcatacaaacaagtgcctgcatcataaatgttcagcttgctgcatccttacaaaatgagcacacctgtataaccagcatgcgtgattaaatttaaagcataatttacatttccaacaaaacagacattagtactgggccagattcagaggacttttgagatcaagcaggcgacttggaatagtaaggctccgggactgagctgatgcagagtttaggggccctggattgagacgagaaagcagggggaggggtgcagcactgaggtctggggttcgggagggggccctatacgcgggaggaaacggagagagacggtgaggattgccttcggaggtgggtgaggcccagcgtgcgcgcccaggtaagcaggtaagaatgcagcagccgccaggcccaggcgcgggcgcgtcccgtccgggtgactcagcccgtgccaggaagcgggagttggctcagctctccagagctcccggacagcagccggatcccggccggctcctggggcactaggacagacccccgcggctagcagcccggcctggggggcggaacactctcttcttgtcccgccccaccttcctccgggccgcaaccaccccagcccatcgctgggacgtggccgcgggtgccgagagcgctgccggcgccgtgggggccatcccggtcctggccccgacggcgccccaggacctgcgatagccgtaagtagcgactatgggggctaggagagtccaagaagtggggagctgggacgcccggcctcctgcgtcccagctctccacttccagacccggctggactcgggactagaaaaggtggcctggtgccgccgctgccttccagtgtgctcactggccctcgtggcggggagcccagacgcggctcctaggcggccctagacaagtacggccgagacgctgtcaccccagggggctgccccacctgagcatcatcccacgggcccgcccagccccacctggagagccgcaggctccaaagtcttccccattctcggggaccaggttccggggtcgcgctgagggcccctgaaccctcttggactgcctggcagcggcttcttcctaccaccacggctcaccatccagacgcgccgcccggctggccccaccgggagaggctccctccctcccctttctccccgaaccctcatcttagaagccctcggattcagtctggatcccaaagaagggctgaattcggaggacctctctttgcccccaaagtcggttttctgacacacattcccacgcacagctggtaggggcaggagggtcgaggatgctctgggctgctgcggcacagggcaggctggttggtcactaaccggatttcccggacagacaactctggcgctgtgggcgggtggcctgggagcccagatccctgtccctggcttaggaccccgggaggagaccgagggggtgggtaaaacgtgactgagaaacttgatcgcgcccatctttggggcaaagagatttggaggccgcaattattcagacagttccacgaagtggttgaggtttctctctttctcctgattttccagaaacttttgcagagtttggacaggcaaaggaaaacgtgcagcccgcggatctccgggcctcagagagcagggagtcggggagactgaggccccgctccgagagcgcggaggaagcgcgcccagccggcttcctgtgggggctcgggcctcgggcgccccgcggacagacgtgtccggctcctggctgggccaagcccggcgcgggggaggggacccgcagaggggcgactgagaaggcgaggagggggcggggagagggtgggccagggaagaggggaggggagaggcgagtaggggaggagcgaggggggctggagggagagaaggaagaaggaaggggcgaacggcgtgagctggcgccgaaatgggagaaagcagcgagtgagaggggaaggggcgccaggcgagcacccgggagccagcgggacctgggcaggggcgcccggagcaggcgcgcatggcgggccccgcgcggggatccggctggaagagagcgtagcacggctcgcacgagtg

SEQ ID NO: 36151 - DNA, 2300 bp, Homo sapien
tgttaggagcttgagacacagctctggcttctggtccacactgatcagttcgcctgccagtcatgtgcccatccatgtctcatgcactcagcctcccaggtgctacatactgtgcaagacctattaatttcatatagtgctccaatcttctgaagcagagaccgtttactaatgagaaattgactctcagagaggttaagtgacttgcccaaggtcacacagcaaagaagtggcagaactaggattcaagcccatattttctcagttcaaaagtccttgctcaaccacaaagtcatactgcctcttgcaatatccccaagatgggaccctccagcccctaccaggaccttcatggggtctggacacactcaggagccctgcacctctcagagtctcagcctgtctcagctggggaggaccttagaaattactgggtccaaccctttcattttgtgcatggagagatggaggctcagagggggaggggacttacccagggtcacttacctagggtcagtcaatgagctagggacagagtgggccaagctgtaggactcattcttccctgtctttccttccagactgggctggggggcttaagtcacacctgtcccactgagacctgtaggagattagggctgatgtgctggtgggaagtcctctctgggctctggcagtgccaggtgcctggaagtggccctccccatacaggccctcctaagcctgtggacttgcccttctctttattacactgtaggctccatgagctcaggaactgcagttgtatccccattgcctggctcacaaataagatacatttcttcacacatgcattcagcatatgccatgtcccaggtcctgagccagagtcccatggtatagcagtgaaaaagacagaaaatgcctgccctcagggaagtttgcattcccagtaagaaagagacagacaatgaatgaaatagctaggcaaaaatgcattgtatttaagatggtgataagtgatatggaggaaaataaaaacaaaagggaaggggcataggaagtggtggtggagggctttgtaattttaatagggtggtcctagaaggtctctgtaaggtaacatttgagccttggaggaggtgaaggagtgagccatgatgtcatctggggggagagcattccaggcagagggaacagcaagtgcaaaggtcctgaggtgggggcatgcctgggatgtttcggggatttcaaagtgcctggaggatgtagccggagcagataaaacaagagggagagctggcggatggggtcaaaggggaacacgaggtgggccagatcctagggggcctttccagtcatggtaaggactttagcttttcccctgaggaaggtgggaaccatggggagttgtgagcagaggggaagacaggatctgacttaggatttaacaggagttaaatgagttgctctactgagttgccagtagaacgtcctagggcaagccagaggaggcagtctgaacactgggctactcctgcgggattccaggtaagacccaggataggctgggcccaccttgtggcagcaaaggagggtggatatgaggtcggatctaacaggatcaggatgtgggcgtgacacagagaggagtggaagttgactcttagagtttgggatttaccaactgcaatgagtgaagaagacagaaccttcagttttggtccaggaaccaggaaacttggattcatgtctcagctgtcacccgcttgctcagtgaccttgggcaaatctcttcccctctcagggctcggtgtcttctcctctaaaatggatgcggtcccagtcattctggcctccccctgccagcccctgtgctttgaggaggacacgtgcctcatatacctgctgccccttctcatccacagggagccagcgccggcagccaccatggcgtcacgcatagggttgcgcatgcagctcatgcgggagcaggcgcagcaggaggagcagcgggagcgcatgcagcaacaggctgtcatgcattacatgcagcagcagcagcagcagcaacagcagcagctcggagggccgcccaccccggccatcaatacccccgtccacttccagtcgccaccacctgtgcctggggaggtgttgaaggtagggcctgttctggcctgccccccaccctgtccccactagtcccagcctcccctagagcccttgccttttccccctcccaggtgcagtcctacctggagaatcccacatcctaccatctgcagcagtcgcagcatcagaaggtgcgggagtacctg

SEQ ID NO: 36152 - DNA, 2300 bp, Homo sapien
cctgtggcatggcatcctctcctagagggaggtacagacgtgctgagcgccacagagcctagagccgtcttccacttccctcccaactctagcatcctgaggctgtgattgtagtggtttttctgacttccttttcctttctgtcactgcgcctgcctcttcccctagccccatggccgccacgtggctgccttttagtcagccgggaactgagcctcctagtagcctccctctgtgtctctgtcaggaacaggatacaattcagggacattttggtgggggagtaatttcgtgcggtggcatacctgtttgccctggcacaggctctgtcatgtctgcttcttggagaggagccttcttcccctgggctccacctgttcccatccccagccctcccagcttcaggctacaggtctcgcaccctatagggctgagggaatgggaagaattaaaagagggaagtggcgtgtaggtaaggccttctggggtgggggctaggggaagggcaggagatggggatggggcaggggctgggcctggcggtgtgcttcccctggagacgtggtcctgggccacaggcaggcacgccaagtcacagcccctctgacttcttcctccagccaccagccccagcctttccccttgatgtttcatttccaaaccaggtctgctctgggtgcgtgtgctggggtggcaggggtaggagtgtgtctgcctgtgccattccctaccctgtgggcaggcccagccatggcagcccgagtctatcatctccccactccgccacttggataggaaggtggctgcactcactccaggcaggtgtgttgttgggaggagaacagagaggattggttcaggcattggaagatggggtttatgtctcaggtttgagctcaagcatcttgggtccagggagaaggtgtaaggcagctgctgcctgagtctcaactctatgggggaaagcagagcagctctgagccttggggctgggcaggcaggagggcatggagcccagatgagtggaagagaatgatgatgaaagagcagacttcccgatgctcctcccccgaccccatcacatgcagagttcaacacaccccactcctcgctctgtcctggtaaaggcagagtgcttcttatggtgtttaaggacaggaaaagggctggaagtgtgtgtgtgtgaattttgcttcctgttcctttcatacctgggtgtgggcggggggagatgggggcaggttgggggacagctcactcactccatccggtgggtgggtgacttggtgggctgttggaatgttgccataggaggccatttctcctctatggggggagatggtggcttccaggtcaggtctcctcctctggctccctgacagagatggggtgggaatgccagccggagcgcacatggacagggcaggagcaaagctgaattctgggtctagggcagctgacagcatttgggaatcctggggtgggcccctgttagctcttcccagaaccccaactcttgggcaggatgggggtgggggggtgtaagggtggttgggggtgggtgtaggtgtgtgttgtgaggggagaagagcccccgctgagttcctgggccactgcctgtgctgtctagtggcctctgccagcactggctgccccgtcctgcccccaccaggcgtgactcagatcgaaagcagaagctgccagacactgcacagggtgaagtgaggcagaaccaactctgctattttggaacctggttaattcccccttctgccccccacctccctgctctcagggctcccatcccctccagctgtctggcacttcagcttcctcaaggggacagttggggcaggccttggtttcccctggcatggacgtggaaggccatgctgaggcccctgtccttgctaggcccctctccctggccagaggtgctggattctggggacctgcgctctggggttggggaggaagagcgccctctcctggtgggaactcgtgggcagggcggccctggcgagatgacggtcaccaggcctggcacccactctcccccgcccatctttggccgctctcaggccagctgtcagctgcctctcccaggggtgtgagctgacgagagcttcaggtgggagcctctcccggcagtgaatctgagggttgggagggatttccggacccagagggaagatattttggggccgagggcctttccagaacccatgaaatcacacaccctgctgcgaccagactgaccctccctagttgatggttcttttttggacatcctaggcctg

SEQ ID NO: 36153 - DNA, 2300 bp, Homo sapien
gatggtgagtgtgtaacatgtctcatcctggtgtattgcattttcattctcattttaaaaatatataattttggggtatgtttgctgacatctataatatattcatgcatcggggtatatataagcaatttacaaggaaagaagcatatattgagagtgctcaaaagtttttactgataggaatatatgatcaaaacggttgaaagatcagggtaatattgaatgccaggaagggggttggcatgtagcttgggagttggaaggtgatattggtcttgtggggagaccccctaagtggcagtgcctgctggggctaagaagcctcttcccagagggtactgaaccacagagtacccatcacccttcaggccctcttgcctagcacatctggtgggggagagggggagactctcaggctagagccctcagcaggtgtaccgttcaatttggaattggcaggtgcccatcttttaggtgcttctagggcagtagttctccactaggggtgattttgtccccctaggggacatttgccaatgtctgatgatattggccagggataccactaaacatcttaaaatgcacaggacagcccctgtaactaattacctggccctgagtgtctggtgttgaggttgagaaactctgatctaggaaaagagccaggaaacagatttgccataaacttgctgcatggcctcgaggaagtcacttaagtgatttgagcctcagcctccttggaatctgaaaaacggatagcaagcgttgctgcccttccccttcatggggctcttgtcaggatgggggagatggtgaatgtgcaggcattttgggggaggcgtccctgcaaaggggccttgtggctgttgcgttccagtagagccaggccttttcagcactggcccttcttccttgactgtgttccctgtccaccaagctggaggcatcaggtgaccgctgtgaacctcagtcctggttcgtgctgctgcaggggctgtgaggcgcttcccccacagtccctgcgggccccagccttttgatgagggctgcagaaatgaggggttctctgggagccttggggcccaggacaaaaacatttccaactttgtccttagctggatgggagtccaaggttgtgggggtgataagaggtatttatcatgttccttatctgaggccccattgcaggtctcgggcggcaaggggcgggagccagaggtcctccctgggggctctgcacacccaggcctggctcctactcatcctttgtgtccttccagaatttgccagcccagggaggcccagggttggaccagagtctgggtccatcctccctgggcctctctggcctcactgttctgggcttccctcacattgctggcatctcctgccttctccaggagccacggcctgcctcatctcctctctgctgcccgcttccttcctgaaacctgcactcacgaaagggcccagtaaactcatccaccctgagacgcagacgaccgataatagcttaacctttcttaatacagggtatttgcttatcaacgatgggaatcccttggccaccagaaagaagcactaagtgaaatctctgcccagtctctttggcaggctgctaaaaaagtgctggggggctgaggaaccactgaacttgcatgtgtatcaagaacagtttctgcacaagtgaaaagtgtgcggtggtgtggatcttcccggagctgcccagggctctgcttgatctcaggctccatttcaaggtgggctgtagtacggcctcgacctgggtgtctggaggccctgggaaggcccaaggccaagactgcaggtgtatggccagtcaggaagatggtgagctgtggggcttctggctagaaggacacatgtctctaggaagcggggctggggttagggttaggcccaccctggacctggtgggattgggactctggcgaaattcttgctgctctgtgtctctccatctgcctagggccctctgaggtcaggctggggtcagggcggccatgagaggcctcctgtgggaggaccaaggagcgctgtgggcgcctggagccgggcgggtgagattgaagcagtctgtgttgggtaggctgcggtgtgggactgtgccgtcggggcgcagttccctctgtgctgtgagtaatcctcggccgcatttgcagctcccaggggattgtgcaacttcctctccagctgaggtgcagggggctgggtgagaaacagcagccgccggggaaatgaggaaactgagcccggccctggggctggggtgcggccct

SEQ ID NO: 36154 - DNA, 2300 bp, Homo sapien
gctgggggaggagacagggaaaaaggggcggggaagaggagaaagtagagaatgatgcctccgcaccctgtgaacttccaacaagggaaggtgacatgaaaggagctcagacaatttctgtccagcaacatgacagcaagctcaggctggtgagtggggcgtgaatgtagaacccataatgggggcaggctgccttctactgtcatattttaccctgtacttcgccaggctcaccctggccttgccccttatgatcggggcagggataaaagtgcaagatccaggtcctgcaccctactcctgaagagaagctggaatttgccacaggtggagtttctatggcaacagcacaccatctgggaccctctctttcttagactgccgaaggacagcaggctgcaggttccttttagggggtcggacaggctacagaatgtatcttagtgagccctggtttgggactttactgagaggagaaagaaaacttgcaaagaggtagaagtggatcagaggttccaagtcaagagcctctttccctgtaagccttagtccgctgagcgggactacaaatcccggcgtgcctagcgggactgcagcgagaactacgcttcccagtgggcgccgaggcagagcggctgggaggcggggcgggtgctgccctctgccgggcgcggagggaagtgtgcgtggagtgacagccggagcccgggcgccgggcgcggggctcggtgacagcggaggcggcggcccgggcgggacgcagggagcggccgcggcgccgacggcggcgggaagggcggacggggcgggcctccctggtggcacggggccggagcaggccgggagcaggtggcgggcacagcttgcgggccaggcacccgaacttgcgacaagttgccggagccgcggggcgcgggcggcggacagattgaccttcagagcgaggtgagcgggaccggggagcgagaggcacgaggagggcccgggacccccgacccaggctccctggcccctatcccgtgggtcccggagacaggtgggagggtgggggatgccggcaggagagggaagcaggaccgtgcgcgccgccacccacccgcagtccgtccgcccccgggcgcccagcgcgtggcccgagcggcgctgcccgccgagccgggagccccctcggcccctcccttcaggcgcgggccgggggcggcttctccgcgaccttatgtaaccgggcgggaggggccgggcgggcatgggccttcccggcccggagctgggagtcgaaggggcgggaggcgtgatggtgaactcgcaagaagtttgagggacgcgcgggccccgcgcccactccccctccaccggacacggctggggccggcgatgcctgagagggggtcggaggtaggggaggtgtgcgggggctgagtctggccaggccagcggggggagtgggagggccagagcggcgccacgccccgggggctgggctgatgggggggcgggtggaagtaccatctctccctcccttcccgtcccttcctccagctcggtctcttgaagaagccgcccctggccccgtcccctcgagtccctgggcagtctctttctccccgtgggttattctatgaccctggggaacaccaaccccggagcgctccctccgtgcgccccgttgtctgcctccccccgggttcccagctgcctgcccgccccccgagtttccccctccccccgtctcggtcccgaatcccggaaaacacgcccccttccccccgatcccccgagtccgtgccgcccacccctgggctgtcccgaccagctctggcccagcgcgtccgctcgcctcctggaagggagcgggcagatgccagctcggccccctccccgcgcggggttccggcttcacgcacggctgccccgagctgctccgggctgcgcgagcaggttcgcgccgcagccgcctggcgcgccccagccccgcgccccgggtgaggaagggagggagcccggggcggggcttgtctgcgcgaaccccgctgggcccaggcccccgccctccgctctccgccagcccctggccgctgcgccttcccccgaacccccctcagctccagccgtcgttctctcgcctgtctgttctggggacggttcagcgcggagcttctgcactcaacttgagcgcagtttttggcttagagctcgctggggaagtgcaggttaattactgcccagctcccatcctctgccctccccccatcccgagtgaggggctgcttcatccctcagggaaagggacaagacggatg

SEQ ID NO: 36155 - DNA, 2300 bp, Homo sapien
tctgctctggtggctcagttggcctatgagccctcaaggcagagaccctggctccctcagctctgcacttgtgctcccagcccagggctcagagctgagcagggcccagctcatgtgtggacaaatgaatgagtgctgcctttctttgttgagcagaacaacggctactgcaccgtgggagtcgagcccacctacctgtcctcccagaacggccagcccctgtggatcctcggggatgtcttcctcaggtcctactattccgtctacgacttgggcaacaacagagtaggctttgccactgccgcctagacttgctgcctcgacacgtgggctcccctcttcctcttgaccctgcaccctcctagggcattgtatctgtctttccactctggattcagccttctttttctggactctggactttctctaataataaatagttcttctttatgttggtcatcctgttgtttttggaagggagttttccctgagtggctacaaggtttcctggtgggtcactgtgattctaagagaaatgggacctaaggcatggcttgggatgggctctgtaaccctcagagcttaaagttcatacttttcccctggaaagggaagacagtggtagcgccatcatgggtgggtgggtggcgggccgggggagagtgttcctacttgagtcacagagaaatcgagcctatttgctggaaccaactcagcaagggatcttgtccctttggacttcatccctgtcctcctcaggagcctcttagcaaaagatccagaaaccaggagcaacattgtatgtggggaaggaggagagagaggaagaaaaggaggaggggaaggagaagaaaagcaggggaggggctgggggaggagacagggaaaaaggggcggggaagaggagaaagtagagaatgatgcctccgcaccctgtgaacttccaacaagggaaggtgacatgaaaggagctcagacaatttctgtccagcaacatgacagcaagctcaggctggtgagtggggcgtgaatgtagaacccataatgggggcaggctgccttctactgtcatattttaccctgtacttcgccaggctcaccctggccttgccccttatgatcggggcagggataaaagtgcaagatccaggtcctgcaccctactcctgaagagaagctggaatttgccacaggtggagtttctatggcaacagcacaccatctgggaccctctctttcttagactgccgaaggacagcaggctgcaggttccttttagggggtcggacaggctacagaatgtatcttagtgagccctggtttgggactttactgagaggagaaagaaaacttgcaaagaggtagaagtggatcagaggttccaagtcaagagcctctttccctgtaagccttagtccgctgagcgggactacaaatcccggcgtgcctagcgggactgcagcgagaactacgcttcccagtgggcgccgaggcagagcggctgggaggcggggcgggtgctgccctctgccgggcgcggagggaagtgtgcgtggagtgacagccggagcccgggcgccgggcgcggggctcggtgacagcggaggcggcggcccgggcgggacgcagggagcggccgcggcgccgacggcggcgggaagggcggacggggcgggcctccctggtggcacggggccggagcaggccgggagcaggtggcgggcacagcttgcgggccaggcacccgaacttgcgacaagttgccggagccgcggggcgcgggcggcggacagattgaccttcagagcgaggtgagcgggaccggggagcgagaggcacgaggagggcccgggacccccgacccaggctccctggcccctatcccgtgggtcccggagacaggtgggagggtgggggatgccggcaggagagggaagcaggaccgtgcgcgccgccacccacccgcagtccgtccgcccccgggcgcccagcgcgtggcccgagcggcgctgcccgccgagccgggagccccctcggcccctcccttcaggcgcgggccgggggcggcttctccgcgaccttatgtaaccgggcgggaggggccgggcgggcatgggccttcccggcccggagctgggagtcgaaggggcgggaggcgtgatggtgaactcgcaagaagtttgagggacgcgcgggccccgcgcccactccccctccaccggacacggctggggccggcgatgcctgagagggggtcggaggtaggggaggtgtgcgggggctgagtctggccaggccag

SEQ ID NO: 36156 - DNA, 2300 bp, Homo sapien
ctgagccaccatgattggggttgggaggaagggctggggagccagaaatgctgggtctcctgccttgtgccattttccgactccacgcttgtactcatttatcttccccactcattgattctaaacccccttctctggaacaaggctatgaaatagaagattgtcatctatgatcaattattattaattagtggggagaggcactgggctctttgttgagcacttactagggcagaccactgtgcaaagcactttgcttcatgatcccatttaattgtcacagtatttaatgagggagatactcatttctgttttacaaatgaaaacttggaggttcagagaggttgagtaactgactcaaggcgacacagctaaggtttgaattcaagttggtttggctccaaggtttaaccaccaggctgatctgctccaaattgggagcaggagggaggtctgtgggaagagaagtttcccatcatggggagaggagaccctgctgaggaccacggcagcctgaatgtacctgttccagaaatcctcccacccgctctgctctggtggctcagttggcctatgagccctcaaggcagagaccctggctccctcagctctgcacttgtgctcccagcccagggctcagagctgagcagggcccagctcatgtgtggacaaatgaatgagtgctgcctttctttgttgagcagaacaacggctactgcaccgtgggagtcgagcccacctacctgtcctcccagaacggccagcccctgtggatcctcggggatgtcttcctcaggtcctactattccgtctacgacttgggcaacaacagagtaggctttgccactgccgcctagacttgctgcctcgacacgtgggctcccctcttcctcttgaccctgcaccctcctagggcattgtatctgtctttccactctggattcagccttctttttctggactctggactttctctaataataaatagttcttctttatgttggtcatcctgttgtttttggaagggagttttccctgagtggctacaaggtttcctggtgggtcactgtgattctaagagaaatgggacctaaggcatggcttgggatgggctctgtaaccctcagagcttaaagttcatacttttcccctggaaagggaagacagtggtagcgccatcatgggtgggtgggtggcgggccgggggagagtgttcctacttgagtcacagagaaatcgagcctatttgctggaaccaactcagcaagggatcttgtccctttggacttcatccctgtcctcctcaggagcctcttagcaaaagatccagaaaccaggagcaacattgtatgtggggaaggaggagagagaggaagaaaaggaggaggggaaggagaagaaaagcaggggaggggctgggggaggagacagggaaaaaggggcggggaagaggagaaagtagagaatgatgcctccgcaccctgtgaacttccaacaagggaaggtgacatgaaaggagctcagacaatttctgtccagcaacatgacagcaagctcaggctggtgagtggggcgtgaatgtagaacccataatgggggcaggctgccttctactgtcatattttaccctgtacttcgccaggctcaccctggccttgccccttatgatcggggcagggataaaagtgcaagatccaggtcctgcaccctactcctgaagagaagctggaatttgccacaggtggagtttctatggcaacagcacaccatctgggaccctctctttcttagactgccgaaggacagcaggctgcaggttccttttagggggtcggacaggctacagaatgtatcttagtgagccctggtttgggactttactgagaggagaaagaaaacttgcaaagaggtagaagtggatcagaggttccaagtcaagagcctctttccctgtaagccttagtccgctgagcgggactacaaatcccggcgtgcctagcgggactgcagcgagaactacgcttcccagtgggcgccgaggcagagcggctgggaggcggggcgggtgctgccctctgccgggcgcggagggaagtgtgcgtggagtgacagccggagcccgggcgccgggcgcggggctcggtgacagcggaggcggcggcccgggcgggacgcagggagcggccgcggcgccgacggcggcgggaagggcggacggggcgggcctccctggtggcacggggccggagcaggccgggagcaggtggcgggcacagcttgcgggccaggcacccgaactt

SEQ ID NO: 36157 - DNA, 2300 bp, Homo sapien
caccatgcccggccagatctgcgtgttttaaaatgccacttgcaagctgggcatcatggctcatgcctgtgtatgtgtgtgtgtgtgtgtgtgtgcatatatatatatgcatatatatatacatatatatatgcatatatatatgcatatatatatgcatatatatatgcatatatatatgtatatatatatgcatatatatgtatatatatatgcatatatatatgcatatatatgtatataggcacttgcagagaaagagcagaggttcgatctttaatatgggaaatcgaggcaagaggagttaggaggctctgggatcactccaaatcacacccattctatgagtccatgggataatgccagcattacctacacaggactttcccttggagctgcattctctagtccaaaaacaggcttagggcttgggcccggagctcaggcctgggatccaggggctgagatgatggggctggtgggtgctatcagggggaggatgagttaaccagggacctattcctcttgcagtttctcgtgaactgtaacagcattcagaatctgcccagcttgaccttcatcatcaatggtgtggagttccctctgccaccttcctcctatatcctcagtgtaagtcctggtccctgcaggctgagccaccatgattggggttgggaggaagggctggggagccagaaatgctgggtctcctgccttgtgccattttccgactccacgcttgtactcatttatcttccccactcattgattctaaacccccttctctggaacaaggctatgaaatagaagattgtcatctatgatcaattattattaattagtggggagaggcactgggctctttgttgagcacttactagggcagaccactgtgcaaagcactttgcttcatgatcccatttaattgtcacagtatttaatgagggagatactcatttctgttttacaaatgaaaacttggaggttcagagaggttgagtaactgactcaaggcgacacagctaaggtttgaattcaagttggtttggctccaaggtttaaccaccaggctgatctgctccaaattgggagcaggagggaggtctgtgggaagagaagtttcccatcatggggagaggagaccctgctgaggaccacggcagcctgaatgtacctgttccagaaatcctcccacccgctctgctctggtggctcagttggcctatgagccctcaaggcagagaccctggctccctcagctctgcacttgtgctcccagcccagggctcagagctgagcagggcccagctcatgtgtggacaaatgaatgagtgctgcctttctttgttgagcagaacaacggctactgcaccgtgggagtcgagcccacctacctgtcctcccagaacggccagcccctgtggatcctcggggatgtcttcctcaggtcctactattccgtctacgacttgggcaacaacagagtaggctttgccactgccgcctagacttgctgcctcgacacgtgggctcccctcttcctcttgaccctgcaccctcctagggcattgtatctgtctttccactctggattcagccttctttttctggactctggactttctctaataataaatagttcttctttatgttggtcatcctgttgtttttggaagggagttttccctgagtggctacaaggtttcctggtgggtcactgtgattctaagagaaatgggacctaaggcatggcttgggatgggctctgtaaccctcagagcttaaagttcatacttttcccctggaaagggaagacagtggtagcgccatcatgggtgggtgggtggcgggccgggggagagtgttcctacttgagtcacagagaaatcgagcctatttgctggaaccaactcagcaagggatcttgtccctttggacttcatccctgtcctcctcaggagcctcttagcaaaagatccagaaaccaggagcaacattgtatgtggggaaggaggagagagaggaagaaaaggaggaggggaaggagaagaaaagcaggggaggggctgggggaggagacagggaaaaaggggcggggaagaggagaaagtagagaatgatgcctccgcaccctgtgaacttccaacaagggaaggtgacatgaaaggagctcagacaatttctgtccagcaacatgacagcaagctcaggctggtgagtggggcgtgaatgtagaacccataatgggggcaggctgccttctactgtcatattttaccctgtacttcgccaggctcacc

SEQ ID NO: 36158 - DNA, 2300 bp, Homo sapien
cagactcctggagtcctaccagataagaaaagggtccctgaagcttttgttggggaatctggaggcctcacatgacttaggggatcccatgaattctgctatattaaaggatttggcaagattccaatgacctgggccaggcgcgtggctcatgcctgtaatcccaacactttgggaggctgaggctggcggataacgaggtcaagagattgagaccatcctggccaatatggtgaaaacctgtctctactacaaatataagaaaattagctgggcgtggtggcacgcacctgtagttccagctacttgcgaggctgaggcaggagaattgcttgaacccgggaggtggaggttgcattgagtcaagatcgcgccactgcactccagcctggtgacacagcaagactccatctcaaaaaaaaaaaaaagattccaatgatcctataattttatttacctgcttcccaaatatggggactcccctcaacccagggaaggcactccctatcttgtctttcacctcatagtccaatgtacctctggggaccacagggaggaatggaagctaagttggcttgagacaccatcaggtagggacctccctctctgtgccaggcccagctgacttctagtcctccctcccctcccccattataaggcttggggaagctccagggctctggctgggcagtgggtagcagtggctagagtggaaaatcccccaccagctggatgatatcagtgtttacagatctggtcctggccttctgcctggggcctgaggacctgacaaatctgcctggagccctgagtgtggggtacgaggtcgcagagaggctattggcacggggatttttttcccactcactccaaaatggagagctgtcctgggccaggtgagcaggcactgggccagctccaggtcacctcaggcaatgggaagctggtagctgggaagtggggtgggagttgggggaggtgggggagggggtgccgagatgagggatagaggaactaacaaatcagacttgggggctgcacaagggcttgggagtgggtcatgggagacataggcactttaggagaactgaagacagaagcagggacgcagcggggcagaagagagaacgaggaacagcagcagggcgcaggcctgtccctcttcatatgcccctgctccaggcctctgatctaggtcggtacaagaggcacaaccagaagctggtgtggcttactctgtgagtgtgtcctgagcatttgctgaattatgacaagcatttctccaaatgtcctgtttgaccttgaaagcctctgaagctgctcaaatagctgtgacttcagccattgtcatcccagccccaccaccagcaccagaactcccgacactgccatcagcaccaccctcaccatcaccatcattgtaaccagcatcctagctactagctactgacctcttgaccccctgacacccctatctcctcccctgagggtttgagggtgctaggagttaggagtggagtcaaagcttcaagtacataacctagagacaagcagttctcaatgattttgcccatccagaagacacttagcagtgcctggagatatatttggttggcacaatgggtggactgctcctggcatcgagtcggtagatgccaggaatgctgttaaacattctatagtacacaggatggggcccacaacaaagaactatttgttccaaaatgtcgacagcactgaggttgcgaaaccctggctatagatcctatctatcccagcactctgcctctacctttttctggccctcgtccctaaatgcacacattatgcctctggtttgggaacaagacgtaatcttcaccactccatcttacggcaactttctctcttatcgcttgcacctcctggcctccgatgcttgaaccaaaaagtcaataagatgaaagtctgttgcggccaccctcaagaaggaaaaatacacagaaacgatacacgaagcacagggtacaccctgggttgaggtcatggctgcccagggcagggaggcagcgattagactaatcttgggcgtataaaagaggaaagagtgcccaggtcttcactccactgcgactgcagaactcagagctgctcttcctctgtggccagttggggaccagcatcatgaagtggatggtggtggtcttggtctgcctccagctcttggaggcagcagtggtcaagtgagtctgggatctggctgctggtgcagggagcctggatgggagcctaaagccctgcaaagggcaactgggccaggg

SEQ ID NO: 36159 - DNA, 2300 bp, Homo sapien
tcccctttccgctccccggaccacccccaactttggtgtcctcagccccgcctccgcgccccgcctccgccgcaggctccgccctgtcccctccgggcttgctcagcccctggccaggagcgccctctggcgtctgcgcatgctcactgctcccgactgcaaagtcctccaaagggaccttctaggctgcgtgccggtcgcccccgctcgggtccgccagcccgcagcgtctcgttggtgctgccggtgacctccgaccccgcggccgcggggcggggcggggcggggaggccttagctccgggcgggcggcggctgctgcagcgggacccgggagcggggcccggcgccgcccgggccgcggggcgatgtgagtcggggcgcggcggggcggggacgaggcggcttcaccgaggccgcgccgcgccgcgccgcgccgcgccgcagtctccactccctccctaggaagccccgggcgggcgggcaggcggcggagcaccggggctgggggcggggatccggggacagcgcgcacccagacctcctcattccttacgggcatgtagaaattccccttgacagtcctgtagcctgtcctgcagcctctggctcccccaacccacctctaccctctccgccctggacacatcatcgcatctcctggagccctcagaaccccctcattcactcaacaaatctcctgctatgcccacggacccaccatttctcttggatgcccccaaatgcttccactgcccggaaattcctaggatccctcatatccccattctccttgcactatccaaaatgcccacatccaaaattcttgctcatgtttccccaaacgtcctcatacgttttcagcccccacacccccctctcactcctgcccctgatccatacctatcccagaccagaggcctctccccatttccactcaatgcagtccctcctcagtgggctatctgatacatcctgatatcttaaggagaagagatggtgatagggaaattcagcccctcccccatcttgcaccctagagttcttcgtttcagtgcccgcgccgtgcccccgtcggtggctcaagccccagtattttcccagcaacctatctttagtctgtgcacacctccctgagcctgcttcttccttccagaaaataagccagaccaaggggatggggtccttttacctggaagttgtccaaggatgcagggtgcaaggggccctgggaagtgtttctccagagcaggaatgtgggatgtccagggtctgcagagtcctggcttgttgacttgtctaccttgggctcagatatcctgaaattttggcttactgttaacatttatgttaaaattaggcctttcagagcttggggagcagaaaatctatcaagcttccaaatgcgaaattgaagcagcctgtcttggaagatgaacatgtcaattttagtgaagtttgtcttacgtttttacctctgcaagttatttaagctagaagctccccagtttatagatggttcccccaaaaactaaggccttaggtgggagttggggggggcgttgacttaagtctcccagatacttagtagcaacaaaactgaccgatatattggtttcctgagtcttaaaccagtgctgtctctactatatcacagtgtccttttgagaaagctctttgtagagttaaagttctctgcaaaggtaaggtgatggttttggtgtttgttgtaacaggactcagagggagatctaaagtgacttaaaaggtctttggtcgtcttagacttcaaacttattgatgttcttggtgtctgtccctctcagggcccgtggggcttgggatttgtgctccctttgcccttgattttactttcttcattggtgtttttgtcccattagggctggaacagatacccaggtgggatggactgttaggtcagttttcattaacagttgggggtgaagatagaaggttttgttaatcagtgtctctgtttcctatgctaggtgagccccaggtgtatcccagagggatccgggtgacttctctgcagactgtttgccatgacagcccaccaaggacggggggaataaagtgggaacccttccccatgcccctcccacggtcagctccccgatggcctgggtgaggtaagagctgtgtataggggtcagttttatggcgtttcccaagttgggaggaacagagggtacaggtcacctggttgttcaaagctttaccattcagcaggagttctagaaggatagccaatcctacagacttatttcttgtgacaag

SEQ ID NO: 36160 - DNA, 2300 bp, Homo sapien
ttagtttttgggggaaccatctataaactggggagcttctagcttaaataacttgcagaggtaaaaacgtaagacaaacttcactaaaattgacatgttcatcttccaagacaggctgcttcaatttcgcatttggaagcttgatagattttctgctccccaagctctgaaaggcctaattttaacataaatgttaacagtaagccaaaatttcaggatatctgagcccaaggtagacaagtcaacaagccaggactctgcagaccctggacatcccacattcctgctctggagaaacacttcccagggccccttgcaccctgcatccttggacaacttccaggtaaaaggaccccatccccttggtctggcttattttctggaaggaagaagcaggctcagggaggtgtgcacagactaaagataggttgctgggaaaatactggggcttgagccaccgacgggggcacggcgcgggcactgaaacgaagaactctagggtgcaagatgggggaggggctgaatttccctatcaccatctcttctccttaagatatcaggatgtatcagatagcccactgaggagggactgcattgagtggaaatggggagaggcctctggtctgggataggtatggatcaggggcaggagtgagaggggggtgtgggggctgaaaacgtatgaggacgtttggggaaacatgagcaagaattttggatgtgggcattttggatagtgcaaggagaatggggatatgagggatcctaggaatttccgggcagtggaagcatttgggggcatccaagagaaatggtgggtccgtgggcatagcaggagatttgttgagtgaatgagggggttctgagggctccaggagatgcgatgatgtgtccagggcggagagggtagaggtgggttgggggagccagaggctgcaggacaggctacaggactgtcaaggggaatttctacatgcccgtaaggaatgaggaggtctgggtgcgcgctgtccccggatccccgcccccagccccggtgctccgccgcctgcccgcccgcccggggcttcctagggagggagtggagactgcggcgcggcgcggcgcggcgcggcgcggcctcggtgaagccgcctcgtccccgccccgccgcgccccgactcacatcgccccgcggcccgggcggcgccgggccccgctcccgggtcccgctgcagcagccgccgcccgcccggagctaaggcctccccgccccgccccgccccgcggccgcggggtcggaggtcaccggcagcaccaacgagacgctgcgggctggcggacccgagcgggggcgaccggcacgcagcctagaaggtccctttggaggactttgcagtcgggagcagtgagcatgcgcagacgccagagggcgctcctggccaggggctgagcaagcccggaggggacagggcggagcctgcggcggaggcggggcgcggaggcggggctgaggacaccaaagttgggggtggtccggggagcggaaaggggacggagggttgggcgagaaacgaagggaaggggagagggtctgaagggacctgaaaggagaagggcaagacgatggaacctggaagagggttgaggggaggggaaggggccagggggaccactggggacaagggggagagaactgaagggaaacacgcggaggagcggggctgggagaccacagggagagtttggggagacctgggaactgcggagagacagggctgcgggcccggcgaggcgtttccattcagcgaatggttgaaaacccagcgtaaacgcggctcccggcgtctgctggatgcctgccgggcgcagtccgagccagagagcccttgcacctgcatggcagaggccatggagcccgcacatttccaccctgagatcccataaatgtggttttgttttccttttttttttcctccccccaatctgcagctccaggcccctccctgagccgcccctctccaccagccggggaggggcgggcgggggccgctggggcgtgggagaggaagggccgcgctattagggcgggcgggggcggacgggggcgggcgctgaagccttggggtggggaccgggtgaggggcctgacggcagagtcggtccagaactgcccggacagcgacgcacagcgagggtgagaccccagcggagtcctggtcccctcccctaaaatcccagcagccagaccgggaaccccagcggactcgggaaacaccgcgtcccagccccggaggcgggcccgccaagttccagaaaaa

SEQ ID NO: 36161 - DNA, 2300 bp, Homo sapien
aggatgtatcagatagcccactgaggagggactgcattgagtggaaatggggagaggcctctggtctgggataggtatggatcaggggcaggagtgagaggggggtgtgggggctgaaaacgtatgaggacgtttggggaaacatgagcaagaattttggatgtgggcattttggatagtgcaaggagaatggggatatgagggatcctaggaatttccgggcagtggaagcatttgggggcatccaagagaaatggtgggtccgtgggcatagcaggagatttgttgagtgaatgagggggttctgagggctccaggagatgcgatgatgtgtccagggcggagagggtagaggtgggttgggggagccagaggctgcaggacaggctacaggactgtcaaggggaatttctacatgcccgtaaggaatgaggaggtctgggtgcgcgctgtccccggatccccgcccccagccccggtgctccgccgcctgcccgcccgcccggggcttcctagggagggagtggagactgcggcgcggcgcggcgcggcgcggcgcggcctcggtgaagccgcctcgtccccgccccgccgcgccccgactcacatcgccccgcggcccgggcggcgccgggccccgctcccgggtcccgctgcagcagccgccgcccgcccggagctaaggcctccccgccccgccccgccccgcggccgcggggtcggaggtcaccggcagcaccaacgagacgctgcgggctggcggacccgagcgggggcgaccggcacgcagcctagaaggtccctttggaggactttgcagtcgggagcagtgagcatgcgcagacgccagagggcgctcctggccaggggctgagcaagcccggaggggacagggcggagcctgcggcggaggcggggcgcggaggcggggctgaggacaccaaagttgggggtggtccggggagcggaaaggggacggagggttgggcgagaaacgaagggaaggggagagggtctgaagggacctgaaaggagaagggcaagacgatggaacctggaagagggttgaggggaggggaaggggccagggggaccactggggacaagggggagagaactgaagggaaacacgcggaggagcggggctgggagaccacagggagagtttggggagacctgggaactgcggagagacagggctgcgggcccggcgaggcgtttccattcagcgaatggttgaaaacccagcgtaaacgcggctcccggcgtctgctggatgcctgccgggcgcagtccgagccagagagcccttgcacctgcatggcagaggccatggagcccgcacatttccaccctgagatcccataaatgtggttttgttttccttttttttttcctccccccaatctgcagctccaggcccctccctgagccgcccctctccaccagccggggaggggcgggcgggggccgctggggcgtgggagaggaagggccgcgctattagggcgggcgggggcggacgggggcgggcgctgaagccttggggtggggaccgggtgaggggcctgacggcagagtcggtccagaactgcccggacagcgacgcacagcgagggtgagaccccagcggagtcctggtcccctcccctaaaatcccagcagccagaccgggaaccccagcggactcgggaaacaccgcgtcccagccccggaggcgggcccgccaagttccagaaaaactctggggatctatcgagagggcagttggcgggactgggcactccccttccttctccctcccactgtccccagaaatcttcccatccctccacctccccaagccctaagtcctctcgggctctgcccttcagggcagcgggtgttggggatgtccagctcctgagccctcttgcacggaggctctgcacggaggcaagacaaggggttcagctctgtcccttatctgaggtgggagggggaagggaattatggaaggaatccagctggcctgttagtaagggtgttccagtgctaggtggaggtggagtttggctgcctttggggagattggaagggtgaggaatagaggcctgatttctgagtgttgtttctgtgttggacaattctatgcaaactagagccaaaatggaagagggtgcaagtcccctcctggggccccagacgccccctcctttcttgctgcctggagcaggggcagtgctgttagtggctactcctggtgtgaacagcccatcctggccaccttccacaggaaacctgacctgaaggacagaaga

SEQ ID NO: 36162 - DNA, 2300 bp, Homo sapien
gtagaatgggatcaatcagagctcgggacagacatacaaaaaccctggagaaaaaaataaccagagcaaactttttaataatatttactctgtgccaaggactcttctagaatattacataatatagtccatcctcacaataatcttatgaggtaatctctttcattccacttgacagttgaaacaagttaattaacttgcccaagatcataccagaggctaagggaagccttagggggacctggcttctgagagctgggatagattctgaaagtagctgggcacaggagggtcatcatcaaatccctggcctctaagactgggccagggattcgtactggggttgaggtgagggtttggactgtaacagttaatattgcttcccagcactgaaccctcctcagcaccgcccctccactcccacttcaaatgtcctgtgccacccttccctccttcctggcttcacacccacctgcttccttcctcttctgtccttcaggtcaggtttcctgtggaaggtggccaggatgggctgttcacaccaggagtagccactaacagcactgcccctgctccaggcagcaagaaaggagggggcgtctggggccccaggaggggacttgcaccctcttccattttggctctagtttgcatagaattgtccaacacagaaacaacactcagaaatcaggcctctattcctcacccttccaatctccccaaaggcagccaaactccacctccacctagcactggaacacccttactaacaggccagctggattccttccataattcccttccccctcccacctcagataagggacagagctgaaccccttgtcttgcctccgtgcagagcctccgtgcaagagggctcaggagctggacatccccaacacccgctgccctgaagggcagagcccgagaggacttagggcttggggaggtggagggatgggaagatttctggggacagtgggagggagaaggaaggggagtgcccagtcccgccaactgccctctcgatagatccccagagtttttctggaacttggcgggcccgcctccggggctgggacgcggtgtttcccgagtccgctggggttcccggtctggctgctgggattttaggggaggggaccaggactccgctggggtctcaccctcgctgtgcgtcgctgtccgggcagttctggaccgactctgccgtcaggcccctcacccggtccccaccccaaggcttcagcgcccgcccccgtccgcccccgcccgccctaatagcgcggcccttcctctcccacgccccagcggcccccgcccgcccctccccggctggtggagaggggcggctcagggaggggcctggagctgcagattggggggaggaaaaaaaaaaggaaaacaaaaccacatttatgggatctcagggtggaaatgtgcgggctccatggcctctgccatgcaggtgcaagggctctctggctcggactgcgcccggcaggcatccagcagacgccgggagccgcgtttacgctgggttttcaaccattcgctgaatggaaacgcctcgccgggcccgcagccctgtctctccgcagttcccaggtctccccaaactctccctgtggtctcccagccccgctcctccgcgtgtttcccttcagttctctcccccttgtccccagtggtccccctggccccttcccctcccctcaaccctcttccaggttccatcgtcttgcccttctcctttcaggtcccttcagaccctctccccttcccttcgtttctcgcccaaccctccgtcccctttccgctccccggaccacccccaactttggtgtcctcagccccgcctccgcgccccgcctccgccgcaggctccgccctgtcccctccgggcttgctcagcccctggccaggagcgccctctggcgtctgcgcatgctcactgctcccgactgcaaagtcctccaaagggaccttctaggctgcgtgccggtcgcccccgctcgggtccgccagcccgcagcgtctcgttggtgctgccggtgacctccgaccccgcggccgcggggcggggcggggcggggaggccttagctccgggcgggcggcggctgctgcagcgggacccgggagcggggcccggcgccgcccgggccgcggggcgatgtgagtcggggcgcggcggggcggggacgaggcggcttcaccgaggccgcgccgcgccgcgccgcgccgcgccgcagtctccactccctccctaggaagccccgggcgggcgggcaggcggcg

SEQ ID NO: 36163 - DNA, 2300 bp, Homo sapien
ggggtctgcccagagtccagagtggcaggatacaaagggacactctcctgggccacagtttctcccagtatcagggagtggggagaagtaggaaccagcctgggactaccaagttccctgtgttctgacttgagctctgggcatgtaggacccagtgcccttctctctggcctcccccactgcagagtccctcaaatgttcctggactcatcgaatttctctagagcagggagtcttggacacatgctcatctcagtagatgccgagtgcccagtgctgtgcctcatcatgctagaaattcccttgatgtcagcataaaaggaagcctggagccctgggttgggagtccagacccccaggtcgcactggggattgtcccacttgctagctgggatcctggctaagccaatcagtcctccctgcgtccaaaagtggctgagtgaattaaatgggaatgtgtgcagacgtgctttagcgttaactgggtaaaaggcgtggttactggatgaatgaatgagggaatgaatgaatgaaacgttcccctctccctctccctctcccagctgatcttctcctggcgctgcaccgaggcggagggacagcgctggcatgagaaccacttctgttgccaggactgcgccgggcctctgggcgggggacgttatgccctgcctgggggaagcccctgctgccccagctgcttcgagaaccgctactcggatgcaggctcgagctgggccggggcactggaagggcaggcattccttggtaagggagaggatgcagagcaaagcgggagggagcttgggctgggctgtgggggttctcccgggctgggaccctcgccccggtcccacgccgtcccgtccctccaggagcgcccccaccgcaccccccagacccaagcctcggggcccgcagctctcaccgcgcatccctggccggagcgttccaagggccgcccgaacccaccccgcgccgcggtcggggttgcggcgccagactccctcccaggcgcgggaggcggacgccctctggtggaggcgggggaccctggcgaggactctcggcggcggcggcggcgcgcacggcccaggggctgggcggggcgggaggctgggcctcacccccactagctgcggtgtaggtccagctccgcggctctgagaccagcgtttccgacccggcccggaacaggggagactggactcgaccgaactgaaggaagggaccaaacctcggtgaactctgcaaccctctcccgaacactcctcgctgctgccggcggttccagcctgcaaactcagagggggctgcctggatccagtccccagcaggagaaccgacctggggacaaagcggaggcacccaaagggcaggagcaatgccgcctggagactattcgtgatcccaaggacacccctttctccacctgctcctcctcctctgactcggaacctgaaggatttttcttaggcgagcgccttccccagtcctggaagacccccggaagcctccaagcagaggacagcaacgcctctaagacgcactgcaccatgtgctagtggcgcagctcagagaggggatgtgagtgggaggaaaggggtctgtaaagcgggagaacaaggctagcctccccctaacaatcctagactgagacgcagtcaggcgcacgcccgcaagaggcggcgaggtgacaagtttggagtgcgcccccttcagtactgcgcgttctaagacttttggcggagactttcttggcaaaacccattccccaaagctacgcttcccctgctgagatagcccctacccccacctccacaggctgggacagccccgtccccaccatcctcctcccaagccaattaaatgatcacagcacgcgtgacagttaccggctggagagccggaggtgggaccgggagcaggggaccgtagaaccgggccgcgctcctcccctcctagagttcgtggaggcgcagcagagggccgtccctcttccggatgtcggactaagcgaacagcgcccccactgccggccggtagcagccggaagtgccagaccggaggtgcgtcattcaccggcgacgccgatacggttcctccaccgaggcccatgcgaagctttccactatggcttccagcactgtcccggtgagcgctgctggctcggctaatgaaactcccgaaataccggacaacgtgggagattggcttcggggcgtctaccgctttgccactgataggaatgacttccggaggtaaccgagcccgaggaacttggtccttttctggccctt

SEQ ID NO: 36164 - DNA, 2300 bp, Homo sapien
gtgcctcatctttcattgaatcctatatttattattctagaaaaaaagaacttacaagatagagaagaactaatagagcatctactttacccctcaggctgtccagtggggataattattaataaacatttaatggaaaattcaaagatcttccaatttaatttttaaaaatagttttataccaaatattataaggatttattaagcagattaaggactttgtgaaataagtgcttaacttagctgagcacgcatatatcaaagtaataaaagaaactaacatcagagtctccactgagctacacatttgtgaaaggtgcccactgcagttacagacacctcaggtacccagaggcggcagcactggacacttaggacgttagtatttaaggagatttttattaaagaagagttccctgctgcataagccaatggctattgtgagggaaatgtccctttgcctttaatttatttacgtactgggtatagatgaatgtctcagttgcatctgaaattgaatcattctaaagagaagaaaataagaaccaggtaaaaactgactagatgctgccaaatcaaacccaaggtctcctaaccgaaccttaatgggcctgcttctctcccagggcaagtagttaagagtctcattccaggaaccctttgtagttagttggctggcatgtttacttgctgctgtagccagccaagatgagtgcacctaggccctcaaaaaggatttttttttacctcaatctagcctgaccctcatatctgtggttgcctctgagacgaacatccatgctagtataaaaatagttaggaatgcccttggcagaactgaagctcttattaaatggtggacagagctcttgccagctttgatccagcccctcagtctcggagttatggggcagggttggggggcagtgctacactgtaaagaatttccaggctgggcgcggtggctcatgcctgtaatcccagcactttgggaggccgaggagggcggatcacaaggtcaagagattgagatcatcctggccaacatggtgaaactccgtctctactaaaaatacaaaaattagctgggcatggtggcacgtgcctgtagtcccagctacttgggaggctgaggcaggagaatcgctggaacccaggaggcagaaggggcagtgagccgagatcgtgccactgcactccagcctggcgacagagcgagactctgtcttaaaaaaaaaacaaaaacaaaaacaaaaaaaaaaaaagaatttccagatgtctcttaaaatgtcatgaataaaattggaaactgtagaagtgttaatgtgtcctatggactcaatagcagagtttatttttgtttttaatggcaaggcttctagagtcaatgattgtatgagtttgctactctggctgtgcttacagcttcatccaagtacaagggaagaaccaatgaggtggattggctgacagtggggcatgccccagcataagccctagagaggtcgacagtagtgcagaatgaaaacttggtcggggatggcgggtggtgggtgggaggagggtgggctggccgggagggagaaatggagtttgttctacttactgataaagctttgtgaactaattttatacaattcataaaatttggtgccttgtactcaattacggtttgcatggaattgaaaagattaagggaaaggatttcttcttgtcatttcaagtggcaaatgggtctgtgtagtgtttaaaggacatctggtatcacagacttttaaaaagcatttcatgtctcttgtgtgtgaatgcaaattattcttaccagcaagttctgaaattatgttacaatgtccaaattctttgtatttgtgactgttcatcaaatggctgcttttcaaggcagactgtgtactccattgtttttcacttcccttgtcatgttccatacattgacttgggcctttttaaatcaggctggggggctaccccttcttaaatgaatactatatccctatctgaggttacctcttgtgagtggaagggttgctttcccaggtggttgggagagcacaaatgttgagaaaaggccttttagtctttatcaaaacaatgactaatgctgggcaacatatagcagaagtcaaacaaaaatgattcctcctgaaatggtaccttcattggttctgatgttcttttgcaaaaaatgtccggaagcagtatagaaaaccccctgtatgtgaaccttagattgtaaggcaagccagtgcactgtgtaatatgcaaagggagtggtgcaaaag

SEQ ID NO: 36165 - DNA, 2300 bp, Homo sapien
caggtgtgagccactgcacccatccggcctgaaacaggtgtttttttactgtagcagtgaagaataccttgacctctagcacaacttggtgcagttgccttgatttgtgctaaggcagcagttttacccattgctacttttgtatcattgtgcaaatatcatcacagtgacaatgcagatatgtctcagtattattaggaaaatcgttttgatctcaggcaccccactatccccccagcccaaagggtctcagagatccctaggcctttccaggcgacacttttttttttttttttttttttttgagatggagtctcactccgttgccaggctggagtgctgtggcacgatctcagctcactgcaacctccaactccctggttcaagcaattctcctgcctcagcctcctgagtagctgggattacaggcacacgccaccacgtccggataatttttgtatttttagtagagacggagtttcaccatgttggccaggctggtcttgatctcctgacctcatgatccacctgccttggcctcccaaagtgctgggattacaggcgtgagccaccgtgcccggcctccaggccacatttttgagaacactgatctaatacatgctcacatcactgagaaacttttcctcctgtattgctattctgggagcatcccttccattggaagttttaagtggctcccaaattcttcactcagcaaaagcaccttgttatggaactaacattgaataagtaacaatctttcttctccaagaattttcttggggattgttgagtaagggaataagacatataattagagttataatgttaagaattccttaaaaagaattatgttaactgtgatggacgacaaagggagagctaaattctgaatctaactctgaggccttgaacctcatgataaatcccgaccaaaccaaattgaaacactccacttcctctccttctatcaaacctcttttaaaagtgcaagttgttaataaattgcctacacagcgcttggtccaggcattgtagtttcccccttcctattgtgtgtggtgttcttttttttttttttgtgcttacctagttctcctgtttacaggtgtgtaacttgagccactactatagctaatgtctgtttcttttacttgtccttatatttaaatgtaagtctttatctgccttagctatgtgttgggtgttgaaattgttgatcttattttgggagactcccatcccctccccccactaccaccccgcaagtagtttcaagacagtgcacctaggagactgcttaacctaagccttttgtagcttaggtgctgttctgtttcccaatggaccactaccaagtcagtctggtttatttcccaagccttacaatctgctgaacttcttcagttccggcagcgatcctctaacttgtgggggatttccataaaacagctgaatctctcttgggtcatctgtggcaaaagccagacacgtgctcacccgcctgggagccaatagtaacttttgcaaacgctgcctccggaaaccccacggtttgagggctgctgctttaggaacaacacagaaataacgtcttttaacagaataaaacaaaacatacggacgggatagtgagaaagcctttgtccttcgcagtggggagaggtgttaaaggtgaaccgaaaagagtatgggaaactcatgtaaaatacctttacagttccccgggaagaagggggcggagatgggctcgggagcgtctctggccctttaaggaggagggacagacataagagtctgtacctttaagagtctctttgtctggaaaccttcttatttaccctcctgtgcttcaaccaaacttcgaccagctattcacaacgtccccctacgccgccgccccttacgccaggctcaaagcggccgcgcgtttgtggctgaccctaaactttgcgcctgcggcgcgaaccctcggaacgggtgccggtgccggggtcgcggcccagcgctgcgccgttggcgcaatgcagggcctgaggggcggggctccagcgggcgggccaatagacgggcagggggcggggccgtgttcggttgtctcgcgccctggtgacagctcgcgcgtgctgatgatggcggtaaatagagggggccgggggaggggacggaggaggtggggaggcagcaaagtgggtagctccagggggtagggggaacgggggccggggaggccgcgacggccagggagcccattctaagactcggaggcggggataggagtctccggctcactagccctc

SEQ ID NO: 36166 - DNA, 2300 bp, Homo sapien
tcatgcctggaatcccagccctttcggaggctgaggcgggcagatcacctgaggtcaggagttcaagaccagcctggccaacatggtgaaaccccgtctctactaaaaatacaaaaattagccaggtgtggtggctcacacctataatcccagctactcaggaggctgaggcaagagaatcacttgaacctaagaggtggaggttgcagtgagccaagattgcaccattgcactacagcctgggcgacagagtgagactctgtctcaaaaaaaaaaaaaagtttttagcctatctctctcatgagattgtcagcttttttttttttttgagatggagtctcgctgtcacccaggctggagtgcagtggcacgatctcggctcactgcaacctctgcctcttgggttcaagcgcttctcctgcctcagcctcccgagtagctgggattacaggcgcatgccaccatgcctggctaatttctgtgtttttagtagacacgaggttttaccatgttggccaggctggtctcgaactcctgacctcaagtgatccacccaccttggcctcccaaagtgctgggattacaggtgtgagccactgtgcccagcctgattgtcagcttcttgaagtcaggggctaagtcctctgcttgtacatctctgaagccctaagaaaagtgttgggaatggcttatatatgtaataagcatgtgggattgtggcagtctatccattaattcttgtagcgtatgaaagaggaatcttgctttccagtttttacctttttttttcttttttttttttggagatagagtattgctctgttgcccagactggagtgcagtgacacgctctcaactcactgcaacctctgcctcctgggttcaggtgattctcgtgcctcagcctccccagtagctgggattacaggcgtgcaccgccacacccagataatttttgtatttttagtagagacatgttttcaccatgttgatcaggccggtctggaactcctgacctcaagtgatccacccgcctcagcctcccaaagtgttgggattacgggtgggagccactgtgcccagccctgccttcttttgttttctacttaactaaatgtgtatagctttccatttttattgcaaatagcctatggaaataaatgagaaaactcatattttagagactggaaggggtgagctggggcttgaaagttgatcttctgatccagatcctgaggtctctctgctgtagtgtgctgcttgcttcccaagttggctagacttctaaaaattctccaacggtttgccattggtttcaggatacagtctaaacttcttgaggcatggtagataagacctatcacagcttggatcccatctacctttccctgcttatgctcagacactcccctttgctgcttccataggaccatttactagatctcaaagagggaggaggctaagctgaggaagagtgtgcagaagaagggagcagctacttcctttggcatgcccaaatgctgttactttcattttacttatgtaatatatgataatatacaaaagattatacgtaaagtctgtgggagttagactttacatgtagaccatctgtgagcccaccactcaacttaagaattaaaacatgatcaacactattaaagttccctgtgtgcccctcactgttttctgtagagcagggtgggttttaccacatgctgcctctcctgctatttccccctacctttctagaaaaggctgtcagtgagaggattcccctcacccccaaccaagaactgctgaggtagtgccagattgctgtctggcctcattccggggggagtcatttgactctactctggggtttgccagtgaaagtcttgatgatgaataggatctctgtcccttgcaggtcagaccgggaagctgatgtatgtgatgcacaactcagagtacccattgagctgtttcgccctctttgagaatggcccttgccttattgctgacaccaactttgatgtgcttatggtgaagctcaagggctttttccagagtgctaaggccagcaagattgagacccggggcaccaggtaccagtactgtgacttcctggtgaaggtgggcacggtcacaatggggcccagtgcccggggcatctctgtggaggtaagaccttggtgaaaataggagcaggatgttctgagggggctgcttagcaaagggctctgaagattttccagttcttctctttttttttttttgagacagagtcttgttctgtcacccaggctggaatgcaa

SEQ ID NO: 36167 - DNA, 2300 bp, Homo sapien
tcaaaaaaaaaaaaaaaaaaaaaaaagaggaaacttaagtacagcacaaagaggttaaataacttgcactaggtcacacagttaatgggtggtacactcaagactcaaagcccagcaacctggcttgatgtccatgctcttaaccactaactagactgcctgtataaggatgtagtgcctgttaaaacattaaggaaaatcgattaaaaaattaataaacaatagtacaagcagtacttagctatatagaaatcaagaaaacagtcatagatgacattgctttatgatcaactaaatgaatctattaaggtagagtccttctgttgctaaaaattgtcactactctatcagaaaaaaacactgataaacgatgttgctaatgtgccttattttgaaatacaaaagaatccctaaactgacgctacaagtgacagaagtcctaggattctgaaaacgttgataagggggccaacagagagccctttccctggagctgccttctccatttaaagagcaggggtggctgggcacggtggctcatgtctataatgccaatactttgggagaccaaagcaggaggctcgcttgagttcaggaattcaagacctgcatgtacaaaacagcaagaccccatttctatttctttaaaaaaaagaaagagcaagggttccagggttctacgctgcatcctttccatttccattcctcacatatcttgcttccattaaggaacacaggaggatcgtgtcaatcgtaggaagcaagagtgcaatcactgagaaacctgcaagaacctgggctaccaggaggaaaagtatttcccctacacatgcttttgtatgagaagcctatatccactggcttcaaatatcctggcctccggatttctcccacgggaaaaatgctcacatctactgagataagaaaaaaatgttctgggacctggcaccttacaactaacgcctccacgagcactggacccatacctttccctgccacctcatcttctttcaactgagacttaaaacatatgaaagataaaaactccattgaaactagaccaaccatggaattaaacatagtgggaaacgggtcctaaagagataaagtgcctggaaccatgatctccttattatcaatacccttttttcctctagacccaagatcttaaaatgagcaaattagaaacagacacaagcgggtctaactgtatttgatggctgagggaagagcaggcgaaaatcttaaaaaatactatctcctgattgcttatggcccactccctccaaccctgtctgcaggtgggtcatagtccaaagaccctatttccaaccctgaggtcccactgcaggcagtactatggcctcacgggaaggaagatgtatccagaagagaatgaggtatacaaccattgataggttcctgggataaaaagtttgctttgtcgacaccagcgtggccaatatggtgaaaccccatttctactaaaaatacaaaaagtaaccgggcgtggtggcgggcgcctgtagtcccagctactcgggactacaggagaatcgcttgaacccaagaggcggagtgttgcagtgagccaagatcgctccactgcactccagtctggcgacagagcgagaccccgtcttaaaaaaaacaaaacaaaacaaaaaaaaaacctttgctttcccgccttccaagaggaaggggcgcatctctgaggaaacaagcccggggaacccgcagcccggacggcatcctctcatctacacaacccgaggacatctccctcagctcccagaggacggcggaccatggtcaaggtcctctttccggcctttcacaactccaagccccgccccacaaaaccccctgcagtcctaccaagtcactcccatggcgtcgggccaggaaggtggcagaatcacacagtagaaacgcagggttccctgtccgcccacagaaactccttcagttccccaacacaaccttctgtctcagaagggactccggaaatacgtaaaaacagagcgccgggtccacgccttccccaaggaatggggcgtgtctcggcacccctcggtgacgcctccactgacatcatctgcggattcccgccccgaggtttctaaatccagacattcccgtttggctgagcactctaggcctacatccatgaagctaggagagcgacactcaaagactgcactattgagagaagctaacgttaaaggcagtgaatatattcgggagtccagctccggaacccgggagctcttttagtgggaggggcggcgctgatggcg

SEQ ID NO: 36168 - DNA, 2300 bp, Homo sapien
gcggtgaaaagtggtctcattttggatacactttgaaggcaaagtcatcagaatttccttacagatcagatgtggggagggagagacagagagaggagatggtgggggcagggagagagaggagtctaaagtttatctcgagcaaatgaaagaatatgctactaactgagacagggaaggcaatggtgagagaagcaggtttggagggaaggtcaggatttctgttttgtacatgttaaatttgagctgtctgttagatttcaaattggagatgccaaataggcagttgaatataagaatctggatttcatggaagagatcagggctagactataaagttaggagtagtcactcaaggatggtatttaaaccatgaaacttgccagcaccagagaatatttgaagaggtcagaggactgaggagaagaggttgcaataagagtcagccaaggatactgagaagtgaggtggcagtaaaacaggagtgttgatgtcttagaacccaagtaaggatactgtggccagaaggccactattcaattgtgtcaaatattgctttagatgagatctgagaaacggatgaagcacctcagaggtcaacactccctccctagtgagaaaacatcagacgtctttcaattcatctctctcgctctttggctgctaaacaatgtgttttctgctcataacacttcccattcgtttttcagttctcagcttaaaggtcctgctgcaatcggagaagcttctcaagaccaatgctattgttaccagggaaacgatactttatcatggaaatatattattctaagagtctacttaattgcctctctgctgggcttgactgtaaggtccttaagttagacgtgcctgtgttgtttacttctgtacccaaacattcgatagaattccgagcatagcgcaaagctcgtagtgggtatcccataaatatttacaaaaccaatggatacatgctaggagcacttagtggcgcgatcgattactgttggcctaacttcgggggtgtctagaagggagtgcctaaaactaggagtggacgcggagggctctagacagggttcagtctcctttgcaagtgtaatacggacccctttgttgactcgaagcaattcccctgccagacactttttagctgcccaccccgccccactactggccactgtcttcctcggacctcatcccagacactcacccagccgcgtggtgcgttcccgcggcgccgcgggcttgtccccagtcccatgctcggcctcgagttcctcctgttgctgccgtgcttgctgcaaaatccgtcggctcagccggggccccacatactcttcctccgcttctcctgtcccgcgaccccgccgcttctcccggacccccgcccgcaccgcattcccagccaggatctgatcggccaggggcgcatgtttttcctgaccccccaccccacgggccgccttgaatttgggcatttttctcgaaaaagttgccgggaaggatcgcacgtggggactgaagaaaggccaggatgcgcttgcgcggtggactcccagcgcccaagaggccgcccggcgatcacagcgccccctagcattcggaggccagaagcgccatcagcgccgcccctcccactaaaagagctcccgggttccggagctggactcccgaatatattcactgcctttaacgttagcttctctcaatagtgcagtctttgagtgtcgctctcctagcttcatggatgtaggcctagagtgctcagccaaacgggaatgtctggatttagaaacctcggggcgggaatccgcagatgatgtcagtggaggcgtcaccgaggggtgccgagacacgccccattccttggggaaggcgtggacccggcgctctgtttttacgtatttccggagtcccttctgagacagaaggttgtgttggggaactgaaggagtttctgtgggcggacagggaaccctgcgtttctactgtgtgattctgccaccttcctggcccgacgccatgggagtgacttggtaggactgcagggggttttgtggggcggggcttggagttgtgaaaggccggaaagaggaccttgaccatggtccgccgtcctctgggagctgagggagatgtcctcgggttgtgtagatgagaggatgccgtccgggctgcgggttccccgggcttgtttcctcagagatgcgccccttcctcttggaaggcgggaaagcaaaggttttttttttgttttgttttgttttttttaagacggggtctcgctctgtcgccag

SEQ ID NO: 36169 - DNA, 2300 bp, Homo sapien
agcccaggagattgaggctgcagttagctatgattgtgccaccgcactctatcctgggtgacagagagagagagagactctgtctcaaaaaaaaaagaaaaaaagaaaaaacggagaatatgagatactaacgaggaggctactgtgataatccaggtgagagactgtggtggctacgacaggatggtgttccaaagcggtgaaaagtggtctcattttggatacactttgaaggcaaagtcatcagaatttccttacagatcagatgtggggagggagagacagagagaggagatggtgggggcagggagagagaggagtctaaagtttatctcgagcaaatgaaagaatatgctactaactgagacagggaaggcaatggtgagagaagcaggtttggagggaaggtcaggatttctgttttgtacatgttaaatttgagctgtctgttagatttcaaattggagatgccaaataggcagttgaatataagaatctggatttcatggaagagatcagggctagactataaagttaggagtagtcactcaaggatggtatttaaaccatgaaacttgccagcaccagagaatatttgaagaggtcagaggactgaggagaagaggttgcaataagagtcagccaaggatactgagaagtgaggtggcagtaaaacaggagtgttgatgtcttagaacccaagtaaggatactgtggccagaaggccactattcaattgtgtcaaatattgctttagatgagatctgagaaacggatgaagcacctcagaggtcaacactccctccctagtgagaaaacatcagacgtctttcaattcatctctctcgctctttggctgctaaacaatgtgttttctgctcataacacttcccattcgtttttcagttctcagcttaaaggtcctgctgcaatcggagaagcttctcaagaccaatgctattgttaccagggaaacgatactttatcatggaaatatattattctaagagtctacttaattgcctctctgctgggcttgactgtaaggtccttaagttagacgtgcctgtgttgtttacttctgtacccaaacattcgatagaattccgagcatagcgcaaagctcgtagtgggtatcccataaatatttacaaaaccaatggatacatgctaggagcacttagtggcgcgatcgattactgttggcctaacttcgggggtgtctagaagggagtgcctaaaactaggagtggacgcggagggctctagacagggttcagtctcctttgcaagtgtaatacggacccctttgttgactcgaagcaattcccctgccagacactttttagctgcccaccccgccccactactggccactgtcttcctcggacctcatcccagacactcacccagccgcgtggtgcgttcccgcggcgccgcgggcttgtccccagtcccatgctcggcctcgagttcctcctgttgctgccgtgcttgctgcaaaatccgtcggctcagccggggccccacatactcttcctccgcttctcctgtcccgcgaccccgccgcttctcccggacccccgcccgcaccgcattcccagccaggatctgatcggccaggggcgcatgtttttcctgaccccccaccccacgggccgccttgaatttgggcatttttctcgaaaaagttgccgggaaggatcgcacgtggggactgaagaaaggccaggatgcgcttgcgcggtggactcccagcgcccaagaggccgcccggcgatcacagcgccccctagcattcggaggccagaagcgccatcagcgccgcccctcccactaaaagagctcccgggttccggagctggactcccgaatatattcactgcctttaacgttagcttctctcaatagtgcagtctttgagtgtcgctctcctagcttcatggatgtaggcctagagtgctcagccaaacgggaatgtctggatttagaaacctcggggcgggaatccgcagatgatgtcagtggaggcgtcaccgaggggtgccgagacacgccccattccttggggaaggcgtggacccggcgctctgtttttacgtatttccggagtcccttctgagacagaaggttgtgttggggaactgaaggagtttctgtgggcggacagggaaccctgcgtttctactgtgtgattctgccaccttcctggcccgacgccatgggagtgacttggtaggactgcagggggttttgtggggcggggcttggagttgtgaaaggccggaaagaggaccttg

SEQ ID NO: 36170 - DNA, 2300 bp, Homo sapien
ttgccaaaatacattttgtacattcacctaatggtatattatgtccctattacaaattatgtcctagaatatttaatagcatggaaaagtgttaacagtatttttttaatgaaaaaagcttacaaaacagtttgtgatgattccatttaaaatgtgtgtttattcatagaacaaagattagaaaaataaacattgatatattaaagggttatttcatggcaaattgcaaatgattatttcctttttttgtggcttatttgtatttttgaagttttctacaatgtaaaagaatattttatgatatgaaaactacaatacaatttataatataagaaagaataattcggccgggaacggtggctcacgcctgtaatcccagcacttttggaggccgagaccggcggatcacgaggtcaggggttcaagactagcctggccaacatagtgaaaccccatctctacgaaaaatacaaaaattagtcaggcatggtggtgcgtgcctgtagtcccagctactcgggaattgcttgaacccgggaggtggaggttgcagtgagcccagatcgcaccactgcactccagcttgagcaacagagtgagacttcgtctcaaaaaaaaaaaaaaaaaaaaaaaagaataattaacagaaaatggttagacacttccttagtgtctcctaagtcaggaggaccccagtagggcagggatcctcatggcctcctcccatttggagcattattggaggtctttttcggcctcttcgtcaagtggaatctagcttccggtaaaactacaaagtaaccaaaagtttgggaggtggaagaaatgcaaccggtagatctcacagagtctgtgcaagaaactgattcaatgagaatctagtttctccgtccacagtttctccaaacagaaactaaggccgactttaggggcttgtccaaacctaggcaagcaacttaacaaggtgaggccatgactccatggcctttccgttctgttatatgctgacttagactaaagctctcatactttaaagtgcacagaaatctagttaaaatgcagattctgattcaggttaggggtgggcctgagagtctgcatttctaaccagctcccaggcgatgaccacgcacgggacaggtctgggatcacagtttaactagcaatggtgtagaacacagaatctgcagcaagaaggccagcttcccaatcctagctctgccacggaccaactgaatgacagttgcctcggtttccgagttttcgtgaagatgtagtgagtcattacatcgtgaggctttcgagcagcgttcactaagaactagctctgacattatttatcgcattccttagagcaagcagccggtgaagtagggtttgacgaatgaataagtgaatgaatgacctttggagaaaaattgtttcctgggtgactagagtccgagaagcaaaatgggagggcccgtgggtgggtaggaggcccacctcctagaaagttctctgcacccggtggtccagagggcctggagtgcccggaagccggccggcttgcgctcagcggcccaatggggccgcgggagggaggggagagcgctcagccaaccctttccgtccggggcgccgcagccccgcccctcggagcgttgcgacgtccgagcattccacggttgctacatcgtcgcgaggggcggggcgcctgtcagggaagcggcgcgcgcgcgcgggcggcgggcgggctggggatccgccgcgcagtgccagcgccagcgccagacccgcgccccgcgctctccggcccgtcgcctgccttgggactcgcgagcccgcactcccgccctgcctgttcgctgcccgagtatggagctgctgtgttgcgaaggcacccggcacgcgccccgggccgggccggacccgcggctgctgggggaccagcgtgtcctgcagagcctgctccgcctggaggagcgctacgtaccccgcgcctcctacttccagtgcgtgcagcgggagatcaagccgcacatgcggaagatgctggcttactggatgctggaggtaccgcccggacgcgtccccctcccccaccgctcccgggtctggacacaccggggccgccctgtcgggacatcccggtccccacagcaatctgcaggatgctccgaggctaagactcccggggcctggcctttcactagggcacccacgccagctgcctcccttgctttcccgagccctaatcggctcctcccgacagtgactgccagtcacttggcaccctaactgtgcctctcttcgggccg

SEQ ID NO: 36171 - DNA, 2300 bp, Homo sapien
tataagtcaataagagaaaacaaacatccctataaatgaataagctaaggacatgaatgggtaatgtacataagaaatgtaaatgtctagtaatatgccaaaatagatttattattactaataagccactttcactctctagttggcagagttgttttgaaaaatagatatgtaatgatggtggaaaagattggtttaactattcagcaggaaaatttggcaattagaagtgtatcaaaagccttagaatgtttcataaccttagattgggaaattccacttctagaaattaattcacttctagaaataatcatgagtgtgcacaaagatattaccacaaaaatattttacagtattatgtctaatagagaagaactagaaataatttaaatttccaccaatacaggtttgccaaaatacattttgtacattcacctaatggtatattatgtccctattacaaattatgtcctagaatatttaatagcatggaaaagtgttaacagtatttttttaatgaaaaaagcttacaaaacagtttgtgatgattccatttaaaatgtgtgtttattcatagaacaaagattagaaaaataaacattgatatattaaagggttatttcatggcaaattgcaaatgattatttcctttttttgtggcttatttgtatttttgaagttttctacaatgtaaaagaatattttatgatatgaaaactacaatacaatttataatataagaaagaataattcggccgggaacggtggctcacgcctgtaatcccagcacttttggaggccgagaccggcggatcacgaggtcaggggttcaagactagcctggccaacatagtgaaaccccatctctacgaaaaatacaaaaattagtcaggcatggtggtgcgtgcctgtagtcccagctactcgggaattgcttgaacccgggaggtggaggttgcagtgagcccagatcgcaccactgcactccagcttgagcaacagagtgagacttcgtctcaaaaaaaaaaaaaaaaaaaaaaaagaataattaacagaaaatggttagacacttccttagtgtctcctaagtcaggaggaccccagtagggcagggatcctcatggcctcctcccatttggagcattattggaggtctttttcggcctcttcgtcaagtggaatctagcttccggtaaaactacaaagtaaccaaaagtttgggaggtggaagaaatgcaaccggtagatctcacagagtctgtgcaagaaactgattcaatgagaatctagtttctccgtccacagtttctccaaacagaaactaaggccgactttaggggcttgtccaaacctaggcaagcaacttaacaaggtgaggccatgactccatggcctttccgttctgttatatgctgacttagactaaagctctcatactttaaagtgcacagaaatctagttaaaatgcagattctgattcaggttaggggtgggcctgagagtctgcatttctaaccagctcccaggcgatgaccacgcacgggacaggtctgggatcacagtttaactagcaatggtgtagaacacagaatctgcagcaagaaggccagcttcccaatcctagctctgccacggaccaactgaatgacagttgcctcggtttccgagttttcgtgaagatgtagtgagtcattacatcgtgaggctttcgagcagcgttcactaagaactagctctgacattatttatcgcattccttagagcaagcagccggtgaagtagggtttgacgaatgaataagtgaatgaatgacctttggagaaaaattgtttcctgggtgactagagtccgagaagcaaaatgggagggcccgtgggtgggtaggaggcccacctcctagaaagttctctgcacccggtggtccagagggcctggagtgcccggaagccggccggcttgcgctcagcggcccaatggggccgcgggagggaggggagagcgctcagccaaccctttccgtccggggcgccgcagccccgcccctcggagcgttgcgacgtccgagcattccacggttgctacatcgtcgcgaggggcggggcgcctgtcagggaagcggcgcgcgcgcgcgggcggcgggcgggctggggatccgccgcgcagtgccagcgccagcgccagacccgcgccccgcgctctccggcccgtcgcctgccttgggactcgcgagcccgcactcccgccctgcctgttcgctgcccgagtatggagctgctgtgttgcgaaggcacccggcacgc

SEQ ID NO: 36172 - DNA, 2300 bp, Homo sapien
aatttataagtcctttattttttttctcttgcctaattgctctggctttggtatccattcacctactgaaggacagcttgggcctcagagttttgacaattatgaataaagccactatcaacatctgtgtgcaggtttttgtgtgcacgtaagttttcagttcatttgggcagataccaaggagtataactgccgggttatagaatagtacttttagtcatataagaaactgttaaattgtcttccaaagtgaatataccattttgcattcccaccagcaatgaatgagagtttttgttgcttcacattctcaccagcacttgatatgccaatgtttggtatctcagtcattctaataggtgcatagtggtacatcattattgttttaatttgcaattttctaatgacatatgatttagaacacctttacatatgcttatttgctatctgtagatgtttggtgagatatcagcttggttcttctgcccactttgtaatcagattgttgttttcttttctgttttttttttttgttttttttttttgagacagtgtttcactcttgtcgcccaggctagagtacaatggcacaatcttgctcactgcaacctccatctcccaggttcaagcgattctcctgcctcagtctcccgagtagcttttaatataccaaagaccacacccagctaatttttgtatttttagtagagatggggtttcaccatgttggccaggccgatctcgaactccttacctcaggtgatccacccgccttagcctcccaaagtcttgggattacaggcatgagccacagtgcccaggttgtttgttttcttattgttgagattttaagagttttttttgcatattgcgaataacaatcctttatcaaatgtgttctttgcaattatttccccctagtctgtggcttgtcttctcattcttttgacattgccttttgtggagcggaggttttaaattttaatgaagttcagcttatcggccgggcgaggtggctcacgcctgtaatcccagcactttgggaggccgaggcgggcggatcatgaggtcaggagatcgagaccatcctggctaacacagtgaaaccccgtctctgctaaaaatacaaaaaaattagctgggcgcggtggcaggcgcctgtagtcccagctattcgggagcctcaggcaggagaatggcgtgaacccgggaggcggagcttgcagtgagccgacatcgcgccactgcactccagcctgggcgacagagccagactccgtctcaaaaaaaaaaaaaaaaagaaaagaagttcagcttatcaattattttttcataaatcatgcctttggcattatatctaaaaagccatcccccatgaggccaagaggccatggccatgttagcccagctgcaaggctggccatcagttgtaggaaatccgtactcctttaggaacagtattgtgaatacatttagaaaaaaaggaaaatgatccagcagttaaaattcagagctggtttacaggatattgacatgttcaggcatacattaggcacttaaaagaattgtaataactattcaaaaatggggtagttatttaggcagcagtggctatcaggattgagagaagatggtgagcggctgtaagaatgagaaatactgttttaatttttattattattatgttttgagacagagtttcactcttgttgcccacccaggctggagtgcaatggcacgatctcagctcatcacaacctctgcctcccgggttcaagcaattatcctgcctcagcctcccgagtagctgggattacaggcatgcgccaccatgcctggctattttagtagagacagggtttctccatgttggtcaggttggtctcgaactcctgacctcaggtgatccgcctgccttggcctctcaaagtgctgggattacaggcataagccaccgtgcctggtctgttttaattatttttatctgaaggagtacctgagaatggtttggggaaccagtgatgcaatttagggaggcactagaggagtttgcagagataaaaaagagagaagagaacaaagctaagctcaaaaaggaagcaaagaaaagagatcactaagtgtaaaagatgcattttctcctcagcacaaagcagattccaggtgtatataattcaccattcagaaaaaaattccgtggcctgtcatgctggctcacacctgtaatcccagcactttgggaggccaaggcaggaagatcacttgagcccaagagttcgagaccagtctgggcaacatag

SEQ ID NO: 36173 - DNA, 2300 bp, Homo sapien
aagcaatggaaattagtaattatttggtaggaagatctgaagagtcctctgcccttcccccgtgaggcaccatgcatgcttccgcaagggagtaggttgccctgcgctgtagtttgctgctggcattccttctctcctaataggccctgtgctccaggaagagcatgaatgagaagaatcagggactacccttgaactttcagcctggatgactggcagaatattggttgcattaacaagttttaaaccaggaggaaaagatggccattaccatttaccatcattaactgaagaatagggaaaggtgtcaggctatgaatggggggaaataatgggtggaccttgaaatatagcactcttggcaaggaagtgtatttttctaggtactaaagatttgaggagaaatataaaaaacatctaggaaggattgctctgttctttattctcaagtaacttaagttcagttagggcaatgtttttcaaaactagaaaaaaaatttgtttaagagacagagtcggccaggcgcaatggctcaagccggtaattccagcactttgggaggccgaggcggccggatcactaggtcaggagattgagaccatcctggccaagacggtgaaaccccatctctactaaaatacacacacagataaccgggcatggtggcacgagcctgtagtcccagctactcgggaggctgaggcaggggaattgcttgaacctgggaggcggaggttgcagtgagccgagatcgcaccactgcactccagcctggcaacagagcaagactccatctcaaaaaaaaaaaaaaaaaaaaaaaaaaaagagtgacagggttggccaggcacggtggctcacgcctgtaatcccataatcccagcactttgggaggccagggcgggtggatcacctgaggtgaggagttcaagaccagcctggccaacatggcgaaaccctgtctctactaaaaatacaaaaattagccgggtgtggtggcgggcacctgtaatcccagctactagggaggctgagacaggagaattgcttgaacccaggaagcagaggttgcagtgagccgagatcgcaccactgcactccagcctgggcaacaagagcgaggctccatctcaaaaaaaaaaaaaaaaagacagggtcttgctctgtagtccaggctggggtgcagtggtgcaatcgtagctcaccacagccttgggctcaaacgatcctcccaccttagcctccccagtaactaagactaccggtgcatgccaccatacttggataacttaaaaattcttttggtagcaacagcgtttcttctatgttgcccaggctggtctcaaaatcctgacctcaagtgatcctctagccttggcctcccaaagtgctgggattataggcattaaaattaaattaaaaatgttttaattttttttttttttgagacggagtttcgctcttgttgcccagactggagtgcaatggcgcaatctcagctcacctccaaacctgcacctcccattttcaagtgattctcctgcctcagcctcccaagtagctgggattacagtatgcaccaccatgcccagctaattattttgtatttttagtagagacggggtttttccatgttggtcaggctggtctcgtccttctgatctcaggtgatctgcccgcctcagcctcccaaagtgctgggattacaggtgttagccactgcacccagctgaaatgttttaattttaactcattttatacacatgcatacaaacacacatctatgtgtgcgtgtgtgtgtgtgtgtatgtgtgcatatatatacacatatatatatattttttttttagatggagtctcgctttgtcacacaggctggagtgcaatggtgtgatctcagctcaatgcaacctctgcctcccgggttcaagtgattctcccgccttagccttccgagtagctgggattacaggtgtgcgccatcacactcggctaactttgtgtttttgtagagaggaggtttcaccatgttggccaggctggtctcgaactcctgacctcaggtgatccacctgcctcggcctcccaaagtgctggaattacaggcgtgagccaccatgcccggccaatatattataaaacaagactcactgaacaatacttaccctggccacagttgatatacttttgatgttttaaaattctattttgctgtttcatttttaaaacgtgctggtcatgattagcttcatgacttcatgaacagtaaaacgacttgccatttaaaaagcactaagttggg

SEQ ID NO: 36174 - DNA, 2300 bp, Homo sapien
tgacccacccagcaccgatccccaacgcatggtctccagcctgagctgacatcccatctaccccggtttctccagcacccaagcctacctcctcgtcaggtgacctccccggagcaccgactggggtcgcaggcgctctgtcccgccgcctccggagcctgcctttggggagtgggggtggtcgcaaccaccagccgcgaggagaggattgcacctctcccccccggccggcatccgaacagagccagtctccacccctgcagtggcgaagtgtttacaaagtccgcgccgcgccgccgatccagagctgggcaggaagtggggaagagggggcggaggagacaaaggggctggtgctctgctcagccaagtttcggtccccggcctgactctcccaccccctgtacaccctcggcgaggccaggaggctcatccggcgccgcgcacccccgcccgcagcccccgccccacgcggcataggtgcgggggcggggcgccacggaggctcaggtgtgggcggcggggccggggcagcacgggttcccggaccgctgcctcccggcgttggcaactcctccacgtgctatccaggaagtaaacaacatcatgaggagcgacttctttttctttttcttttttttgagatggagtctccctctgtcgcccaggctggagtgcagtggcgcgatctcggctcactgcaacctccgcctcccggattcaagctattctcctgcctcagcctcccgagtagctaggactacaggcgcacgccgccacgcccggctaattttgtgtatttttagtagacacggggtttcaccatgttggtcaggctggtctcgaactcctgacctgaggtgatccacccgcctcggcctctcaaagtgctgggattacaggcgagagccaccgcgcccggccgatttcttgactcttactacacgtcaggcactgtgacagactctttctgtgtatcatctcatctttcccccagctttacagaagaggaaactgagacacactgaggattaaggtcaagtgcccgaagtaccatagctggctagtgttaggatccaagcccagaatctgcgtcctgccaggcacctgcaaatggggacgaacacggcgcagctagaggggctgacaggctagggagaaaaccactggtagccgcgggcaccccacgccctgggagtgaggcggcaagggacaagtctcccgccccctagacttgcctcgcaaatacttgcgggtcgagggcgcgaaggcagcaggatgcagcgatagacttggactaggtggtccaggctctacttccaagtgggccattgacaggcggggcggccctcagcacaaaatcaccaggctggatgctccagggtttcccaacattactcgctcagaagaatcatctggggagctccttaatgagaaagattcccaagcccctcttccagagagtgaagtcactgggattgggctgggcccagccaggtgttactaataataagacaagtttggaaaaccctgcgagtgtagatgatctcctggtatgctctttataagaaccgattttcatattaaaataggtttcttttaactcagtgaaaccgggcgcgttttcctggcccacaaccaagccactgaaggccccagaacacttcactctcaaaaggtcacgtgaggctggcgcggtagctcacgcctgtaatcccagcaccttgtgaggccgaggccgcggactgcttgagcttaggtgttcgagaccagcctggccaacatggcgaaactcggtctctactaaaaatacaaaaactagcggggcgtggtggtgcccgcctgtaatcccagctactccggaggctgaggcgggaggatcgcttgagcctgggaggtggaggttgcagtgaaccgagatcgcgccattgcactctagcctgtgaaacggagcaagactctgtatccaaaaaaaaaaaaaaaaagtcacgtgagccggggtcaccggaggcgtcccccaaccgactgggcttcggaaaaccaaggggcgcacgccgccccgccccgccccgccccgcgactacaagtcccatcgcgccccgcgctcgcgcacactacgccagaacaagatggccgacgcggcggccacagctggggccggtggctccggaacggtaagggcaggaagcgcgggctcggagccgagagagtttgggtatcctgcaactttcccctcgactgagcaacaagataatgcccagaaattcagccccatcatgagctccgactggcggagggtg

SEQ ID NO: 36175 - DNA, 2300 bp, Homo sapien
gccaatcaagacacaggtccgccaactccggaggccgcagccaagtcccaaggagggggcgcctacggcctgaaaacaccctccgccagtcggagctcatgatggggctgaatttctgggcattatcttgttgctcagtcgaggggaaagttgcaggatacccaaactctctcggctccgagcccgcgcttcctgcccttaccgttccggagccaccggccccagctgtggccgccgcgtcggccatcttgttctggcgtagtgtgcgcgagcgcggggcgcgatgggacttgtagtcgcggggcggggcggggcggggcggcgtgcgccccttggttttccgaagcccagtcggttgggggacgcctccggtgaccccggctcacgtgactttttttttttttttttggatacagagtcttgctccgtttcacaggctagagtgcaatggcgcgatctcggttcactgcaacctccacctcccaggctcaagcgatcctcccgcctcagcctccggagtagctgggattacaggcgggcaccaccacgccccgctagtttttgtatttttagtagagaccgagtttcgccatgttggccaggctggtctcgaacacctaagctcaagcagtccgcggcctcggcctcacaaggtgctgggattacaggcgtgagctaccgcgccagcctcacgtgaccttttgagagtgaagtgttctggggccttcagtggcttggttgtgggccaggaaaacgcgcccggtttcactgagttaaaagaaacctattttaatatgaaaatcggttcttataaagagcataccaggagatcatctacactcgcagggttttccaaacttgtcttattattagtaacacctggctgggcccagcccaatcccagtgacttcactctctggaagaggggcttgggaatctttctcattaaggagctccccagatgattcttctgagcgagtaatgttgggaaaccctggagcatccagcctggtgattttgtgctgagggccgccccgcctgtcaatggcccacttggaagtagagcctggaccacctagtccaagtctatcgctgcatcctgctgccttcgcgccctcgacccgcaagtatttgcgaggcaagtctagggggcgggagacttgtcccttgccgcctcactcccagggcgtggggtgcccgcggctaccagtggttttctccctagcctgtcagcccctctagctgcgccgtgttcgtccccatttgcaggtgcctggcaggacgcagattctgggcttggatcctaacactagccagctatggtacttcgggcacttgaccttaatcctcagtgtgtctcagtttcctcttctgtaaagctgggggaaagatgagatgatacacagaaagagtctgtcacagtgcctgacgtgtagtaagagtcaagaaatcggccgggcgcggtggctctcgcctgtaatcccagcactttgagaggccgaggcgggtggatcacctcaggtcaggagttcgagaccagcctgaccaacatggtgaaaccccgtgtctactaaaaatacacaaaattagccgggcgtggcggcgtgcgcctgtagtcctagctactcgggaggctgaggcaggagaatagcttgaatccgggaggcggaggttgcagtgagccgagatcgcgccactgcactccagcctgggcgacagagggagactccatctcaaaaaaaagaaaaagaaaaagaagtcgctcctcatgatgttgtttacttcctggatagcacgtggaggagttgccaacgccgggaggcagcggtccgggaacccgtgctgccccggccccgccgcccacacctgagcctccgtggcgccccgcccccgcacctatgccgcgtggggcgggggctgcgggcgggggtgcgcggcgccggatgagcctcctggcctcgccgagggtgtacagggggtgggagagtcaggccggggaccgaaacttggctgagcagagcaccagcccctttgtctcctccgccccctcttccccacttcctgcccagctctggatcggcggcgcggcgcggactttgtaaacacttcgccactgcaggggtggagactggctctgttcggatgccggccgggggggagaggtgcaatcctctcctcgcggctggtggttgcgaccacccccactccccaaaggcaggctccggaggcggcgggacagagcgcctgcgaccccagtcggtgctccggggaggtcacctgacgaggaggtaggcttgggt

SEQ ID NO: 36176 - DNA, 2300 bp, Homo sapien
cccagctacttgggaggctgtggcaggagaattgcttgaacctgggaggcggaggctgcagtgagctgagattgtgccactgcaccccagcctgggcaacacagtgagactctgtctcaaaaaaaaaaagggggggggggcttttccccttcattctttgtatcacacaatctagcatttcattacataatgtgatgatatctattgcatggggaattagtcctgactccccaacaaaagtccttaagggcacccataactcaccaagagcttaaaatctccccagcactgaatgttttatatatacatctcacttacactcacaaatccatgaggtagaaactgttatcccatttcagaaatgaggaaattgaggttcaggagattcagtggcttgcccaagctattaagtgacagagtgatgatgtacaccaagtctatctgattctaaagcctgtaagtcacttcattatgctcttttctgtttttgttgttgttgttggagatggagcctcacaggctggagtgcagtggtgcgatctcagttcactgtaacctctgcctcccagattcaagcgattctcctgcctcagtctcccgagtggctgggattatagacacctgccaccacgcccagctaatttttttgtgtgttttttagtagagacggggtttcgccacgttggccaggctggtcttgaactcctgacttcaggtgatccacccgcctcagcctcctaaagtactgggattacaggcgtgagccaccacgctcggcccattgtgctgttttcttttctcaactttttacattaaaaaaaattttttttctcccctcttaagaaaaaagtttgtttcttaaatcctctcaaacactatcacaaagcagggcacagaactgatgttggggttgactccaaggccaagtgtttccatgtactcacagctctgcagcatctctgtcagcgtttccacggatgctttctcggcactctcaaaccctgcctctgtcagcaaggagctcacaaccacctgcagggttctcctccgggccagatgatagttatcggcagggttagtggactgtttacttcccgatctctgtgaatcagcagagagattttcatccacaggagaaggatgcaatcacatagttcatacgtggtcaacggcaagcaaagttattttactaaataattttattttaaaaatcagtgcttaatgtttagatttacagatcttggccaactgagtaaaaattgagcacccaaggtgctttaaatacagagaccacttctccgcttacctaaaacgtacagtcccaatgagataaaatagcaggtcttttactttctactttagcagattattagaatacatagctgaagaaacacgcatgatgggattaagacgtgtcccgcagaaaaaacaggatccctctcttgtgcctcccatcttcacaccatttcattgaaagggaaaatgaaaacagtaacaagaggtgaccgcgaggagaggagggcaaaagataaaagcacaaaaaagtaagaaagctaaatattttgaaacgggaatgcctttcaactttggccggccaataagaaggcgaaaacggcatcttcagaccaatcgggggtgttccgggctcccaacccccaacagcgaacgagccaatcaagacacaggtccgccaactccggaggccgcagccaagtcccaaggagggggcgcctacggcctgaaaacaccctccgccagtcggagctcatgatggggctgaatttctgggcattatcttgttgctcagtcgaggggaaagttgcaggatacccaaactctctcggctccgagcccgcgcttcctgcccttaccgttccggagccaccggccccagctgtggccgccgcgtcggccatcttgttctggcgtagtgtgcgcgagcgcggggcgcgatgggacttgtagtcgcggggcggggcggggcggggcggcgtgcgccccttggttttccgaagcccagtcggttgggggacgcctccggtgaccccggctcacgtgactttttttttttttttttggatacagagtcttgctccgtttcacaggctagagtgcaatggcgcgatctcggttcactgcaacctccacctcccaggctcaagcgatcctcccgcctcagcctccggagtagctgggattacaggcgggcaccaccacgccccgctagtttttgtatttttagtagagaccgagtttcgccatgttggccaggctggtctcgaacacctaagctcaagcag

SEQ ID NO: 36177 - DNA, 2300 bp, Homo sapien
cagacagggcccccgagccagactgccctggggagctcaaggccacagcaccagccagcccaaggcttggccagtcccagtcccaagcagatgaacgagctgggactccgcctccagcccctcccctgccccctcctgcaccccccctccctcccccagcacccccacttcccccagctgcacctcctttgccctgtgctcagaaggcagcccatccacctgctgggtttacaaaaacccctaaatccagctctcctgctctcaaacccaaacccaacccccccagcccagagaacacagcgtcttcagcacctgtggactggagggaccccagccagatggaaaagctgcggaacgagctggcagcctatctctgtggctccaggagagaggaccgattcctcagtcacaggccaggcccaacagtggcccctcagagcaaggagggcaagaagggcccccgcctgcctgagaaggagactctcctgagcctgccagcaaaggacactcccccaggtgttcctgaaaagagtcttggcggcagcagcctgacagagacagaggctgcccccagcctgaccctgccctctgtggactacattccccaagactctccaactcccagtgtgcggcagatccggaatgagctggaggcccggctctcctcagcagcagagaaggaggctaagcccagcataggatctctgccccctaagcctcggctagaagggggaagaatttgtgaaaacggggctgatgatgacaaactctccaagcctgtggccaagaatctgccacctcaatccaccaccctgctgccaactacatcactccagcccaaggctatgttgggaccagccataccacccaaggccacacctgagccagccataccacccaaggctacactttggccagccacaccacccaaggccacacttgggccagccacaccactcaaggccacatctgggccaaccacaccactcaaggccacatctggccctgccatagcatctacagccacaactctgcccaccaccacatcccaactgatggcagagaaggactcaggcccagctggccagccagagaagccagcatctcaagaagtttccactccctcccaggcaaggggagaggggtccccctcagaggccactaggctgcccacacagggagcccgctcatctgcagccttcccaccaaagacatctcctggtggaggagaggtgccatgtctctacaagccccactgccaccagagcagcctcagccgtgaggttgctgtggtgatgcccaccctggccagaggaggggctgcagggccaggggagcccgtggaggtgaaggagcccccagggctgccagccaagcctcctgcctcggcccagcccactgatgaactcctcaggcacccggtgactggggaggtggtggagcggggctcgccgatggccctgctcctggcggccaggcagagggctcagaagggaaggtctgtaggggctgccctgggtcggtcctctctgccaggaagtctccgtgaccacagccaccaagccgaggccagctctgacagcatcttccacagccagggcacgcccaactccttcactgtggtgcccaagttacccaaggaggctgagaaggactccccgctgacgaccgaaatacccaataagtgggggccgcggctgggaagagacgcagagggcacagagctgagccgcaggcacaactggacaaagccagagccccaggcccctgtggcctgggaaagagtagctccctccaacctcccccagggccacccgctgcccaagtccttctcctccccaccttctccttcgaacaagagggaggaggaggaggaggagttcaacttcgaggtcatcccaccgccgccagagttcagcaatgaccctgagcccccggccccggccctccagtatctgggccgccagagctcccctccccggaacaactactcagacttgaggcagctcccgaacgctggccccggggcgcccccggctctcggcttctcgcgctttcccgcgggcgcgcgctacgccggggctgggggcctggagcgcttctcgggagggggccgctcgctcataaagaagcgcctgtacgtcggggagccgcaccgaggcccagggctaccccacggtggcaccggccgcagcctgagctctcccaactgcttcgggccgcagcccggaggccccgagatgcggcgcgtgaactcggcgggtcgcgcgccccccggaggcctgcacgcgccgaggctg

SEQ ID NO: 36178 - DNA, 2300 bp, Homo sapien
tctggatgtcatgatcttaaccattatgaaatttaccaatgaaataaggcagatatggctcatctggccaggacttcctaaaggcgatctccccagccactgcctcctcttgagctccccacagtgaggctgacatggcctgggctgggtacactgctggcaggggcctaccaccagatgtcaatgcctcctgccccacacaagttctccccaccttggacatcaagtatccaaggtggagggacacaatgtcctcatgatacacataagacactgagcctggagaggggacaggacttgtctcaggtcacccagttctcctggttatcagcccagcacctcaccccactttggctgagacaaagtacaatgtgtgctaagccgtggctcccccaaacccacacccagacacctgggctccctcctgatagctccttcaggccattttcccccagatgcagagatgctgggcactctgtccagaatgccatgtccccagcctcccttccaaacaagactccaccctccccagagcgcttggagattgccggtcagaggctgtggcaggggaagcccagttaatgctccgctgctccttctctttctctcctggtgcctcccagcctccttagaaattaggggtcattaccatcagggtgtgagatctagggacagcacacaagtcatcaacaccccaatttccagtctgccttcggccccaaagtgcatcttgtcagcgttgactcagggccaggaagaaaacaaataattccgggcccagcccaagctggtgtggcaggaaggcacccaatagctctatctacctcccgctggaactctctccttcccctcaaccaagggagaagcccatgtcattcctacatgtgggatttctgacattactcctggaagctgcctaccaagtgtggtattggggagacaggaccctagggaggtaggggagctgatttttgaagatggggacaggacagcccattcaaccacccacccatcaatccaattacccacccacacatagtcatagctgatgtttactcaatgcttactctgtaccaggcactgtcctaagtgctttgcccaactctattaggtagggactttacccattttacagatgagaaaacagaagcatagagatgtcaattaattttcccaaagttacacactagtaaagtagtacagccagaattcaagctcaggcattctaactcccagacctgcaatcctctataccacagccatcaccatctgtccatttactgaccatccatccatccactcacacatggtcactcctattcagccatctgtctatccacctgttcatccatccctttatctcccaaccctctgttcaaagcaatccatgagaaggaatggcatatgtagaggctcagaggggagagagtggggcatgtctaagaaactagctactccatagagagcaagggaaagatagcaagagatgaggctaaggagatgagcagggctcaaatcacaagggttggcccatccaccatctatctgccaacccagtccatccacctgtccatccaccctcccactcatgtccacccatccattcatccactcatctctgtaatttggaaggcagatagatgatagatagatgataaatagatgattgacaggtggtagatgatagatgatagatagatagataaatagatagataaataaatagatagattagatagatagatagaatgaagagttgccaaggtacatttccttcctgacagtgatattgggacatggggggatattaggacttctggaggcaccttgataattaggatgatctctctccattcacctcctgcccacagttttagggttctatgggtttgtgggaagagggaatagcatagtgggccagtgtcaaggttaaaagacccttccaggtcctgaaacgtcagtccccagccctggcctcatgtctccttgggaagacagaaggaattgtgttgtaaagaggtgtcacaatgccccctgccccatacaagttctccccaccttggcactctcagtatcctgccaagagtcctccctgaccaccagaagttccacctcaccatcaagaaaggccctggtccaggatgtgcaaggtgtgatgaaatcacagggctggggaaggtcagctcggggtcacaagaagcctgatgggcaggaaagagcatgaaagccccagccagcctcacatgtgcggctgggaggtaggtcctcttacaaaaggcttagttgggtgctggtgctgg

SEQ ID NO: 36179 - DNA, 2300 bp, Homo sapien
agttactagggaggctgaggcaggagaatcgcttgaacccgggtggcggagttcacagtgagccgagatcgcaccactgcattccagcctgggtgaaaagagcaaaaactctgtttcaaaaaaaaaaaaaaaaaagagagagagatcaagtacctttgaggccagtgtatgggatgggctgtttatccacttggaggtcacagtcactgaaatgactgacatgatgctttgagacaagcagggaagtcaccagtgaatgacagtaatgaggagaagtaaatagtggcaaggagtcagatgtggcttcaaagggactggccttttttggggagaaaaaagtaaaaggccatttggaggcaagagttagaagcgaggaggacactagccctgttatctagaccttgaggtgtgtgtgggggagaaaaacccaccaccacttgaaaggatgacagaagaaatcacatttctccttcaggaatagcaagaaagttaaaagagctttcagagctcagtgacgtctggaggcagagaacagtgagagaggaggtcaggcctggagatgtgcaaaacaattcaggctgaacacccagtgagggatgggtaggttaaggatagattcactggaactgctgcctctgaagtcttctagaaaaatgagtgtcactgggcgtggtggctcatgcctataatcccagcactttgggagaccaaggcgggtggatcacttgaggtcaggagtttgaaaccagcctggccaacatgatgaaaccccatctctactaaaaatacaaaaattagctggctgctgggtgcatcaaaccaacatggcacatgtatacctatgtaacaaacctgtatgttgtgcacatgtaccctagaacttaaagtataataaaaaaaaaaaaaagaagaaaaaatagctgggtgttgtggtgtgcacctgtaatcccagctgctcgggaggctgaggcatgagaatcacttgaacccggaggcggaagttgcagtgagccgagatcacaccactgcactccagcctgggcgacagagcgagaccctgtctcaaaaaatagaaatttaaaaaaaaaaagcaaagaaaaagaaaaatgtgtgtccctggtcttttgatttcttggaggtgtcatttttatgttacattaaaataagcatgaatatgtaattgttcaaaagcaaattttacatgacctataatgtaaaagtaagagccttcaaagatattttaggccatgctcccagatccttctcacatgttagtattttggaggaaatgtgaaaaaggcactacccctaggtcttgtgtgaagggttggagggaggcatttgtagtttaaatcagaaagtgaaaagctcccaagatgaaaggtgtaatctggaaaggagcttcagggaccgagttagcctgggaagagagttgctcacctagagcccttcccatcatagattctgcctcttttcactagaccgtctgaggggcgagtcccagatcaccagcagattctgttttatggcctaggacttgatctcacttcctctctggatttgagtctcctgtctccaagatgggcctccctgaagcaatgtgaggcccagctaaagagatagggagtgagtgagatgggaggatcccagcctagcaccccgactctttcttcactctgcatctctctgcttacctctcagtttcttccccttctacctcttcagagtctaccagggccagcttggttgctttgttgacaaggctaagggaaggagtgaggctggaggagtttaggctggaggtcagaacttcctggggaatctctttttttttttttttttttttttttgagacagagtctcactctgtcccccaggctggagtgcagtggtgtgatcgcagctcactgcaacctctatctcccaggttcaagtgattctcctgcctcagcctcctgaatagctgggattacaggtacccaccaccatgcccagctaattttttgtatttttagtagagacaggatttcaccatgttggccaggctggtctcgaactcctgaccttgtgatccacccacctcggcctcccaaagtgctgggattacaggcatgagccaccgcacccggccacctggggaatcttctaatagtcttagggcagcttagctggcctggacccacctcccttgccacctgccccctgcaccgactgatcatgttcagtcacccaggagatgatggagaggctgatcaggcctcctggaaagggaggaagagggccctagttggagagatcca

SEQ ID NO: 36180 - DNA, 2300 bp, Homo sapien
aatgcatatgtgaaagcactttggggaaataaagcttagaaatgtgaacaaatgggccaagtgcagtggctcatacctgtaaaaccagcactttgggaggccaaggtgagaggattgctggaagccaggagtttgagaccagcctgggcaacatagcaagtctctgtctctacaaaacaataaaaataaaataaaaaatggtcgcaaacacctgtagttttagatactccagaggctgtggtgtgaggatcacttaaccccaggagtttgaggctgcagtgggctatgatcaagccagtgctctccagcctgggcaacagagcgagacactgtctcacacacacacacaaaaaagacaatatagtattatagaagcagactttaagatgaggagaaagtaaaaggaaaaataaaaataaatttttaaagatttgcacaaatggaataagttttttttttggagacggagtctcgctctgttccctagactggagtgcagtggtacaatctcaatctcggctcactgcactctctgcctcccgggttcaagagattctcctgcctcagcctcccaaatagctgggattacaggtgcacaccaccatgcctgactttgtatttttagtagagacagggttttgccatgttggccaggctgatcttgaacttctgacgtcaggtgatccacccgccttggcctcccaaagtgctgagtgctggaattacaggtgtgagccgagccactgcacctggccttttcttttcttttctttttttttttttttttttagacagagtctcattgtgtctcccaggctggagtgcagtggcacgatcttgcctcactgcaacctccacttcccgggttcaagcaattctcgtgcctcagcctcctgagtagctgggactacaggcacacaacgatgacaccccactaattttttgtatttttagtagagatggggtttcaccatgttggccaggctggtctcgaactcctgacctcaggtgatccgcccacctcagcctcccaaagtgctgggattacaggcgtgagccaccgcacccagcctgaagaagtttttattatagcaaatcccagttatacatctttttacttggaaaaaattatggtggacattaataattagacaaaacactttggcttgttgtaagtgaagctagccattgtaaattcctaaatactagagtaacataaggaaatgaataatttagaaagatcagtaggacagcggtatacaaaatggttggagcacaggaattccaattggtgtggggaaggaagaaaggattaagaaccataattagaaagccgctgcaataaggtaactgagtggcaactggacccaatggtagtggccgacttttctttttcttgttaaatatagattttgttaaaattttgaaaaatgcaaaaaaaattgaaaaatgcaaaaataggaaaataaatcacccattattccagtactgaagtaaatggtgtcaatacactagtttcagtccgggctttgtggttcatgcctgtaatctcagtcctttgggaggccaaggccagaggatcacttgaggacaggaattcaagaccagcccacaaaataacgagagcaatataatgagaccctgtctctacaagaaaattaaaaaaaaaaacaaaaaattagtcggctgtggtggcacgcacttgtagtccagctacttgggaggctgaggcaggaggatcacttgaggcaggagtttgaggctgcagtgagctatgactgtgccactgcactccagcctgggcagccgagtgagactcagtctctaaaaggaaaaaataagtaaataaataaatgtgtgtgtgtgtgtgtgtgtatacacacacaacaatttaaaggtgaaaacattaatagggcttggtaactatccagacactggccggagccaaaccagcctggccagccaactgtcccgcccccaaaaagcacaggttcatgtctctatggttgttccagcgccggaacatgaggatgtactctcttcttttgcggaactctatggtctgaggacgccgctgtaaccccggaagcaatcctgagaggtcgggaccggcaagatggcggcgcggacagcgttcggtgctgtgtgccggcgcctctggcaggtactggattggctagggagactaggagggctgaccgggatagttgcttttaagtttccctgccaccagccgctctgcccatcaggatttttcctgatatttatccctcacctcgcgccgtttacaggaaagtgac

SEQ ID NO: 36181 - DNA, 2300 bp, Homo sapien
gaggcaagcggatcacttcaggtcaggagctaaggccagcctggccaacttggtgaatccccatctctgctaaaaatacaaaaattagccaggtgtggtggcacgcacctgtaatctcatctactcaggaggctgaggcaagacaatcacttgaacccaagaggcagaggttgcagtgagccgagatctcgccactgcactccagcctgggtgacagagcaagactccatctccaaaaaaaaaaaagaaaaagataagtttgcaaaccaaataaattgggtggtggccctgcttttgtagatgtctgaccccgcccagctgtggagagcatattctgagtctggagccaaagctcctggcttgaggacccatcaaagagctgcacaaggaagttgtttatttcagaaatgtgagtttatgtcactgagccatatattcttctaaggaccctaggctccccacctgtggtctaaggaggcccctgcctgcccagagcatttttgcctgattcacttattttggccaaaccctacaaagaaagaggcgattagggtttcctgtactgcagtcccatcagttgaccatagcaaaatggaaaccttggactcgcccggaatgggaggaaagatattatgatttggggtactagtgtaccccactaatgaagtatagtgaggtagggtactagtgtaccccactaatgaagtctagagaagtgtagtgaggtcaaagccttggccaaataccatccaaagaatcagagatgtggagaattcagcaggccagaagaataagactgagttttctctgaaccagccacagtggtggaagcttccctagagcctccagaaataggagtccccttagaagtaggccttatttcttgccccaaacaagccagtataactttatattattatctgcatatcgtgctttctttcatggaggaaaaagacataaatatcaggtttagccagtaaggaagatgcaccagcccagcagtgaagcctctccctcttcggtcggcaaatctgtcaagaactggctccactcacctctccagcctcatctgcttctgctggaaccttatacttgaaccagattagattactagtcgttctttgaaaacctccatttcctcatttgtcaaatgggctcatcatcctaacaatcttacaggattgttagtagaacctaatgatgaataactgaagtacttagaacctgccacttagtaagcacttagaaatgttaagctatttttcctagtacagcatcttgcttgtaatatacacctaataaatatctgttgaatgaacaactgaagtgcatgacttcactcttgcctctgactttgcacatcctgcttcctctcaccagaatactcttccatctccttatgatctgacttgcttctatgtgacctttaaaactcaactcatgttttctctagctggaagccctcctggctgccctggccctaacctgagtgtggtgtttctcctttgtgccccattggcacctcgcctctacctgaataattacaattaccaccttgaacgtcatggcctacttgtttgtctccccagtagactgtgagcatcttgagggtggagggtgaatccagccacaccctgaagggtacttgctacatgaatgcttgcacttgtgaatatgataattacgttaaaactgtacctaaaatttgttgaatgctcactgtttcccagcgatgatgctggacactttttgtgcattatcttctttaaccttcacaaaaatcctaatcagtggaggcaattatagttattcccatttgtaggtaacaaaacaggcttaggataagtaacttgccaaggtcaaggccatagctgggacttgaacccaggtgtcagagctcctaaccattatatcacactatctttttgttcaaatgggagtttgatatgtattatatcacttgctctgtagttgtattttgtaacttaactaaatgaaccagcaactaaaagcagggggaactgtgagctgttcttatgatgtttgtgttttgttgtaggttcggacaagtggacctccctagaaagaaaactgtttaacaaagcactagccacttacagcaaagactttatttttgtacagaagatggtaagcatgatttttcccattgcccccttgaaattaaatttgggaaattgtacacaaaaatatttagaaatatttggatactggtttaagatacttacaaaaaggatgtcttccacactcgctggtgaggatggtagtggagataggggtgg

SEQ ID NO: 36182 - DNA, 2300 bp, Homo sapien
aaacataaatagttaaattatattgaaaatgcatctctaaatgaaatggtggtactgggtaactttttttggggggggtgactttttaaaataaactttttttaattgacatacgacatatacacctttatgtatatgaccaggtcatagtgcatagcttgaattacagcagagtgagaatgaccatgcagttaccatccaggtctagaaataaaatattgttggtgctgagctatattttcaatttcattatccatggaagaatattatttattactagcatgagacaaggatcagcatttattgtgtttccatttttcgttctccctggtgtagtacatgagaagtttgcccttcttttcgtaaaggagggtgattaggaaagagaagtcctaaaaggacagcttgcacctctgccatccatgagttctagaaagaatttcaagttgaggatgtagaaattgaacctctttttttttttttttttttagatggagttttgctcttgtcacagagcctggagtgcagtggcacaatctcggctcactgcaacctctgcctcccgggttcaagtgaatctcctgcctcagcctcccaagtagctgggattacaagcgcctgccaccacgcccagctaatttttgtatttttgatagagacaggcggatcatgaggtcaggagatcgagaccatcctggctaacacggtgaaaccctgtctctactaaaaatacaaaatttgggcttggcggcgggcacctgtagtcccagctactcaggaggctgaggtaggagaatcgcttgaacctaggaggtggaggttgcagtgagccaagatcgcatcattgctctccagcctgggcaacagagcgagactccatctcaaaaaaaaaaaaaaaaaaaaaagagatgaggtcttgctgtgttgcccaggctagtcttgaactccttagctcaagtaatcctcgcctcagtctcctgataggtgggggtacaggtgcgtgccatcacaccctgcttctcttatttttaccttttgattacatgcatcgttttcccctttgtaattatttatgcgactcatcaccttttctaactacatgcttgagagcaggcctatgtcttagtcatttctccgcattgtgccttacagttaataggtgtctaataaatatgtgttgaacagataaattgattaatgcatatcttaaacttctttatatttcccacaggtcctagaatagtgttgggctttcaatagcagggtctcagaagaatggatgaattaatcaatgaacaaaacaatgaattaacaaatcaatgaactactgagccattgaacaatggcttgaaagtaagagagtttgcatctcatgtgagagttaagatctgcagactcagtgaaaagggtgtggagtgcatgacactggctatttctaatcgagtctcctgtttcatatatatatatacacacacacagagagagagagaggtgcggttttatgctgtcacctaggctgcagtgcagtggtgcagtcataactcagtgcagccttaaacttctggtcccaagtgatcctccttcctcagcctcctgagcagctgggactacaggcgcatgccaccacacccagctaatttaaaaacatttttgagacgggatctccctatgttgcccaggctggtctcaaatgaacttcatgtctcagcctcccaggtagctgggattatatgtttatttttatcactggtcatggtggatatcaattgctcatcacaaaacatccaaataaatcctttcctgtcttttgcatcttgccttgcaggtgtgagcgacgtctcctcaccacagtgctgtgtggtctatacctcagccagggagaggatgtgaaaccccccgccctgcacatgagtggtacaggccaacaggaacacctggctccagccacgttcacagacatgtcagccgtggagtagtgctgacacttttctctcagcttctcagggtttcagtccttttgggtttgttttatttaccttttttatggttttgtggctggacgttcacaaccaaggcagacagcatgggtgaccagcaactgtacaagaccaaccatgtggcccatggtagtgagaaccttttctaccaacagccaccacttggcgtccacagcgggctgaaccacaactatgggaatgcagttacagggggcggaatggatgcccctcaggcctcgccaatctccccccacttccctcaagatacacgggatggtctgggcttgcctgttggctccaaaa

SEQ ID NO: 36183 - DNA, 2300 bp, Homo sapien
agcctcccgagtagctgggattacaggtgcctgccaccacacctggctaatttttctgtatttttagagacgtggttttgccatgttggccaggctggtctcaaactcctgacctcgtgatccactcacctcagcctcccaaagtgctgggattacaggtgtgagccattgcgcccggcccataaatttctattgtttaagcaacccactttatggtattttgttatggcagcctgagctaagacaagaatgttgtggtaatgtctgtcaaaaagcacaatgtcgtctgccgtggagcaagatatgccttgagagaaaccagtggtaaggggtctgaacaaattaagacccaatgttggctgggtgcggtgactcacgcctgtaatcccagcattttgggaggccgaggcagatggaccacgaggtcaggagttcgagaccagcctgaccaacatggtgaaaccctgtttccactaaaaatacaaaaattagccaggcatggtggtgcgtgcctgtaatcccagctactcaggaggctgaggcaggagaatcgcttgatcccaggaggcagaggttggagtgagccaagactgcaccactgcactccagcctgggcaaaagagtaagactctgtctcaaaaaaaaaaaaaaaaaaaaaaaaatccagtgtctgctagaacatgcaagaactgtgccatataagcatacgagcacagatgaggctactagaaggactcaaacggtaacgctttgcctaagaatgcggttaacagacaataactgtaggtgttagtgtgccacagaatggtcttctttttattgagaaagccacatctgagatcacgtccttgtttacaggagacccatgaaacgttagaattaggacaccttttgccagtcaaggtgatgagcattaggatagtcctgcaggaaggcaaccaacttgctttggctccaggattccatgattccattcacaatttcacacgggcgagcgagcagtctttctgtcccagtcaacaaggacagaggggttactttcacaccagtcatggcctaacacagaagcttaatcctgactggaaggcaaagtgtgtttgtggcaaagccaggcagacgtgtaatgaaagcagaatgagtaatgtttagttaagcttctggatggcaggggtggttgggtgtatgtttggggatttttaatgactccaaaaggcgtcttaaaaagtcacactattttggcagttctgagatgcaacttttgctacaagtactaacaccagcaagtgactgctacaagtattaatactagcacttaccggcaacatttctcacaagcaccccttcctttctggggctcctgggatcaaaccaagttttctgcatatgtggggggttgggggtggggttggcacacacaccctttcccacctacagaggcataccatacaactgaaagtcagatcaaattgaagacatttatcatttttagggttaaatagtggaaaaggaaaaactgttgacacactttctaatttgaactacttaggtattgcaagattttcttcctgctggtggaaaattaaactaacaattctaagttaatgactgcagggtaaacggctccttccttataaaataaattgggtttatcaaaacttgtattaaaatggattttcccccaactttaacttataaatccaatcaagatatgactctagagaactcttaggctccaagtgaggcttcaaaaagtagggtgtatttccctacagttgcacattcagcagctaactccacatcaccaggtgggcacctgacacctggagggcaaatgcggggcagtgcccaccctcccttggtggagttttcacaggtgatgtcagaaaaataagaacaatgtagtaaattattcctaaagctgagtgttttctatttaaagatttttgttttgttcttatattatcttttcctactactttggcatcaagatggttttttcataaaagctttgtgatgagtgttaagagtttttaaaatgtcctaacttggcaaaataaaaaagactgggagccctaggtcaatgacctaaagcttttttttttttttttttttctcctagtgctttctgggtccaggcaatcttcatttgagaaccactagtttacagcactctctgagccaaggaatttggagtcaaccagtgctcatctaggtatcaaaatggtggcaagccccaagtgcaactaacaacctacagaagacggaagtctaactttagtcaacactcagggagtggggat

SEQ ID NO: 36184 - DNA, 2300 bp, Homo sapien
ttgaaccttcggctcgcctttcagcccgcgccctgccccctgctcgcagctgctcccggtttgggtgcagcggtttcccccgcagaggaggaggaggagacagcgcgagggagcgactccgggctcgggtttccgcaccaatgccgagcagccccgggcggcccccggtggccgtccctcctccccggcaccacgttccacagtcatggcgcgcgaggaggggcgagcgcgcgcggcggctgcacccgcgccccctctcctcccctcccctccgccgcccggcccctctcctaggcaacccccctccccggcctgctgcgcctgccgcggcaagggagacccctccccagagagctgctcttccagcgcggtctactgcaccccttccccgcccccatcggggcggagggatggagacgcgcgcttcgcgaacctccagccccttctccggagccccagccctctcccagccccaccgaggccagggtgcggtgggggtaggcgcggaccgtctcctcgcagcccgcctcgacctcggcatctttgcaaacacttagaaaaataaacaaaccccctcacaaaccccagtcgttagcttgcaaagcgtgttacaataaccgggacggctacgcaggaagcaatcctgcactggtccgggtttaaggcggcagcttcccggccacgctgccttctccccggcctcgattttccggccatgccggagggtccgctgcacctcagggctgacaggtcccgctcgcgcagggccgcaactgggcccgtgtcccccgtcccatcctcgtccagagactcgccagcctacaaaaggtgcaacctcacgcacacgcaaagcgcacaaataaagtcagcagcgcaccgccgcgaaggctgcgaacaatgcgccgggcggcccgcgcccgccgtagcgctgcgccccgggggaaaggggacgcgggcgggggccgaggcggacgaccagccggtcgcggcgctggacaccttacttcctgcttccccgcccgcggccagacccagctctgcggagggatatctcccctcctcggtccctctccctcccttccccctcccttcccccgccctccccctctttttgctcctgctccccccccccaccccgcctttctccttttgcaagaaaataatttgacagtcgatttgctgacaagggaggaatttgcatcctggatttaaaaaaaaaaaaaaggccgagaggagcttgggaacggttgctaggggtgggtaatgggtgaaaaaaggggggtaccggggagcggataaggagggttaagggagggggcgaggatggggagcaatgcaaaggtaaggccaggttaccgcggctcggccccgagtgggctgcgaccgggggaggggcgagagatacatatgtatttctgtctccccagcacacccccttccctctaagcgatggctgagaggcggtgcatgcagatggggagtaagtttcctgaaggggagggtggatgcacgcgcgcagcccggcgctgcaaatttccactggggagggagaacggctggatgcggagagtttggagttgcttgcggcggagggcaggaaggggagcagggctgggaaagggggctggcgggcgctatatctgggagtaagtttccagcatcaggagagcctgcacgcttgctcactagtaagtttctggccggggagggcgcatggggaggaggagagggaggggtgcatgtatatagaaggggggaggggggagcagatttcctgcggggaggctgaatgcatatggagagtagatttcctgaagggagggtggaggcgtagacggaccgagtaagtttcttgctggggtggtggaggaggtggtgggttggtgctttggaaacccaaagcttcctaccctgggtgggggagcacactcttgtcggggggacgaggggccaggttccctgctggggagaggggcttgcatctggggagtatgtttcctggcggagcgatatttgtttacaggctgagggcagtacagtaagtgagtagcgctgagagaaggcggctgacataaattaatattgaaattactccatcagctctgctcgccccccatctcaccccccaagcggatactggtcttctcgtcggattgcccatgcacttgttgcagaaacagccaaggtaggcaagaagcttattaagtttcatttttaaaaaattagtttggggatgctcctcgagaagacgggggtggggcgaagtggggagggaagagtggggagacagaaggagaagt

SEQ ID NO: 36185 - DNA, 2300 bp, Homo sapien
atgggtcggagggggacaggaagctatcgcagaaagcagcccacttggaagatgaccgaggactgaggaaagagggcgggggacatcgagcatctgaagcctttcccagtcgccgcaacactgtgcgctgtccctcggctttctttgcttatgtggaagggctccataaagggctgggcacgcgccaaacgctcattaagcgaaatagcccgggtcccctcctcttttcagggactctgtggtccacgtgccccagaattggtagggtaggcgggaggactttccactgctgaagatggagaaccgttacccctcaaaaaacacaaaaacctcgggtgcttttggcagcagtctcctccgctcatgacctcatgctttaagctcccatatagcctccctccgcccaatccacacccagcgcccgggtgggggtggggtgggggacactggcgaaggtctgggtagcgggaggtcattcttcttgcgcgacattttgggggaaggggcgcaatgatttcccccacggaaaaaaatggatggtgtaactttctgtcgtgcaaaaaatactgtcttgccctcgagacagatgcctcgaacccggctcgaggtggtctgtttagctgaactacctttggttcacgtttcctctgaccaggaaagaagcttggaaatgcaggggtctcaggccaggttccctgacacctgggccgaccactgccacgccttctcgggacctgggggccgtcctgctgttgccctccgcccccgcccgcgccgcggaggtttgaaccttcggctcgcctttcagcccgcgccctgccccctgctcgcagctgctcccggtttgggtgcagcggtttcccccgcagaggaggaggaggagacagcgcgagggagcgactccgggctcgggtttccgcaccaatgccgagcagccccgggcggcccccggtggccgtccctcctccccggcaccacgttccacagtcatggcgcgcgaggaggggcgagcgcgcgcggcggctgcacccgcgccccctctcctcccctcccctccgccgcccggcccctctcctaggcaacccccctccccggcctgctgcgcctgccgcggcaagggagacccctccccagagagctgctcttccagcgcggtctactgcaccccttccccgcccccatcggggcggagggatggagacgcgcgcttcgcgaacctccagccccttctccggagccccagccctctcccagccccaccgaggccagggtgcggtgggggtaggcgcggaccgtctcctcgcagcccgcctcgacctcggcatctttgcaaacacttagaaaaataaacaaaccccctcacaaaccccagtcgttagcttgcaaagcgtgttacaataaccgggacggctacgcaggaagcaatcctgcactggtccgggtttaaggcggcagcttcccggccacgctgccttctccccggcctcgattttccggccatgccggagggtccgctgcacctcagggctgacaggtcccgctcgcgcagggccgcaactgggcccgtgtcccccgtcccatcctcgtccagagactcgccagcctacaaaaggtgcaacctcacgcacacgcaaagcgcacaaataaagtcagcagcgcaccgccgcgaaggctgcgaacaatgcgccgggcggcccgcgcccgccgtagcgctgcgccccgggggaaaggggacgcgggcgggggccgaggcggacgaccagccggtcgcggcgctggacaccttacttcctgcttccccgcccgcggccagacccagctctgcggagggatatctcccctcctcggtccctctccctcccttccccctcccttcccccgccctccccctctttttgctcctgctccccccccccaccccgcctttctccttttgcaagaaaataatttgacagtcgatttgctgacaagggaggaatttgcatcctggatttaaaaaaaaaaaaaaggccgagaggagcttgggaacggttgctaggggtgggtaatgggtgaaaaaaggggggtaccggggagcggataaggagggttaagggagggggcgaggatggggagcaatgcaaaggtaaggccaggttaccgcggctcggccccgagtgggctgcgaccgggggaggggcgagagatacatatgtatttctgtctccccagcacacccccttccctctaagcgatggctgagaggcggtgcatgcagatggggagtaagtttcctgaaggggagggtggatgcacgcgcg

SEQ ID NO: 36186 - DNA, 2300 bp, Homo sapien
caaattcataattatgacacacaagggaaacaatttttttttgagtcaggctctcattctttcacccaggttagagttcagtgatacagtcatagctcactacaggcttgaactcctaggctcaagtgatctttcctgtctcagcctcccaaagtagctaggactacagacatgggccaccatgttcggctaatttttaaatttttttgtagagatggggtcttgctatgttgcccaggctggtctcaaactcctggcctcaagttatcctccaatcttggcctcccaaagttttggtattacaggtgtgagccacaatgctcggcctgaaacaaataatgttaggaagcaaataatgttaagaacagaaattgcctttacagtctattaacgacttaaattctatgttaggacagctcaagagatgttgtttttgcttctaggctgggacaatcccagttttcttccaagttgactctgtcctgagtggatcagtgtaaggaagttgggcaaaaaaagaaaaatacatagaagaatatttcaagatatctcattataaatatctgtacagatatgtgcatacttttttctggacagactcataagacagtgtcaaaaatgattttctttggggagagggacttggggtaagaggaataggaagttttcaattttccttttttaaaacattcctttcgagtttgaatttctgatgttttatatgtatatatatatataacttttaaaaagtgataagaaggcttacttgtattgtgaggttacagggatacaggcagtttcttatttccttttttaaaaaactggttaatatcatagtattggtttaaaaaaaatcccaaaacaacataaacataaacatgtcctaaacctggtctggctcagaacttttcccccctatatgtaatttacaacctacttctgggaataaattaacacacttgacaaaaggtataaacaattttctgacaaactctagagactgaagacttctaagaagcccagtcacccagctgtcagtcaagagtctaattacctttaactaaacatagttttctttgatagctagtctaacaatgtttacctatttcttttttttttttttccttcttttttgatacagggtctcagctgtgtcacgcaggctggagtgcagtgggctgatcacagctcacgatggcctcaactgcctgggctcaagcaatcctcctgcctcagcttcccgagtagctgggactacaggcgtgccaccacacctggctaattttttgatttttatcaagagggtctcgctatgttgtccaaactggtctcaaactcctgggctcaagtagtctgcccccctcggcctcccaaagtgctggaattacaggcatgagccaccaagcttggtctgattatctgtagaaattaaatgtctctatcaagaggaaatcttttaattggcctaatagactctttttcctttgcagcaagatttgtgataaagtttataagtggtcatcactaaagtttttgaaaaattttttaaaacatgttttaaaccttcaaaaaagtgggtaatgttcacctccattactcgtataaaagatatgggttcgatggatgacaggacatagaaccacaggaatagaatgtaattcattcattcctttgacaagtatttgagtgcctaccctatgccagactggcaagtccttgagggtctaccatgtgccaggcagtgttcttgaagctggggatacaaaaatgaacaaacgagattcggagaataaaactacagttcccacagtatctttctctttggcttttttccagggggcgctgctttccgcgactgtcttcccatgattctcgttgggcagaaaagccccgcccgcttatctgccatttaagccagcgccccttgagaatggactacaactcccacaatgcattcgaggggcaccgtgttagggcgccacctttttcccggctgtgctgtacctacagcacccagaactacagtacccagaaagctccgcttcccctcctgggtgttattgcccctttcctggtgcaggacgcggtagtggccagcgagagtgtcaggcctggggttttctgtgtccttccctgggtcagggacgagccagtgacttgactcttgggcgctaagcttgggagggagcgcaggaggccgctgtccttcctttccggttcacgtcacccttctctccctctgttgctccacctgcagccacttggacggctccgggactgattgcctggggcaggggtgg

SEQ ID NO: 36187 - DNA, 2300 bp, Homo sapien
actattttaatatttgaagttgctatctcattctacctttccttctatttaaagatggccttcgccggattttatgtcaagttggtttacaagaagggccagatggtgaaaactcttctctagtggacagactgatgcttagtgattccaaattatggaaaggtgaatctcttaactacttttaaggtgtagaggaacctatataagtaattgggatgtgaaaggtttttatcatttgggaagatatttaatacatatatttgtgcttcttaaaattagcattgcagtcttagtctttgaaaaatatagatttggtggggtggggtccatgatccaacttaaatggactttatattttgttacagaattatgtttagaaaacttggttttataaacaaattgcaaatattttgtgctaaggaaaatatgtattttgctccttttttgaagggacaggatctcactctgttgcccaggcaacaggagtgcagtggcatgatcattgatcactgcagcctccaactcttggactcaagcaatcctcccttctcagcctccctagtagctgggactacatgtacataccaccatgtatggctttctttgtttttgagacttaaaatacaagccagtctcagtggtgtgtgcctgtagtctcagctacacaggaggctgaggcaagaggatcacttgagctaggagtttgagttcagcctgggcaacaaagcaagaccctaaaaaaaaaaaaaaatgctgtgttggctgggcatggtggttcacatttgtaatgccagcactgtgggaggccaaggcaggaggatcgcgtgagcccaggagttaagaccagcctgggcaacacagcaagacactgtctcaaaagtaaaaacaaaacaaaacaaaaaaaacccactgtggatcacataacacttgagaaatgtaattgttgggcgtgtccttatcttataccgtgatctttttctacaaggtgctaggagtgtatatcatcagttgttcatgagcagtctgcttatggatttgaaatacaagaaactatttgctgttcgatttgcaaaagtaagtggcttttcaattttgaaaataggttatatatagagtaactatgcccataattatatctaggcttcaaaaaattaacatctaatagtaatatgtcaatgtgttgatattaaattctaagaaacttcataaataatcttttcattctttatcaatagaataaaattttagccgtgagactccttgttcatcacctcctataacatgagtatctattatacaatgtttatgaaataataaatgaagagtttaaacctatgccattgtgaattatggtatttttttctattaaaattcatataaggaaactaatctcagtttaaatgacatatatatgaatatgatttaataaatatatttgtgcattttaaaattagcattgcagtcttagtctttaaaaaaaaatagatttttttttggagggggggcatgatccaaattaaatagcctgtatattttgttagaaaattatatttagaaaactttgattttataaatagattgcaaatatttcatgctaaggaaaacatgtattttgctttttttttttttaagaaacaaggtctcttcagaactctaggttattaatatagttaagttctcccttttagcagcatgtgcataagctaaccacttatttttttgcattcacctgaattacgaagtatatgagaatcacttggagagctctttcaaaatacatgtgttgtgttccattctcaaatctactgaaacagattcaccaagaatggcggcccaagcatgtatgctttggaagagtcatcagatgattctgatatgatgcagaagtaatgaaagtctgatttcatcagaaacagtgtaatgctgctgtggtttagctccaccagcatacaatgacatcttgggagcttagtagctgttactgcctatttgggctggtaaactgccattgtgctccagaagaaagaatcgatatttatacaggattccacagtttccatagtgaatcaatatctatacaggattctattggtagaaatcattccagttattgttctcatagcagtgttatcttcttgacttcctccagcactgacttttcattataatccttaaacatttggtcattgtggattagaggtgaatctcccccttgttgtttagaattaccagcagttgcagagagattttatggaggatgatcacgagcgagcagtgtcggtgactgctctatctgtcca

SEQ ID NO: 36188 - DNA, 2300 bp, Homo sapien
ccttgtttcattttagtgaatgcaaaataatagtgaaaaggacattcataggttaaattgcaactgtttttccttccaggggtgataagttccccagcaacctatatttcagccatggggtttttcagaaactcaacccttataattgagaagagactttattttcattgaggcttttcaaaatgtttgccctaatttgaaacatagatcaaaaccttcaaccttaattaacatttatttttctgagatttcaacctatcttatctttgttgcatagtaatacttttaaactttgtattataaatatttcaaacatctatagagattaaaaaatgtagtataacaaacccatcaccagcttcaacagaggccagtctggtttcatctatacccaaccactaacctctgtgccccactgtattatttcctagagaatactatatttaccatttcatctataaataggactatatgtatctaaaacagtgattctcaactgaggacaattttgccccccaggggacatctgtgaatgttactactcagggcaggatgtggaatgctactggtatctagtgggtagaggccagggatactgctaaacatcctacaatacccaggacaaccccctacaacatatctgatctgaatgtcagtagtgctgaggttgaaaaactctgatctagaaaatgaggactcttaaaaaccctatctttatgttatcacacttttaaaaacaataatttatatatatatgtttatatatatatatagagagagagagagagagagagatagagtctggcttggtcacccaggctggagtacaatggcatggtcttggcttactataacctctgcctcccgagttcaagcaattctcatgcctcagcctcccaagtagctgggattacaggcgcacgccaccatgcccggctaatttttgtgtttttagtagagatgggggttctctatgttgtccaggctggtctcgaactcctggcctcaagtgatctgcccacctcagcctcccaaagtgctgggattacaggcataagccaccacacctggccgaatgatgaataattccttaatgtcactaaatatctagtcaagataaaaattacttgtactgctttaatgcaggaagtgaatcccaagttgttcaattaggaagcagttataatttagcctaagctttaaggaacaataaaatttcaaaaagcattttttaagtggtttaagattgtcggccgggcacagtggctcacgcctgtaatcccaacactttgggagaccaaggtgggcggatcaggaagtcaggagtttaagaccagcctggccaacacagttaaaccccatcgctactaaaaaaaaaaaaaaaaaaaaaaaaaaaaattagccaggtgtggtggcaggcgcctgtaatcccagctacttggtaggctgaggcaggagaattgcttggacctggaaggtggaggttgcagtgagccaagatcatgccattgcactccagcctgggtaacaatgtgagactctgtctcaaaaaaataaaaaataaagtgattgtaactgtatttcccaaacattttaaagaattatttattcacagaattcctattaatatcttatcgtgaatgagatatgattggggaagtgctgttgtactgaaaatagacaagaaattagtgcaactattttataaaataccagacgtattttacataaacttttttaaatgttttatatactttgtgttttcatttaattcctttagaaagctcttaccttgattctatatggcagtgactttttaaaaatcataaagttttatctattttatgtatttaaaaataatacatcaatttgaataaacatcagcttgccgagtaagtatgtctagttttgtattaatcattgtatttgctatggaatcctcatctgtaaaaatggagataaggtgtatctaccttaggttgttatgagggtcaatgagataaaacacaatgctaagagtgctagtagttattattaacatgaaacacacttgtgtcctgtacctttaggagaacaaggagactggcatggagagtgtaatcgaagcagttgcccatttcaagtgagtttacttcctattatttcacattcttttttacttttccagtacattcatttttcttagagtgttttctttgatgcaactgagaatgaagttgcagctttcagagattgacagacattttcaaattatagctctgaattagatttctcactgacatttcacttttctgatctca

SEQ ID NO: 36189 - DNA, 2300 bp, Homo sapien
ctatggaatcctcatctgtaaaaatggagataaggtgtatctaccttaggttgttatgagggtcaatgagataaaacacaatgctaagagtgctagtagttattattaacatgaaacacacttgtgtcctgtacctttaggagaacaaggagactggcatggagagtgtaatcgaagcagttgcccatttcaagtgagtttacttcctattatttcacattcttttttacttttccagtacattcatttttcttagagtgttttctttgatgcaactgagaatgaagttgcagctttcagagattgacagacattttcaaattatagctctgaattagatttctcactgacatttcacttttctgatctcaccctgtactcagcaacgtaaagtgacattgtgagggttttcgtcacattcagaataggtgttcatagctgatggtttcaaatagtaaaaattaacctcagcagtgatctaagtaaatgcattgtaatttcttaaaactgttttgtttccatttgaatgtgctgcctaaattgtgggatagcctctcaatgccaccttctccagtgtccacagtcttcccccagtcaataaactggtttatacccttaaagatattaaagcagtttcttaagcctgttttttctttgcttcctaccccaatgacaatgtattcattttttttaacccactataaatttttgaagatagtgtctttattttttgttggttataaagacaatacttgcttttaggaaaaatacaaagaaaaaatattacctgtaatccaaccactcagatgatttctattatgtttagatgtatatctttctaaattttttttctatacttggaacacatatttataacaaaaaatgggttcatttcgtatttactattctataacctttttaaaaattaaataatggaatgtttccatgtatttgtgtctttgggggggcgggttgttggttttattgggtttttttagtttttacataatatactttgtcagtacatataggcatacttcatcctttttcacttcagcctgggtaacaaagcgagactcaagtgcagtggcacggtcttggctcactgcaacctccgcctcctaggtccaagcaattctcctgcctcagcctcccaagtagctgggattacaggcgcccgccaccacacctggctaatttttgtatttttagtagacatggggtttcaccatgttgaccaggctggtctcaaactcctaacttcagatgatccagcccgcctcggcctctcaaagtgctgagattactggcatgagctatggtgccaggccctttttcacttccttgtagtcatgtactgtaatgtatctaacctcttccctataatacatagcttccagattttctcttataaacaaatattgaaaatccttgtacatacagcattaacaaatgtatctttgactgtgaaagtgtttctttgaggattagctagatcaaaatgaaagcttgtattacattttggtacatacctcctaattgccttcccaaaaaagtcctcgatttacactctgactagaagtgtataaagagtgccctgcaactttgtcaacactttaatatgagcagtctttcagtaccttattttaatttgcgttactctaagtgaagttgagcttcttttcatgtgtttattggccgtttattttttcatactttaatgcatttttctttatggttgtttgtccctatcttattgttccgaaagtattatatattagaaatgtcaattcttatttaatacatcacagtactttcttccagtctcccttgttttttaactttctgtttttaaaactctgtctcaattggcttctgggttttataacttgcttaggaaagttctctaaaccccaatagtgtacctgcttttttctgcttaatagaacaacacggaagtctttacatgtgaaaatagagaaattatcactgttaatggtgttcagttgtttggagatgttgtaatttgttatttcacgttattagactttttaattgttgccactgcagtgtccatcacgttcacttgtctagttaggataaattccaagtgggcatgctaaataaaacagatgcatgtagaactcggatttagactgccaaatcaacccactgaaaatagttgtagcttaacacccaccagcagtatatgagagctctgctttcttgttctaatatccaagactatctctcataaattagtgtatggctttggtaataatattctaaggtcctttctt

SEQ ID NO: 36190 - DNA, 2300 bp, Homo sapien
gcttttatatttacatactttcttgaaccatttgttgtagacataatatttcatgtctcaaagaaaagcttctcatttactaattttcagaaccagccattggtctgatagttacctgcaattgtggcaattttgaatgttttttgtttagagtttttttaaatattattcatggatttttattcagtgttttatagtcacttataatgggtattccttttgatgctcaaattatgcccattttggtcagtgggagtttatttagtcagcttctgtgtccttttcacccagccccatttgtatttgagtaccacctcgctttccagcccaaaagatgcccaagctcatcttgtactttccctgccacagacctgtagtcagccatttgctgaagtgtttttaaatgaattgatggtgctatgataggagtttataaatgctttgattgaaaaggattatttctgtaactgtgttcagtgccatttcttcctaaacgataactgtgagaattatactaccaggggacaaggaggaagtaattttgtttgctgctagatctctagttttcctttttgccctcatccaagtaaatgagagaaagaggagaaaccaccttttcccactgaagactttattcttggatgccagtttttacctattctttttctctgccatattttctttggattaatactgttgtttttgctttctttgtttctggtgtgtttattttagaataaccacacagaatactccctaatttcattcactcatcactataaaatattaggttcttggccaggcatggtggctcactcctgtaatcccaccactttgggagatcaaggtggatgaatcacctgaggtcaagagttcgagaccaacctggccaacatgacgaaaccctgtctctaccaaaaatacaaaaattaaccgggcatggtggcgggcgcctataatcccagctgctcgggaggctgaggcaggaaaatcgcttgaacccaggaggtggaggttgcagtgatccgagattacaccactgcactccagcctgggcgacagagtgagactctgtctcaaaaaaaaaaaaaaaaaaaattaggttctctcttactttctctttccttattaaacaatcatcattttccctcaacattactcttaacttgtctttagacattctacataattaagacacacgatttatttccaaagaaacctctcccttatctagagtcacatctctaatgcatgccacagttttagatgtgatagaatattaaagatcacacaggtcaatctcttcccctcttaggaaaaagggacatttttccagaatggcagcaccaaaatcaagaaaatcaatagttgaactttctggctacagactaatagaaaatatggacttgactcttatattcaaataaacaaactatgaattcctaggagaagaaattcattttattctgaatctagtttttattaaagtcaatggtcagagcaaataaacatatttgtgcatatatgcacctcttaatgctaatttatttttagacctgtaaaatctgagacaccacttatttttagctgaatttgtatgtaattttgctaaagggatgttaaaataatcatttgctataaaaagtcacttttgaatccttaaagaattctagttgttggcaacttgtttgtaaaagacaaatatgtcacattctcaagaagtattgaaaatctctattttggtagagccataatcaaattatgggcaataggtgttataagcaactgcatttatgttcctgtgcgtaggaataagtactatgaagtattagctattgttattgtgccttttatttttctgccgtagaacctggtgaagcgccaaaaaattctcctagcatactagctatgctggaaacactacaaaatgctccctacctagaagtccacaaagacatgattcggtggatattgaaggtaaaatttccacattcctctgctttttgtgagaaatattgaatatttgttatgtgtacattgtgatcatatttcatacaggatactgatacttttttttttgtagacttttaatgctgttaaaaagatgagggagagttcacctaccagtcccgtggcagagacagaaggaaccataatggaagaggtataaacagtaaaaagtgtgataatactaaaaaattacagcaagttcagtatgaacaaaataaatttatctacattaagttgccagttactcacaacatttaaattccaagaaatatgccactatttatctctat

SEQ ID NO: 36191 - DNA, 2300 bp, Homo sapien
attgtgccattgcactccagcctgggcaacaagagtgaaactccatctcaaaaaaaaaaaaaaaaaaaaattgcagcctggcagtatagtgagacctcatctctacacaaattttaaaattggctaggagtggtggcgtggcatgtacctgtggtcccaactacttaagaggctgagttgggaagatcactggagctggggaggttgaggctgcagtgagccatgattgtgcccctgtactctaggctgtgcaacagcacaagatcctatctttaaaaaaaaaaaaaagaagaagaagaagcagaagaatgtatattctagctccactttcttgctaaccattcatatttcaactcctgcagtttggctccacttctaacactttctgacttctatgaaatatctctttccaagttcaccaaatgatctcctgattatcattttgcgtgggcattttttagcccttgtctttgaaacctctacttaattgctcattctgaaacttttatttctctccattccttcttcattctgaaactcaattttcccttaatttctgtgacactcttggctttctttctgcctctgtggctcctgcctctcagcccactctccctcctccatcctgcagttgtcatttttaaacctccagagttctgccatctaatactcttccctggtcagccccatctatgcctctgatttcagttatatccaaatgatccccacctgtgtatctccaacccagatctttatcttaggtgtaggttatctctgcctatttttttaacctggatctcctacacatacctaaaattcaatccaaattaatttttcttcctatagtccctgttttagttaatttcaccactattcatccaggagaaaccagaaaattgaagtcttttttttttgagatggagtctcactctgttgctcagactggagtgcaatggcacaatctcggcccactgcagcctctgcatcctgggttcaagcgactctcctgtctcagcctcccgagtagctgggattacaggtgcatgccaccgtgcccagctaatttttgcgtttttagtagagatggggtttcaccatgttggccaggctggtctcaaactcctgacctcaggtgatctgcccatctcggcctcccaaaatgctgagattgcaggcatgagccaccattcccggcctagatacattttttagcctgggcattcacattcagttggtcagcagagtctgacaaattctcaccattccttcttctacttgtttggttcagccccatattatttcttgcctagattatcatagcagtttttacccagaatctcactcttctctaatacgttattagaggggctcctcaaaagcaatcctgttcatattcttcatacttttacaaacttcttaacctatttctccattatcacctcctgccagttcccacccctgtggtccagacttgtagaatcactgccagttcctcaatgctagttcccatgcctttgcacattccatttcctctgcctagagtaccctaagcagactgctactctttcagatgctgttcaagctttcccttcccttagaaagccctctgaaccatgtactgtgagttagagacctctcatctgtgatgcctgcctccttccccactttcttcctttcccaccccaggactttaagctctttgagagcaggagggggagaatgggttttatttgaagatcttcagaaccaagacctagtgtatatagtaggacctcaatatttattgaaccaaacattacagaaaatttggaaaatgaaaaaacaagcaggaagaaaaaagtcatcaacttatcacatacccatctttttccattagcatatttatgcttgattacaattggtactcacatgtagctttgtttctgctgtattctttaaatcaagagttttcttattactgctacttagtcctcataacaatttttaatagctgcaggcaccctcatttgtaccaccatcttcttagacagtttccccaatatttggagtatctctttaggatactctacattttacggaagagtatccacattttagaggatctctttaggataaacataagagatatgtgttttagggtatctgtttaggataaacatagagaaatactgcatccgcatcttggcttgtttatttgttttttgagatagagtctcgctctgttttccaggctggagtgcagtggtgtgatctcagctcactgcaacctctgcctccagggttcaagtgattctccttcc

SEQ ID NO: 36192 - DNA, 2300 bp, Homo sapien
aataacagcccttagtaatttttttttttttttgagacgagtctcgctctgttgcccaggatggagtgcagtggtgcaaccttggctcgctgcaacctccgcctcccagatgctagtgattcttgtacctcagcctcctgagtagctgggattacaggcatgcaccacaacgcccagctaattttttttttgtatttttagtatcacctcagcctcccaaagtgctgggattacaggcatgagccactacacccggcagtaatttttaatatagtatcaaatatttaacatacaagcagcataaagaataatataataggggaggctgaggtgggagtatcactcgagcccaggagatggaggctgcagttagtcatgatcgtgccactgcactctagcctgggtgacagcgagaccttgtctcaaaaaaaaaaagaagaatataataatgtaagagcttaaacattacctagacagttgaagctccccagctgtctcttctctgttgcctctttctcctccctctgaagatacctactattctaaatggaatattaagcattccattcctatacattaactatataagtttctattcttgagcagcatgtattgttattttgtatgttttttttttaattagtatttattgatcattcttgggtgtttctcggagggggggatttggcagggtcataggacaatagtggagggaaggtcagcagataaagatgtgaacaaaggtctctggttttcctaggcagaggtccctgcggccttccgcagtgtttgtgtccctgggtacttgagattagggagtggtgatgactcttaacgagcatgctgccttcaagcatctgtttaacaaagcacatcttgcaccgcccttaatccatttaacccttagtggacacagcacatgtttcagagagcacggggttgggggtaaggttatagattaacagcatcccaaggcagaagaatttttcttagtacagaacaaaatggagtctcctatgtctacttctttctacacagacacagtaacaatctgatctctctttcttttccccacatttcccccttttctattcgacaaaaccgccatcgtcatcacggcctgttgtcaatgagctgttggttgcacctcccagatggggtggcggccaggtagagaggctcctcacttcccagacggggcagccgggcagaggcgccccccacctcccggacggggcggctggccgggtgggagctgccccccacctcccggacggggcagctggccgggtaggggctgccccccacctcccggactgggcggctgctgggcggagacgctcctcacttcccagacggggcggctgccgggcggaggggctcctcacttctcagacggggcagccggtcggagacactcctcacctcccagacagggtcgcggccgggcagaggcgctcctcacatcccagacggggcggcggggcagaggcgctccccacatcccagacgatgggcggccgggcagagacgctcctcacttcctagacgggatgacggccaggaagaggggctcctcacttctcagactgggcggccgggcagagacgctcgtcacttcctagacggggtggcggccgggcagaggctgcaatctccgcactttgggaggccaaggcaggcggctgggaggtggaggttgtagcgagccgagatcgcgccactgcactccagcctgggcaacattgagcactgagtgagcaagactccctctgcaatcctggcacctcgggaggccgaggctggcagatcactcgccgtcaggagctggagaccagcccggccaacacggcgaaaccccgtctccaccaaaaaatacaaaaaccagtcaggcgtggcggcgcgcgcctgcaatcccaggcactgggcaggctgagacaggagaatcaggcagggaggttgcagtgagccaagatggcggcagtacagtccagcctcggctcggcatcagagggagactgtgcaaaggggagagggagagaagagagggagagggagagctgtatgttgtattttattttatttatttatttatttatttatttattgagacagggtctcactctgttgcccaggctggagtgcagtggtgtgatcttggctcacagcaacctccgcctcccaggttcaagtgattctccagtctcagcctccaaagtagctgggactacaggtgcacaccaccatgcctggctaatttttgtatttttagtagagacggggtttcaccatattggtca

SEQ ID NO: 36193 - DNA, 2300 bp, Homo sapien
acattggctaaggtggtaggaaggtatcaatttatataagctgtttggataggagccccttgggatgaagagccaggcagcaatgtgtgtccactttatacagagggatggaagtcattcatagatcacaaacactgaggtactatttggctatttgtcccattcattcaaagtagatggattcagtcccagaagtttaaatttcctagttagttcccttgttttccaacctttcaaccctgagcatccattcccaagatgtttgtctggatatgttggaaagagcataggaaggggaagtcatgagatctagggtgaagttttggttctgttgttcaaggtcttgtgaccttgggcaggtcactagtcactctgcgctttggcttgcccatcttttaaatgagcactggaatagaataggtaattttggaagtcacctcctagccctgcctggtagctggcatgcagcaggtactcattaaatgcttgctggtgtttacttagcgagtcatgatagtgcaatgtgataaagcatttctaaagtattcttggcatatgtaaaagtaaaatgctgcgatgggctgtgggaggtgctggtgagagagagactctcgaccactgtgtcggagggaacagcctgtgcactggctccagcgggctgctcttcccaacacacccaccaacctggggctcgagtgacttttcagggaaagggcagcctgccttgaggcagccgctttccctcacctcttctttctgtctgactcgaccctacctggctgaggttaggggttcagttattcctaagggtggtttttttttcttcccagtgaggctggcaagtccaaagggaacttgaactcagggcattggcaccagcagcaggacatgtttgaagcccaaaacaacattaatgacgcccaaatagctagcttatatctgccctgcagatggaagggacgtccaagtgaaggtcacttcttgggattttattttcttgtggatggagattactgctgcaaatccccagtcaggagaggattgtaaagggctgtgcccttcccaggtgacaggtctgcaggggcagcacaagatgccacgatttacataaatctcccgaggagggcatgaagccagggggacaagcagaattctggggagtgggagaggccgatggtagaaccagcctctgtgagcagaggctcacagagaaggggcttttcatcttttcctctatcatttcccttgattgtctcctgcatagagtcagttcttggacagatgtattcaaatctctcggtaactccaaatccccttttgtatcagagtgaaggaattatctaggtcactccactctcaatggtcaatggatccaaaatttcaggcaaatatttagctgaatcaaaactccttcaatgtcccataccaacttgttggtgggaaattttcctaactccactgacttggaaaaattcttctattacacgcacaaaaaatacagcagtaatattaaaagaagccaaaataggaaaacaaattcaagctagcttctcacccataacttgattaatgcctttagtttttctacatttcagtttcagtctagtcttgttaacatttacataatcatacagtgtaatgatagtataaagacaatttagggccgggtgcggtagctcacacctgtaatcccagcactttgggaggccgaggcgggcggatcacctgagttcaggagttcgagaccagcctgaccaacacggagaaaccccgtctctactaaaaatacaaaattagccgggcatggtgatgcatgcctgtaatcccagctactcaggaggctgaggcgggagaacgcttgaaccagggaggcagagattgtggtgagctgagatctcgccattgcactccagcctgggcaacaagagcaaaactctgtctcaaaaaaaaaaaaaaaaaaaagacaatttagtgttccattttgtaatctgatagtataacatttgcataatatccacaatgatcatgtttaatggttgcataagaagtccactgaagccaggtgcagtggctcacgcctgtaatcccaacactttgggaggccaaggtaggtggatcacgaggtcaggagttcgaaaccagcctgaccaaaatagtgaaacctcatctctactaaaaatacagaaaattagctgggtgtggtggcatgcctgtaatctcagctactcgggaggctgaggcaggagaattgcttgaaccagagaagcagggaggcgggggttgcagtgagccgagatctt

SEQ ID NO: 36194 - DNA, 2300 bp, Homo sapien
gtgatgaaacgttattcagtgataagaagaaatgagctattaagccgtgaaaagatacagagaatcattaatcacatatattgctaagggaaagaagccagtctgaaaaggctacatgttgtatgattccaactgtaagatattctagataaggcaaaactatagatctagacggtggttgcccagggctgaggagtgagggaaggaggaatgaataggcagaacatggcaggttattagagtagtggaagtattctgtatgatacaataatgatgaatacatgacattatgcatttggcaaaagtgacagaattatatgcacaaagactgaaccttaatgtaaactatagactttagttaataatagtgcatcaatattggttcattaattgtaacaaatgtaccacattaatgcaagatattaattagaggagaaactggttggggagatggagaataatgggaactccctgtattttctgttcaatttttttgtaaacctaaaactactgtaagaaataatccattaattaataataataataaatgtacagattcaccaagagtgtacacttctacttccactctctttgttgatgtatggtgacagaattttgacatacattcaatttgatggatcgagtttggtctttttctttttttgagacgtcatttcactcttgtcacccaggctggagtgcaatggcgcaatcttggctcactgcaacctccacttcccgggttcaattgatgctccttcctcagcctcacaagtaactgggattacaggtgcctgtcaccatacccagacaatttttgtatttttagtagagacagggtttcaccatgttggccaggctggtcttgaatgcctgacctcaagtgatccacccaccttggccttccaaactgctgggattacaggtgtgaaccactgtgcccggccaagtttggtattttattgttgtttggatttgcattttcctgcttattacccaagttgagatcttttccagattattggacttttcaagtttcctaattatgaattgtctgttcctggtttttgcctatttttccagttgattattggtcttttgattgtgaatttttgtttattgtgaatttgtgagacttaaaacatttttgcatattaattcttttttttttttttccagacagagtctcactgtcacccaggctggagtgcaatgtggggatctcagttcagtgcaacctccacctcctgggctcaagcgatccacctgccttggcctcccaaagtactgggattacaggcataagccaccatgcctggccactgtatattactttttaattttacaagttgcaaatgttttctcacgatctgtcactttctttctttccttccttcttctcttcttttctttgtctttttaaaatttgagacagggcctcactctgtcacccaggctggagtgcagtggcacgatcatggctcagtgcagccttgaactccccaggctcaggtgatcttgccacctcagcctccagagtagctgggagaactacaggtgcatgccaccatacccagctaatttttttttttttttttttgtgtgtgtgtgtgtgtgtgtggagatggggtcttcctatgtagcccaggctggtcttgaactcctgggctcaagtgatccacccaacttggtctcccaaagtgctgggattataggcgtgatccactgtgcctggccctgtcatttcttttctcagagaggataacaatttatttgtcctacagaaagttttaaatgttgaaggagattggcctggaaatatgcttttggggagcaacacggtctgagccagacatccagatacagcccattcttctggccagtcttgccctttgctcctgattctccaagctgtacccagagctttctggttcagcatgtacctggaggctgcttttgaccatgttttgagagtggcatggctttatctaatgggatgaacctggctaaagagattagcaaaatgtcttgtggatcccacttttaatctgcagcgttcaggctgccccttcttggctgggaagggcgctgaagaaacaacgcccaggaccaggactatcccctgctcaagctgtgattccgagacccctgccaccactactgcattcacggggatcccaggctagtgggactcgacatgggtagcccccagggcagctccctacagcttgggccatctgcacttttcccaaggccctaagtctccgcctctgggctcgttaaggtttggggtgggagct

SEQ ID NO: 36195 - DNA, 2300 bp, Homo sapien
ctgacaagctgggatatatttcaaagatgcatgctgaatccactgccctcaaatggcagagagaggatgcaaacacagccgggcaatgccagccatttcgcagccttcctactgtgtttgaactcagaaacagctttatctccatttcttgaccacatacctcacagcctgcagctgtgcaggggggctgtaaagaactgtccagccaatgcttcacaatgaccgtatcactcactgacccctttccactactcctcacatcagtctttgaaactgcccctaacacaccgggtcacctgggtgacctgtcaagctctgtttttaactgtttccttttcttgaaagttcgaactaaccaacttcaagtatttagaaacttcccaagtctactggattgtagcaaaaacctgttggtagacagaaatgaagttcttgaaagggtttaataacattcaattccacttgggatacagccaacacttacaacacccatagattcactatgcctaataccgaaatgttatctcactccagctgcaacctccaagtccaataaaccttctttagctacaaacgttcttaatttgagtgagacaggttcaacctgaaaaacttaaaaggtcaggttgtttttttctagaaaaataaatcttctctaaagcttctttgcttaaatcaacatttcataaaataaagcagctattgcaattcctccacgacttggacaatataactagctttcttgtccaccagctttcagacccacagttttgtgaaataaacctgcttttctggaaaaaaaaaaaaaaaaaaaaagggccaggcacagtggctcatgcctgtaatcccggcactatgggaggccgaggcgggcgcatcacctgaggtcgggagttcgagacgagcctgaccaacatggagaaaccccgtctctactaaaaatacaaaattagccggacatggtggcgcatgcctgtagtcccagctactcgggaggctgaggcaggagaatcacttgaactcgggaggcggatagcggtgagccgagatcgcgccattgcactccagcctgggcaacaacagcataactccgtctcaaaaaaaaaaaaaaaaaacaaaataaaacaaaaaagcaaaaacagaagcctcacctaatctgcccataaaacaagactagtgaaaacgatgactatgcacaagagtaagcaccattgtttttcggcacccccttttccatcgggtgcacgcaggcacgcggacacacaagcctctcccctgcccccgcgccccgcctgcgcggggaatctgccacacggtatgaactgtgctctcagcggagaaatactctggcccagcaatttatgtgtgttttgtttgttttaagtgggaaggaaaggaagagagtggggcgtgaaaatgggagatcagttttaactcagatttaattcaatggttcgcgtttcctcccatctttctctgcatcaaaatgcaggtagatcggtgaaatttcaagtttcttgggtcgttaaataccccaatttaaacgatggaggctgggaactggggatataaggaggaaacctagggttggaagggcgggcagggttaaagaggttcgggagctccgcagatctgagcgaagcatgcgaggctgccgcgcccgggcagcggctgcgtctcgggttctcgccctgcccgctgcctcgggtttttgccagtgactgcgccgtcttggctgcccacccacacctcgggttggtcccgactttaggctaggccattcacttccggtgacaaatccctcccaccacccctagaaataatgtaccgcttctcccaccgctttcctaagaccgaccgccccagagagccacggagcccggggctagggtctcaccccagcgcggccggcgacgcccagctgcggagggagtggccgggaccgagctcggggagggcagggaagaaagaggaagggggtgtggatctcaccttcccccgcccccacccctccgactgcagcaattggccaaaaaaatagtaatccttttatggactcccccagggcccctcgaaccaggttgcagtgaggaacccagtctctcccatcgcagtgccccttgccttctcctgccctagtaactgcctgcggggatccaggagcccccaggccgcgccgaactgcagtggataggggggaggggggcggtaaggatgagggctacggggaggcagaaatgggttgggggaaggggtggtggaagggaaaagaaaaaaccggaggcatgcaagcggctccc

SEQ ID NO: 36196 - DNA, 2300 bp, Homo sapien
ctctgtcagcctgcccatagctcactgcaacctccaacttatgggctcaagcagtcgtcctgcctcagcctccccagtagctggaactacaggcatgtgccacacatacctggctaatttttaattttttttttagagatgggatctcgcaccatgttgcccaggctggtctcaaacttctaacctcaaatgatcctcctccctcagcctcccaaagggctaggattacaggcttgaaccactgtaccctgactaaaaagatcttctgtgttgaatatgacaacattgtatgccggccccaacagatttaatttatgcaacatagtccagttacagtatccttatatatgcaagaaaggtgtactaccattacatttttttttaatgcttaaggggatatagaagccatacaataatttcacttaaataattttaatctagagagagttttattgagaactcaccaaatatctgggagagatgggcttgagccatttgagaatagctactccataggcagagcagctgagcattctgtttatcagcaggatcctattgctatatgcattacaaatgaattttaaaataatttataacatttcttaggcttaatatgtattttttaaaacctgaattacattctgtacaattcaccttttacctatccttgatgtttatttaaaataaaagacaacaaaacccctagtatattttgtgggcatttgtagttaacctagactacaaaggcacctgctcccactccaggccacgtaatgttgttgttgttgttgttttgttttgtttttgtttgagtcttgctgtgtcgcccaggctagagtgcaatgcgcgatctccgctcactgcaacctttgtctcccgggttcaagcgattctcctgcctcagcctcccgagtagctgggattacaggagcccaccaccacgcccagctaatttttgtatttttagtagagacagggtttcaccatgttgtccagactggtctcgaactgctgacctcaggtgatccactcgcctcggcctcccaaagtgttggaattacaggcgtgagccaccgcgcccggcctgggccacataatctaaatactttggatactagatagtttacagagaagtttcaacaatttgagatttgagattaaaaataggtggtagttatacttggaccaaagaatgttaaaagattgactagctctcttttaagaatgagggggttatgtaatgaaaattccgcaaatatagagataaaagatatctacataaagagaaggcagtagaaaatgaatgttttgagagtgatttactctgcctcaccttccttttagtcactgaagttttgttttcctttttaatgttcacatacgggcttcacaggtaaggtttcaagaattttggaatggacaaagagtgttgcaaaggaaagcttagtacatttgaaagttaggatgaaccagttatttgcctaataactaagttaaaagtcgttttggtttttaaaaagcatatgcaaaacgtattcactgaggcttgctctaattagagttctaaacaaatcttgtagggttttttttttttgtctttaatctccccccttcccgtgtcaagttaaactgggtgggtgggtgggtgtgtgtgtgtgtgtgtgtgtgtgtggagagagagcctgcaagagaattagcacgcacctcgtggatcttagtaattgttttaaagccaaataaaactgtttcttgaataaaccaatacatttctgaagttgaaaagaatcccaaaggaaacgaatgaacatccttgcagcttgattttccaaaaaaaaaaaaaaaaattttttaaattaaaaaaatcctaatctccacattttttgccaggcgagaaccgaagtttggaggtagacgagcaggcgagcggtttgcccgggcgcagagcatgaaggccgggcgggcgcggggagcggcgccccggcccggcgcgggggtgagcgagagagagagcggagcgcgtgtggccggcgccgctcggccgggagctcccgcgctccggcccccggccccgcgcccgccgccgccgccgccgccgcccctgttgcgatggcgcagaaaccccgttgacaaggcactgctttttcatgacggtgagtttccctttgagtgtattataattttgtgataaaaatttcaaggagaaaaaaaaaacacacaacctccttcctctgcctctttccttcggggaggggaaaagcgagggagggggggctggagatctgtctccagactgaaaagaa

SEQ ID NO: 36197 - DNA, 2300 bp, Homo sapien
cccgggttcaagcgattctcctgcctcagcctcccgagtagctgggattacaggagcccaccaccacgcccagctaatttttgtatttttagtagagacagggtttcaccatgttgtccagactggtctcgaactgctgacctcaggtgatccactcgcctcggcctcccaaagtgttggaattacaggcgtgagccaccgcgcccggcctgggccacataatctaaatactttggatactagatagtttacagagaagtttcaacaatttgagatttgagattaaaaataggtggtagttatacttggaccaaagaatgttaaaagattgactagctctcttttaagaatgagggggttatgtaatgaaaattccgcaaatatagagataaaagatatctacataaagagaaggcagtagaaaatgaatgttttgagagtgatttactctgcctcaccttccttttagtcactgaagttttgttttcctttttaatgttcacatacgggcttcacaggtaaggtttcaagaattttggaatggacaaagagtgttgcaaaggaaagcttagtacatttgaaagttaggatgaaccagttatttgcctaataactaagttaaaagtcgttttggtttttaaaaagcatatgcaaaacgtattcactgaggcttgctctaattagagttctaaacaaatcttgtagggttttttttttttgtctttaatctccccccttcccgtgtcaagttaaactgggtgggtgggtgggtgtgtgtgtgtgtgtgtgtgtgtgtggagagagagcctgcaagagaattagcacgcacctcgtggatcttagtaattgttttaaagccaaataaaactgtttcttgaataaaccaatacatttctgaagttgaaaagaatcccaaaggaaacgaatgaacatccttgcagcttgattttccaaaaaaaaaaaaaaaaattttttaaattaaaaaaatcctaatctccacattttttgccaggcgagaaccgaagtttggaggtagacgagcaggcgagcggtttgcccgggcgcagagcatgaaggccgggcgggcgcggggagcggcgccccggcccggcgcgggggtgagcgagagagagagcggagcgcgtgtggccggcgccgctcggccgggagctcccgcgctccggcccccggccccgcgcccgccgccgccgccgccgccgcccctgttgcgatggcgcagaaaccccgttgacaaggcactgctttttcatgacggtgagtttccctttgagtgtattataattttgtgataaaaatttcaaggagaaaaaaaaaacacacaacctccttcctctgcctctttccttcggggaggggaaaagcgagggagggggggctggagatctgtctccagactgaaaagaaaggagcaaattaaacaccgagttgccaaaaccaggatattaggtttcagcccagagagctattggctaaggctgtgttttttttttttttttgggggggggtgggtttgtgggtgggtgatggtggtggtgggtggatgtttaatggacacggagaaaaggggaatcgagtgtttatgcctttcccagcgctgccggggccccgggaagaccaagttcagtgtctcgggcgggggcgcaggcgggcagggggcggcgaggccgggccgggggcgcctcggcggggtgggggcccggcgcctttctttttccttttttttcttttccgcggatgcaaatttctggagcggggagagggagagcccgggaagggggtggcgtggcggttggtggtggggaggggaggggagggaagccttttaatgactcattgattgagccggtttaaaattagttgtgtgcgcgagtgtgagtgtgttttccgccccccggagccgccgggagccgggaaggagggagcagggctcggcgaggggaagacggcgcggcggggccgcgagcagggggcagggagggcctggagtgacggcgggcgaggaagaaaaataagcttttccaatctcctcccctctgttttccccccctcgtttcttttctctctcggaagctctagggtgtgaatcacattttctttcttctcggcaaaatggaccccgcgtctggggagggggaggggagagggtggggagggaggcggcggagacggggtttatttttcatcctggcttccccattcccgccgcatctgcgggcggccgcggcgaggagagcaggtccggggtgcggcggggagagctcggggcaggcgagtcgccc

SEQ ID NO: 36198 - DNA, 2300 bp, Homo sapien
tagtacatttgaaagttaggatgaaccagttatttgcctaataactaagttaaaagtcgttttggtttttaaaaagcatatgcaaaacgtattcactgaggcttgctctaattagagttctaaacaaatcttgtagggttttttttttttgtctttaatctccccccttcccgtgtcaagttaaactgggtgggtgggtgggtgtgtgtgtgtgtgtgtgtgtgtgtggagagagagcctgcaagagaattagcacgcacctcgtggatcttagtaattgttttaaagccaaataaaactgtttcttgaataaaccaatacatttctgaagttgaaaagaatcccaaaggaaacgaatgaacatccttgcagcttgattttccaaaaaaaaaaaaaaaaattttttaaattaaaaaaatcctaatctccacattttttgccaggcgagaaccgaagtttggaggtagacgagcaggcgagcggtttgcccgggcgcagagcatgaaggccgggcgggcgcggggagcggcgccccggcccggcgcgggggtgagcgagagagagagcggagcgcgtgtggccggcgccgctcggccgggagctcccgcgctccggcccccggccccgcgcccgccgccgccgccgccgccgcccctgttgcgatggcgcagaaaccccgttgacaaggcactgctttttcatgacggtgagtttccctttgagtgtattataattttgtgataaaaatttcaaggagaaaaaaaaaacacacaacctccttcctctgcctctttccttcggggaggggaaaagcgagggagggggggctggagatctgtctccagactgaaaagaaaggagcaaattaaacaccgagttgccaaaaccaggatattaggtttcagcccagagagctattggctaaggctgtgttttttttttttttttgggggggggtgggtttgtgggtgggtgatggtggtggtgggtggatgtttaatggacacggagaaaaggggaatcgagtgtttatgcctttcccagcgctgccggggccccgggaagaccaagttcagtgtctcgggcgggggcgcaggcgggcagggggcggcgaggccgggccgggggcgcctcggcggggtgggggcccggcgcctttctttttccttttttttcttttccgcggatgcaaatttctggagcggggagagggagagcccgggaagggggtggcgtggcggttggtggtggggaggggaggggagggaagccttttaatgactcattgattgagccggtttaaaattagttgtgtgcgcgagtgtgagtgtgttttccgccccccggagccgccgggagccgggaaggagggagcagggctcggcgaggggaagacggcgcggcggggccgcgagcagggggcagggagggcctggagtgacggcgggcgaggaagaaaaataagcttttccaatctcctcccctctgttttccccccctcgtttcttttctctctcggaagctctagggtgtgaatcacattttctttcttctcggcaaaatggaccccgcgtctggggagggggaggggagagggtggggagggaggcggcggagacggggtttatttttcatcctggcttccccattcccgccgcatctgcgggcggccgcggcgaggagagcaggtccggggtgcggcggggagagctcggggcaggcgagtcgccccggccccgttcccgctcccgctccgagcccgcggcggcggcgcgcacctgccgcgggactgccccttcccagccgcctcgctgccttttcgaagcaccgccgaggatccgcggccgcgtccggccgagcccccagccgcgcggaggaccggcggcccagccgggcgtctcctgcgaggcccgcgctgttcgccgcgccggccagaagagatgtgcggctgggacggcgcatttttggccgagtgcgcgcgggcgttatgctgttcgcgcccccccgagtcgccccaaatgcgggatattgggtgggggggtgcggttggaaggcgctaagatggcgctgggcctggcctgtcgccagggctggtggcgcagttgctcggcgggcgccatctttctcgcggcgcgggcggcgccctccgaggacatctcgatgaccagggcgccgcgaggcccggggctagcgggagccgagagcagggtgctgaattctggagatgggactggggtcgcgcggccttctccttccccacgcccccagacccaaaagacgaggccgccggctcggagcgg

SEQ ID NO: 36199 - DNA, 2300 bp, Homo sapien
aggatttgcttaatgggttggctgtggagggagagggaggaatcaagggtgccttcaggttgcaggctccagccttgggctgctgatggtaccatttgctggttggagaagactggaggaggaacaggtggagaggagtgggtagcaagagttctgtgtaaatacttgggaggcatccaagcggagagttaagtaggcactgaatatttaagttgagctgaggggagtgatctagactggacataaattttgggagtcactagtatacagatggcatgtcatggaactgattgagattgtttgtggccttaagatcaagccctgcgagactggagtaataaaactctggtctcccacacagccagctctgtgtggggaaaaaaaaaagccctaaaacactaacaacggctaaagcttgggcaaaggagactgaaaaggttcagccattaaagtgggagagtattttattattttcaagaaagagggaatggtcacctctgtcaaatgctgctgagaagttacacaatgagaatagagaaatgtctatttggatttgacaacatgatggtgactgttttgacaagtggtccaagccacattgggatgcttcgaagagagaataggaagtgaggtgaatatcgacagctcgttagggaaattttgctgctgtaaagtggagagaagcagcttagtggcttcagagggagatggggtcaaagaagagggcttttttttttttttaatttttttttaagacaagatgtcactcagtcatccaggttggagtgcaatggtgcaaattacggcttaccacagactcaacctactgggctcaagtgatcctcctacctcagcctctcctgagtagctgggaccacaggtgtgcaccactgtaacccaactaattaaaaaaaaattttttttatagagacagggtctccctatgtaaagaagaaggcttttcttttaaacaatgggaactagataggctaatgagaatatttaatagagaaggtgagactaatccagaagagagaccaagactaccaagggagcagcattcttttttttttttttttttttggagacagttttgctcttgttgcccaggctggagtgcagtggcgcaatctcagctcactgcaacctccacctcttgggttcaagcaattctcctgcctcagcctcccaagtagctagaattacaggtatgcaccaccacacccagctaattttgtatttttagtagagacgggtccaccatgttagccaggctggtctcgaactcctgacctcaggtgatccacgcacctaggcctcccaaaatgttgggattataggtgtgagccaccatgcctggccgggagcagcattcttaaggaattcaagacacaggaagaacacttgcctttagtgggagcaagacaacgcagtgtggcagaagacaaagaatgggggcacaagtgcaaggtgaattggaggtagaatataggacttaactttctgacggcttctgttttctcagtgaagtctgaggcaaggccggtgacttaaacaaagaaggggtagtggataatttcaggaaagatggacacttcaccttgagcaacaggacaaggaactgagtaactgggaaacaaggtagtttcaatgctgggcattgttgaatcccttgccgtggcttggggccatgaatttaaggtgaaaccagtcagctgagttagttgtgtgatttttttttttctcctagcaacattcagctgttatgagggcagcgaagagcaggcaggtgatcagttcacccaaaattcgtgttttgccctgcaggtttgacagaggagaagcagtgccagaggcttgagagtagttgcaagggggtgattttgatgatgaaccttgaaatgttagctgagtaggaaagcaagagaagaatcagagtgggggccatgaaaatcattactggcttaaagtgagttaatgggcgcagagtttcagtttgggaagatgaaaaatttctaaagctggatagggctcttggtttcacagcaatgtgaatgtatgtaatgccactcaaccaaacacttttaaatatttaaaattcagtaactctatagagaaataaagggttttcccaatcctggaaaaaaatggttaaaattgtaaatcttacatatattttaccatagtaaaaaatgaattaggctgggcccatggctcacacctacaatcccagcactttgggaggctgaggcaggcaaatcgtttgaggccaggagttcaaaaccagcctggccaacatg

SEQ ID NO: 36200 - DNA, 2300 bp, Homo sapien
tggatcctgataaaaaaattttccttatttataagagctctttatgtattagggagaaaagccctgataaaaaattttccttatttataggagctctttgtgtattagggagaaaagccttctggggtatgaagtggaggtatttttcttagttatttttgtttatttgttttagtctttgactttgcttatgatgtgtttttcttttatcatgcagaagctttgcactttatgtcgttgactttgtcagtcttttatgacttgtgtgtcttatgacatccttagactttcctcactccaagattgttaaaaaaaaaaaaattctcccatgagttattctattactttaaggttctttctccatccaccatttaactcctagatccatctagaatttatttttgtgtaagatatgaggtgtgaatctaccttattttccccatatggttaacaacttttccccaccgctttgaaacgtcatttttacactgtgtcctcttgattaaaagctattatttaagatgtttgttggtgcaattcagaacagttttaaatattagctttaattttttaagagaggtagtcaggtgttcaggacagtgatttctgaactcttggggtgcctacagcccccttccctccacgacaaatcccactgtctagtgctatttacagaggggaagacgtcttgctcatgtctgttgggccaagaaatagtttccaatcactcatccagggatttccccttagcctcataaaatccacctggggtcagccacccatctagggattccagggttgttacttgaatgtgaaaagagcctcaacaggagtccagaagtaaatggagaatctttccagagaaaacagaattcttcacttttaggtcattagtgactgatcttcagattatcttctcgttttatttatttttatttttatttttaattttattttttgagacagaatctctctctgtcacccaggctggagtgcagtggcatgatctcggctcactgcaacctctgcctcccaggttcaagcaattctcctgccttagcctcccgagtagctgggactacaggcaagtgccaccatgcctggctaattttttgtatttttagtagagacgggtttcaccgtgttggccaggctgatctcgaactcctgacctcaggtgatccacccacctcggcctcccaaagtgctgggattacaggcatgtgccaccatgcccggcctatcttctcattttaaaatcatagacaattttacaattttgctctggtaaatttactttgatggaccataggtcatctggtgaaaggaacccctggattaggctatattatgactacattttggcattatttgaagctagagaatacagggctaagggtcatctcttttaatttgaaactgtttaaggtgagaaaagagtgtgaccctttaaaaagcagaattctcagggtgcccctgactgtaaaggctcctagagttgtacctactgggaccagaggagaaggcctgtctggcagttcctgatgctgctgatagggggtagatattcccagggagccttctttcaagccaagtgtttgactccctgttttgtttggtagagaaggttgcacaatggcttttaatctcattcaatattataaaagtgttctgtttgcactactcaagtagtttgtcactctaaacttaggggtagcagctgttctctgtgcttgaaagtgctagtggtagtaacacctcaatggagtgactggtgttgacttcctgcctcagggcttgtttaacccttagggcacctcatcaagtagaggaactaggcaagtgtgtcaagtaaggagggaagctgggagagttgtggaagtgtttttctttggtataggctatttttcacttacatttttattaattagtttgttccagagacggacacttaaaaaaaatgaattcacaaaggatacaggggaattcaatttaagcggtcatgttaaaaaagtaatatctcctttataggcttaatgtatgtcataattggctaattttttccatatgattatgatgcctgagagacaagcctatggtatgctgatgagccatggttaatacaattttatctcactaaatgtcgtcaggatttaagggaagaccttcacacagatttttctgtatctacgtgatgatcattttcctgcttttcctttctgtcccatcttcactcctccacagtcatgttacactagtatagtcatgtgagtgtgcccatgagtgactccaagttgagt

SEQ ID NO: 36201 - DNA, 2300 bp, Homo sapien
ctcttggggtgcctacagcccccttccctccacgacaaatcccactgtctagtgctatttacagaggggaagacgtcttgctcatgtctgttgggccaagaaatagtttccaatcactcatccagggatttccccttagcctcataaaatccacctggggtcagccacccatctagggattccagggttgttacttgaatgtgaaaagagcctcaacaggagtccagaagtaaatggagaatctttccagagaaaacagaattcttcacttttaggtcattagtgactgatcttcagattatcttctcgttttatttatttttatttttatttttaattttattttttgagacagaatctctctctgtcacccaggctggagtgcagtggcatgatctcggctcactgcaacctctgcctcccaggttcaagcaattctcctgccttagcctcccgagtagctgggactacaggcaagtgccaccatgcctggctaattttttgtatttttagtagagacgggtttcaccgtgttggccaggctgatctcgaactcctgacctcaggtgatccacccacctcggcctcccaaagtgctgggattacaggcatgtgccaccatgcccggcctatcttctcattttaaaatcatagacaattttacaattttgctctggtaaatttactttgatggaccataggtcatctggtgaaaggaacccctggattaggctatattatgactacattttggcattatttgaagctagagaatacagggctaagggtcatctcttttaatttgaaactgtttaaggtgagaaaagagtgtgaccctttaaaaagcagaattctcagggtgcccctgactgtaaaggctcctagagttgtacctactgggaccagaggagaaggcctgtctggcagttcctgatgctgctgatagggggtagatattcccagggagccttctttcaagccaagtgtttgactccctgttttgtttggtagagaaggttgcacaatggcttttaatctcattcaatattataaaagtgttctgtttgcactactcaagtagtttgtcactctaaacttaggggtagcagctgttctctgtgcttgaaagtgctagtggtagtaacacctcaatggagtgactggtgttgacttcctgcctcagggcttgtttaacccttagggcacctcatcaagtagaggaactaggcaagtgtgtcaagtaaggagggaagctgggagagttgtggaagtgtttttctttggtataggctatttttcacttacatttttattaattagtttgttccagagacggacacttaaaaaaaatgaattcacaaaggatacaggggaattcaatttaagcggtcatgttaaaaaagtaatatctcctttataggcttaatgtatgtcataattggctaattttttccatatgattatgatgcctgagagacaagcctatggtatgctgatgagccatggttaatacaattttatctcactaaatgtcgtcaggatttaagggaagaccttcacacagatttttctgtatctacgtgatgatcattttcctgcttttcctttctgtcccatcttcactcctccacagtcatgttacactagtatagtcatgtgagtgtgcccatgagtgactccaagttgagttctaaaaagcagatttcacttagccagctgcccttgtcagtttcagccttgggagtcaccttttggtatcttttcccactgcttcttcctcctttctcaaccatcatttctcctctccactggattctactcacagggtttgtaatctcccagatcattcagcatctgaatgaattcagccgccaaggggaagatcactggcagatcccagtgggggtacttaccccttccagactcttcctgaggaaagcaagttaccttccatgtagcaggagtacattttatactagtttggccttgtgactgttagagtgggaagtctgagggaactggagaagagatgcagttttaacagaggaaaaacatttagtagagactgtcccttctgccttcgggcgtgtccctcttctgggcatcttttcaggatttcattcctacgtccaactgccgttcacaactgccctttccaactgctccagaactcttggccctggcattccgtgatgtaaattattccacacatggctcaaaagggtgtgaagctgtgtgccaggtgtcggatcactagtgtaagtttcccagtctgtggggagagctgctcttggaatctg

SEQ ID NO: 36202 - DNA, 2300 bp, Homo sapien
tcctgagctcaagtgatctgcctgcctcggcctcccaaagtgctgggattacaggcgtgagccatcgccgcctggctgaagtattgttaaccctaaaattcctcctccttttaatattattggtaccacagactctaccttttatccatagacaggaaaaatcacaaaacatttaactttttgcttttttgtttactatttagtgaatgtcttacactttggtgacccttgtgtttagcctctttacaaagacacatggtgaggtgctgaaagagaatgagcctccctctttcagtgtgtgaccttgaatgctgggttgtcctgacacttactcatcagaaagtgacctgtgcccatggcactctttccggttggactagttacatggcaacacgaggcctttagctgccaccagtatcagtatcaatagtgccaaaatcgagaaattggtgctagatccttaggatcagtgatgagtaagcagtcatggttcctgccccccctagtatcatgtggaagaaatattaaaaatataataatgtcctgagggaaatcagacactactctagagtcttactagtcagcccatagaccagtagcaccagcgtcactctgaagcctgttaaaaatgcagaatattggccaggtgcggtggctcacgcctgtaatcccagcactttgggaggccgaggcgggcggatcacgaggtcaggagatcgagaccatcctggctaacaaggtgaaatctctactaaaaattcaaaaaattagccaggcgtggtggcgggcgcctgtagtcccagctactcgggaggctgaggcaggagaatggcgtgaacccgggaggcggagcttgcagtgagccaagatcgcgccactgcactccagcctgggcgacagagcgagacgccatctcaaaaaaaaaaaaaaaaaaaaagcagaatatcagctccccacccggcctcctgaataaaaatctgtattttagtaaaatcttcaggtgactcctattcactattaatgcttgagaagcgctgctctggaggtttccagagatgataagacttgtgttgtttttcaggatttttaattttaaaaaaaatttatttcttgttttttttgagactgtctcgctctgtcgcccaggctggagtgcaagtggcacaaactcggctcacgcagcctccgccttctgggacttcaggcgcgagccaccacgcccagctaattttttgtatttttagtagagacggggtttcaccatcttagccatgctggtctccaactcctgacctcaagtgatccacctgccttggcctcccaaagtgctgggattacaggtgaaagccaccggcccgacctactgtttttcaggattctatatagactgggagggaagaacgcaaattccgggcgatgagagctgcataagggttttatttttattctttttttttcttttcttttctttttgtttttttgagacggagtcttgctctgtcgcccaggctggtgggcagtggcgcgatctcggctcactgtaacctccgcccaagacggggtttcgccgtgttggccaggctgatctcgaactcctgacctcaggtgatcctcccgtctcggcctccctcccaaagtgctgggattacaggcgtgagccaccgcgcccggcctgtgtaacggttttagacgggaaggaagcatgttgtagttttcggtccagcagtaatagtaacaaacatagtgctgacagacactgctaaacgctttatctaatctcctgtaatcctcgtaacgccattaggtagacctattattactgtacacccattttatgggtaatgaagccgcagtatagaggggttaaataacgtgttcaaggacgcatcgacggggccaagcagacggaattgcagctacctgctttaccactctaagtcctcaacaaacacttccacctacacgtgagagccaaagccatagcctccaagtttttccacagagcgaaaatgtttcgcggagtttgcctgtcttcctccccagagacgcagcacagccgcgccggaagtgcggcgccgtagctaggagcggacgccataggtgcattgtgggaagcactttgctgtccacagccaggccgcttgtgatgaaactgtaacttacaagaaaagggctgggttttgaaaataacacaggctctaaaaaccctaagaagcggtgcaacttttggcaggaatcggggttagcgggacctcaagggctcactgcggctaagtgaacgctgactggtcctccagcgt

SEQ ID NO: 36203 - DNA, 2300 bp, Homo sapien
gtgtaagagtagtattcctggccggacacactggctcatgcctgtaatcccaacactttgggaggccgaggcgggtggatcacacggtcaggagtggatcacagggtcaggagattgagaccatcctggccaacatggtgaaacccctgtctctactaaaatacaaaaaaaattagccaggcatggtgatgtgtgcctgtattcccagctacttgggaggctgaggcaggagaatcgcttgaatccatgaggcagaggttgcagtgagctgagattgtgccactgcaatccactctgtctcaaaaaaaaaaaaaaaggccagacacggtggatcacgaggtcgggagatcgagaccatcctggctaacatggtgaaaccccgtctctactaaaaatacaaaaaaaattagcctggcacctgtagtcccagctacttgggaggctgaggcaggagaatggcatgaacctgggaggcggagcttgcagtgagtcgagatcgtgccactgcactccagcctgggagactgagcaagactccgtctcaaaaaaaaaaaaagagtagtattcctcaaacattgaaacccaacaaaaacttggattttatttccaactcttgcaccatcttgagtagagggtcacctaaggccagagtcgtagcccctaaggtaagctaggacatggtttctgttttgtttttgttggcaatattttccctggtgaacatttacatccataaatttaaatttctaattatgtaagtggggtcacttcagttctttatcaggagtatttccaagcatttcagctggaatgtgattgcagaacacttgctcgttgggagaagtgagtgtgtgggagaacctctccaacctctcagccaggctgcaggactggtatgtagtgtgccaggtgctggtgaaaaccgtgctttattttcctacatagatttccaaatctgaagtctgtccgagaactcattttgaaacgtggacaagccaaggtcaagaataagaccatccctctgacagacaatacagtgattgaggagcacctgggtgagtgctacagcttagggatcagctggggcagaaagccagggtctttgaagctttgatgtgagattcaggttgtattcttcttggggccccaagagtctgccagagtggccagcttagtatatgctggatacatgttaaataaaggaatctgtgcttttgtgtttcttagggaagtttggcgtcatttgcttggaagacctcattcatgaaattgccttcccagggaagcatttccaggagatctcatggttcttgtgccctttccacctctcagtggcccgtcatgctaccaaaaatagagtgggcttcctcaaggagatgggcacacctggctatcggggtgaacgcatcaatcagctcatccgtcagctgaactagacccaggtgaggcagggctgaaaactgcccttgggctgacttttgataggccatgccttgccactttacaagttctttttgcatttactagtatttaagagtaaccttgagattgggaggaatagaggaggctggtacaaatagatggagacctgctgggatcagtgaatgcctgattaggacatggggctatgcatagcctaagagttataggcttaaagatgtcgagtaactaaaaactgtattgctggccgggcgcggtggctcacgcctgtaatcccagcactttgggaggccaaggcgggcagaccatgaggtcaggagattgagaccatcctggccaacatggtgaaaccctgtctctactaaaaatacaaaaatgagctgggtgtggtggcgcgtgcctgtagtcccagctactcgagaggctaaggcaggaaaatcgcttgaacccaggaggcagagattgcagtgagccaagattgcaccagtgcactccagctgggcgacagagcgagactccatctcggaaaaaaaaaaaaaaaaactattgctgcagtcattcagatggaaatgaggaaagaataatattaataactgatttcaaaaaggacttgaagatgtgaatcatctattttgctgaagaaatcttaactctttgaaattactttttattgctgttgtcatactcttaggtgccaaactgcggtaaattttttatcagtgaagtggaagcatgtgttttgttttggaaatttttatcaagtatcttcagagaagattatttcctgctttatcttcagaaactggaaagggtcaaagaaaagacagtagctggccggtcgtggtggctcatgcctgtaa

SEQ ID NO: 36204 - DNA, 2300 bp, Homo sapien
acagctcagtgcaacctccacctacccgggttcaagcgattcttcgaccactgcctccagaatagctgggactacaggtgtccaccaccatgttcagcaattttttttttttgtattttttagtagagatggggttttgctatattgcccaggctggtcttgaattcctgagttcaagcaatccaccgacctcagcctcccaaagtgctgggattaaaggcatgagccactgtgtctggcctgtatttattttttatgtctcctttaatctggggtagttcttagctttttcttaatgttttataacaacgacatctgtaaagtgtccagaccaatcattttgcagaatctctctcactttgatctctatttcctcaagactaggtggtgagtgaacattttttgggcattttggggaggactactacagaaatgtactccccgtgtgtgtgtccttcccagtgcatcacatcagaaggcacacaaggccagtttgtcctattaagctttttttttttttttttttttgagactgagtctcactctgttgcccaggctggagtgcagtggtgtgatctcatctcactgcaacctccctgcctcctaggttcaagcaattcttctgcctcagcctcccaagtaggtgggattacaggtgcgcaccactatgcctggctaatttttttgtatttttagtagagatggggtttcgccatgttggccaggctggtctcaaactcctgatctcaggtgacctgcccacctcagcctcccaaagtgctgggattacaggtgtgagccaccacgcctggccattaagctttgattctttgattaaggtgatgttcaccagatcagtctagcttttgatactttttttttttttttttgagacagagttttgctgtgtcaccgagggtagagtgcagtgctgcaatctcagctcactgcaacttctgcctcccaggttcaagcgattctcctgcctcagcctcctgagtagctgggattacaggtgcatgccaccacacccagctaatttttgtatttttagtagagacgggggttgccccatgttggtcaggctggtctcaaactcctgaccttgagatccacctgcctccacctcccaaagtgctgggattacaagtgtgagccaccgtgcccggccacttttgataatttaaaaacctgactttccgagcagtcagagcagctgtagcacatctgacctgctttcaccttcgatcttctctgggaccaccaagaattgaaggatggcaggaagtgtgaagaaagtggtgaggctctggctgggtgcggtggctcacacctgtaatccccgcactttggaaagctgaggcgggtgcatcacttaaggtcaggagttcgagactagcctagccaacatggtgaaaccctgtttctactaaaaatacaaaaattagctgggcttggtggcatacaccagctactagggaggctgaggcactagggaccctgtggatcgcttgaaccaggaggcggaggttgcagtgcgctgagatcgcatcgctgcactccggcctgggcaacagagtgagactccgtctaaaacaacacaaaacaataataacaactaagagagtagcgtggcttggtggcggtgtcactcctgaggcctctgggaacaactctacagttatgctttgtcccgtgctgcggagcctagtatggggattatcccccgccatgcgttgtatctgaatccttgtacgcgcgcccgggggtgtgcatgaaaatgggcatgtgcgcggtgcttatgtatgtatgggtctttttgcccgcagcggcgcgtccgcaggcttgttctgtcctgtgctagccttcaagttttggcacgtccgtccgtttttcttctttggcgcgtccgttgggcactctgggtttggctaaatcgtggacgcttctaaagcgtttctgcagggagctggtcagagttgtcaagtgctcccccagttctgggccggcttggtacggtctacagcctccctttcctttccccacctcccccatggtggttgcacccattcggcccggaagtgctcgcttctctgcattacacgccggtcaggattcgcgacccgacatggagcgtccccgcagtccccaatgctcggccccggcctctgcctcagcttcggttaccctggcgcagctcctgcagctggtccagcagggccaggaactcccgggcctggagaaacgccacatcgcggcgatccacggcgaacccacagcgtcccggctgccgcggaggc

SEQ ID NO: 36205 - DNA, 2300 bp, Homo sapien
caaaaaattagccaggtggtggcgcacgcctgtggtcttagctactggagaggttaatttgggggtgaggcaggaggatcgcttgagccagggaggtggaggttgcagtgagccttgactgtaccactgcactccagtctgggtgacagagcaagaccctgtctcaaaaacaaaaaaagtagccgggcgcggtggctcacccttgtaatcccagcactttaggaggccaaggtgggcggattgagaggtcaagagatcgagaccatcctggccaacatggtgaaaccccatctctactaaaaatacaaaaatcagctgggcatggtagcgcacgcctgtagtcccagctactctggaggctgaggcaggagaatcgcttgaacccgggaggcagaagtctcagtgagccgagatcacaccactgcactacagcttggtgacggagagagattccatctccaaaaaaaaaaaaaaaagcaaatttggaaaagcttttatgaacaaagatggccattgtcccaaactggaaacccaaatgtctaacaataaaggaatggctgctgtaacagaatgtctgattaaaaacaaaaggacgccaggcacagtggctcatgcctgtaatgccagaactttgaagggtggatcacttgagctcaagagttcgagaccagactggcaatatgatgaaacccagtctctgcaaaaaacacaaaaatttagctgggtgtggtggcatgtgcctgtggtcccagctgcttgggaaggtgaggcaggaggatcgcttgggactgggaggcagatgttgcattgaggtgagatcatgccactgcactccagcctgagtgataaagccagactgtctccaaaaaatccaaaaggctgaggtgggaggattgcttgagcccaggatttcaagagtgtagtgagctgtgatcgcatcactgcactccagcctgggtgacagagtaaaagcctgtctcttaaaaaaaaaaaaaaagttaaaatggtataataaatgccaggcatgtggctcacaccagtactcccagcacttcgggaagccagagcaggaggatcgcttgagcccaggagtacgaaaccaacataggcaacaaagcaagactccatctctacaaaaaatcaaaataaaaataaattagctgggtgtggtagcgcatgcctgtggtcttagctactcaggaggctgacgaaggaggatcacttgagcccaggagttcaagactgcagtgagctatgattgtactgccgcattctagcctgggcaacaaagaaagaaccccatctctaaaaaaaaaaattaaataaataaaaggagggctgtaacaacatggcaaaaagtttactgggcatctttttttattttttttttttgagatggcgtctcgctctgtcgcccaggttggagtgcagtggcacaatcttggctcactgcaagctccacctcccgggttcacaccattctcctgcctcagcctcctgaatagctgggactacaggtgcccgtcaccacacccagctaatttttttgtatttttagtagagacggggtttcaccgtgttagccaggatggtcttgatctcctgaccttgtgatccgctcgtctcagcctcccaaagtgctgggattacaggcgtgagccactgcgcctggccctgggtatctttttgcctataataaagccagccatctaaaaacagttcaagccctggctctggtacctgtcagctgtgtggccctgggcgggtccctcactctctgtgagcctcagttgcctcacctgtgaaatgtaactcagtggttgagtggatcaagtgaagggctgtatgtcaagcccctgtcaagccacctggtgctccgtgtcctgtggatggtagctgccctgaagcgggactttgcagactgaagtgctgtctcttcagagggagtgcaggtgtccggctcctggtgtgggagaggcaccctgtgctccctggcccgtgagacaagattgggtttgggggccagggcaggagtaggggcccgtcaccaggggaaacggctcgtggtagagcagctgaggtgcagctgggcctgtggcctagaaggcagtcttgtgggtgcctcctcccccagccgcaactcaggtctgcagctgggtcctgcctccttccgagtgggccatggccggtacatggctgctacttctcctggcccttgggtgtccagccctacccacaggtgagccccctctttgccttcctctctgtccctcctcagtctgccgaagcccatcccctca

SEQ ID NO: 36206 - DNA, 2300 bp, Homo sapien
aaaatccaggaaagctcccttgaggaagagggcttcctgagacagaacttgggaactgcagagtgggactggtggctgggaaggcggctgtctcctcccccaacagcaagcggggaggccccctcttctcctcaccctggcccaacctctgtgagaggtcagggcagagagcccaggaacccaggaaggtgggtggtgggtctgatgtgaactctcgtacagaggtgaacagggccagggtttctggggaacaggatcgttttcaataacaagagtatgagatattaattccaaacttacagtttattaatcaattaagagtcattattcatttgacaaatattctttaagtatcaaccctgagccaggtactaaagaggtttggcttttttggtctggttgttacataaagaagattcttgtattgatcaagtatgaggcttccacagtagagcataacgtgtgcgtcccctgcttgcccagcgctggcaggaaatccagactttcccaagggttctctgctagtaatcactccaagagactctgggtgctgtcatgtaaatccacctgtcccttgggccccataggatagtctgctggatcaactttagtcttccttcccccagggaggggatggggaactatgccccagcaccccaacacatggtttcaaggacaccctcagctcccctgagcctctgtgctctctcagctactgttccataaaaactctcactgcctcctccactgctcatctctcaccagcctgaaaggagattctcccacttgttttggggattcttgggtgctggtggctggggtgggagggtcccatagcttctacggatgaatctgtccaccatccccacaaggcatgttccttctctgacacacagactgagggagggtgtgggcaggggcccaactatagcctcagactttctctggccactatcccttcctagctgtccggccagatgctgagcccaggcttctcaatctccactgtcaggctggcttaatcttatttcccaggagggcttctgagccgaggtgaatcaagggccatggccaagctctgagcctacccaagtattttattttattttattttatattttattttattattttattttttgagatagggtctcactctgtcccccagggtggagtgcagtggtgcgatctcaactctctgcaatctctgtctcccaggttccagcaattctcccacctcagcctctcaagtagctgggactacaggcacacgccaccatgcctggctcatttttgtattttttggtagagacagggtttcaccacattggccaggctggtcttgaacttctgacctcaagtgatccgcctgccttggcctcccgaagtgctggaattataagtgtgagccactgtgcccagcttgagccaacctaagtcttatcaagcctagaaaacatggaggaccttaggagggtgtcctgatcttgtacactgtggaattccacatgccacagcccctgcctatccaaagtgctttgttaccaacacagttttggacaagaaactaaagtcagaaagtggcaaggcctgggcctcagtgctctgaagtcttcataaaatagcataaatatccaacctctaggaaggaaacaagaaggtatcagggaacagggttttatggccaatttgcagacaacttcccagagaagcaactttggtctgtgtgcgtctgtaggacactgagttcaggggcagcctaaagaagaccaagagtgctcctctttatttttatttgtttatttttattttttgagacggagtctcgctctgtcgccaggctggagtgcagtggcgcgatctcggctcactgcaacctccacctccagggttcaagcaattctcccgcctcagcctcccaagtagctgggactacaggcacccaccaccacggctatttttttttgtatttttagtagagacagggtttcaccatattggccaggctggtctcgaattcctgaccttgtgatctgcccgccttggcctcccaaagtgctggaaatacaggcatgaaccatcgcgcccggcatttattatttttgagatggagtcttgccctgtcgcccaggctggagtgcaatggcgtgatctcggctcactgcaacctccatctcccaggttcaagcaattctcctgcctccacctcccgagtagctgggattacaggcgtgtgccaccacgcccggctaactttttgtatctttagtagagatggggtttcagcatcttggccaggc

SEQ ID NO: 36207 - DNA, 2300 bp, Homo sapien
cgatctcaactctctgcaatctctgtctcccaggttccagcaattctcccacctcagcctctcaagtagctgggactacaggcacacgccaccatgcctggctcatttttgtattttttggtagagacagggtttcaccacattggccaggctggtcttgaacttctgacctcaagtgatccgcctgccttggcctcccgaagtgctggaattataagtgtgagccactgtgcccagcttgagccaacctaagtcttatcaagcctagaaaacatggaggaccttaggagggtgtcctgatcttgtacactgtggaattccacatgccacagcccctgcctatccaaagtgctttgttaccaacacagttttggacaagaaactaaagtcagaaagtggcaaggcctgggcctcagtgctctgaagtcttcataaaatagcataaatatccaacctctaggaaggaaacaagaaggtatcagggaacagggttttatggccaatttgcagacaacttcccagagaagcaactttggtctgtgtgcgtctgtaggacactgagttcaggggcagcctaaagaagaccaagagtgctcctctttatttttatttgtttatttttattttttgagacggagtctcgctctgtcgccaggctggagtgcagtggcgcgatctcggctcactgcaacctccacctccagggttcaagcaattctcccgcctcagcctcccaagtagctgggactacaggcacccaccaccacggctatttttttttgtatttttagtagagacagggtttcaccatattggccaggctggtctcgaattcctgaccttgtgatctgcccgccttggcctcccaaagtgctggaaatacaggcatgaaccatcgcgcccggcatttattatttttgagatggagtcttgccctgtcgcccaggctggagtgcaatggcgtgatctcggctcactgcaacctccatctcccaggttcaagcaattctcctgcctccacctcccgagtagctgggattacaggcgtgtgccaccacgcccggctaactttttgtatctttagtagagatggggtttcagcatcttggccaggctggtcttgaactcctgacctcgtgatccacctacctcggccttccaaagtgctggaattataggcgtgagccaccaagcccggcctcctctttattttttattttgatttatttatttttgagatggggggggtgtctcgctatgttgaccaggctggtctcgaactcctggcctcaagcagttctcccttcttggcctcccaaagtgctgggattacagacattagccacggcgcctggcctttttcttcttcttcttctttgttgagacagggtctcaatctgttgcccaggctggtctccaactcctgggctcaggtgatccttccgcctcggcctcccaaagtgctgggattacaggcgtgagccattaagtgttccccttaatgacacagcagatgagagttttactgagtatctccttgtgccaggcaccctgttgttgctggggaagcggaagggagagacaatcgttaatcggctaaatttctgccttctgagagctcagaatcaagaaataaataatagggcagtaaaaggggctgggattacatacaaaaagaaaattaatgcctgaactttttacaatctgctcgataagctttaattctattaacctatttgagcttcccaacaacaggcaagctcccacagcagctaggaggatcactttgtcgtcatacaaatagaaacaggctcagagaggaagtcatttgttctagttctcactaggacaaatctactggctactaaaaaagtgtgaaggctggggacagtttgagtcgtcctgcttgcaccttaagcgcctacaagagtgcccggctataacaaccacaataccaataataaaatttaaaaacagatgttcagtaaggacttgcggcattaggaccccaggagggaagtgacgttcgaggaggcggagaaagccgcgaagacggccttccccacatcttccagcacctgcgcgcctgaatccgtcccacccaggcccagacgcaggcttcttctcgggtcttggtcctgcatcctctctctcccagagcctccgttagggggtgggaaaggactttgccataggtcgctgaggccaccatctgctctcttactggccaagggcgtaaaaagatagtcttcccattagctagagagcaaaccccagaaagcctattggctgcgccgtcc

SEQ ID NO: 36208 - DNA, 2300 bp, Homo sapien
ctagcccaccaagcctgcctcctggctcagtagcctgagtggaacaggcctcggcacagaggaaggagaacctgcccggaaaaaaagagtgggtggatgtcagtgagggtctggtgtctgtgccgtgaatctcctgtgagtctggttctgggtgggatccgcagaggaggtcttgaagaggtaatgtttggaagagctggaaagcaaggctgtggttgatgggtatgagagagaaaggatgttccaaacctcccctttccccactcctggggagggcgtgggaggaggggcaagtggtgctagaaaaatgatgtgcctgcacagagtacaggacagaagaggggagggagcccagatggtcctggatggagagctggggaggtgagacatccccagttcattgcagacttgaagatcaccagcttattacttggaatttgtatgtgtttcaaattctccaagccattgattaatttcaccaagcaggcctccaggggatgtatttatttttgtggtaaattggtattctagcagactgtgctgtcagtgttaaaactgctgatggcatttagccttcagactggtattccattcagaggcatcagaagacggtctctatcaacaagatttatcgagcgtccagcatatatcaagtcccaggctaaggaaatacgaaaaaatctaatacataatgcacattttggggacccttgtggtctatgtggagagacacatcaaatgactgagggtccttagggagagcatggatcctgcagaggcccagagtgaaatctagagcaattggcattagtgcagaatggcttcctgggggagaggcttataatgcgaggtgggcaggatgggcagagaagcccttagaaggcattaagtattttcctagggcctcaggcacttcacaccctcggtggtagcactgtagcactctatacagtggtagttatttgtctacacctttatctgctgcattagactgagtatctggaagggaggggaccttgttttcatctctgtatccccaggctgacacgtaggagttgcctaatacctatttgaggaagggtaagaggaaatgaggaaataaatgtgcggagacagtaggaacaagagctctctggagggcatggagcaaattaacttggtagaaatagagctgatgttggaacacatatgaaatcaagtaatctaacaaccataaaagatgttttggggacaattaaggaaatttgaatatggactactgggtgatgttggaattgttaattttccaagtatcataattgttctatggttatgtaggaggaggtcttttttctcaggagatacatgatgatatatttatctcaaaaggtcatgtttgccacttactttcaagatggtgtagcaaaagaaatgtatatattgttgagatattataattatatattgaagagagaatgtggcaaactattaacaactgttgaatacaagtggaaggtattcattgtgttctttcagcttttctgtatgtatgcaattttagaaagtaaaatgatagaccctggcgtggtggctcacgcctgtaatcccagcactttgtgaggccgaggtgggcggatcgcttgaggtcaggagttcaagaccagcctacccaacaagatgaaacctgtctctactaaaaatacagaattagccgtgcatggtggtgcatgcctgtaatcccagctacttgggaggctgaggcaggagaatcgcttgaacccaggagctgagatctcatcattgtactctagcctgggcaacaagagcgaaactccatctcaaaaaaaaaaaaggaatacgaagaacaattgcttaagggcaggatttacagtaagtacatgctcttacacaagaaacagtagataaaatagaaatcctagaggcattcctgaaactggggttaatcagaagtcaacatggcacattagcatccaagatggagttgctttagcctccacaggttctaactccttccctgccttgagtgctgattttggtcctccagtctaggaaaggatgcccacctggatctgttttgctgggagctggcctcccattagactcatgtgcactcagtgggctgtgctacctccctcccccagtgtgtaaatatgttgctgtggagctgaagtcagcctttgaggaaaccggcaagaccaaggaggtgattggcacgggctatggcatcctggaccagaaggcctctggagtcaaatacaccaagtcgtaagtgaatggggactcactggcctggcctgcgt

SEQ ID NO: 36209 - DNA, 2300 bp, Homo sapien
aggttggattcgggattgtccttcatccgctctggggtcaggcctgcatgtatcttagtgtgtctgctggtgtgagtgtgatttgaagatgaccacctgggatcttccttcattgcctcttcccattctttgattgccgtttgtgctcctcccctcttgagtggcctcatttttcaggcacatgcatgagggtctgggcctgttcatgagggtcctgcttcaatctcagacacaggcagaaatgctccacagttgctgcccccgtgggaacctaaagacactagaacggggagaactcagcaagatccacgatgtgcagaaaggtgggggtttaggcgaggtgtcagaggacacctcggtgggagtgactgcccagtcccatctctgggtccacacagcacctcccacaaccccgctgggatgcccttgtgatggcccatgtactcagtatgtgtacgagtgcttttctctctggagaatgagctgcttacaacaaggcccatagttcttactctctacatcttcagtgcctggcacagggtaagatagttgccacccacatttttctacctaagtttccttctagcaaaggataccattcataaactcctgggatacctaagggaatagtctcaagcagcagaaatttgtatgaattttgcactcagtaataaatctgtgtttgctttaataaaaagtgtttaagaattatttttcatagcaggaaaaaaatgagaaacaatctaactctaccaataggggattaaatacgttgatccagccgtttggtggactagtatgcggctggaaacgaagcatggggaggctctttaggaactgaattcaattgattttcaaggtttttgtgtgtttgtttgttttggagacagagtctcacactctgttgcccaagctggagcgcagtggtgcgatctcagttcattgcaacctccaccttccagattgaagctattctcccacctcagcctcctgagtagctgggattacaggcaccgaccaccacgcccgactaatttttgtgttttttagtagaaacggggtttcaccatgctggccagggggtctcgaactcctgacctcaggtgatcagcccaccttggcctctcaaagtgctgggattacaggcatgagccactgcacccagcccttcaaggtataagtaaaaagggcaagtgcaaaatagtgtgtatgctataccactgcttgtgtaaaaaggcggggggaggatatatttagatattggtatttgtatgagttatctctgggaaaatagaggaaatggatagtatgttttctctggggataagacctaggcagctagcagagatagtttttacagaataaagggtctacctgcctcagctatgcctttttcccactgaggaaagacacaacccaggaagaacggaacagcaggtctggatgatatgggagtgtttccagccatagtgaggggaaagagctaagacaaacctatttcctggaaaagaagcataaagccaaagggcctgagggcagccgcaggtctttttgaagcgatgaggtgtgcagaggcagatcagggggtatatgtgcaggggttgtgggaagcaggcctaaaagagggaagaggaaggtcaggtcaaggatgaggccaggtgcggtggctcacgcctgtaatctcagcactttgggaggctgaggtgagtggaaaacttgatgctaggagttcgagaccagcctgaccaacatgacaaaaccccaactctacaaaaattagccgggtatggtggcacgcctttgtagtcccagctgcttgggaggctgaagcaggaaaatcgcttgaacctgggaggcagaggttgcagtgagctgagacgctccaacctgggcgacagagtgagactccttctcaaaaaaaaaaggatgaggatccttagagggcgttgagcattggtcttatagctgggttcttagccaccactgggagacgagggtgggagggagagaagggagctccgcctgccatatctggtcgcttcttccagggcatgtcagagacctttgagacattacacaacctggtacacaaaggggtcaaggtggtgatggacatcccctatgagctgtggaacgagacttctgcagaggtggctgacctcaagaagcaggtacaggcccttcagcccttggaagggttgctgtgcccagtgaggggctggtggggattgggtctgctctgaggaagtccacccaggccggggtggctttggtcaggtcatttcacctctctggcctca

SEQ ID NO: 36210 - DNA, 2300 bp, Homo sapien
ctctcaacctcagttgatctgcctgcctcagcctcccaaagtgttgggattataggtgtgagccaccgtgcccggccaaagtagtttgattgattgattgatttttgttttgagacggagtcttgctctgtcgcccaggctggagtgcagtggcgcaatcttggctcactgcaacctctgccacccgggttcaagcgattctcctggcttagcctcccaagtagctgggattacaggcacgtgccaccatgcctggctaatttttgtatttttagtagagacagggttttagcatcttggccaggctgatcttgaactcctgaccacgtgatccacctgtcttggcttcctaaagtgctggacagtttgatttttaaaggctaaacctccccaggctccaaggagcactggggccaaacagtaccaaaggagagcatcacccgttaaccaggccccctgcttagaagagtagcacagaccgggcgctgtggctcacacctataatcccagcactttgggaggccgacgccagtggatcacgaggtcaggagtttgagaccagcctgaccaacatggtgaaaccctgcctcttctaaaaatacaaaaattagccgggcgtggtggtgagcgcctgtaataccagctactcaggaggctgaggcaggagaattgcttgaatctgggaggcggagattgcagtgagctgagattgcaccacggcactccagcctggcgacagagcgagactgtgtctcaaaacaaaaacaaaaacaaaaaaaaaccctgcagttgcttccatgtttaggcgctgcccaccaagggtcccaagttggaaaggaaggaggagagaggcagagagagagagagagagagagagagagagagaagcgcgagagcggccctgtaattgagcagaaaggaaagggagaaaaatgaatcccaaactttgggcttacctctttctgctggctggctcgccaaaatatgttaacggtagaggatgtccaggttcttggcatcttgaacaaacaattggacaaaatgcacaaacaaagcaagaaaggaatgaaggattttattgaaaatgaaagtacactccacagtgtgggagcgagcatgagcataggggctcaaaggccctgttacattttgtgagtttaaataccctctacttggggtacaccctatgtaaatgaagaggatgaagtaaagttacagttacaaagttattaatggcgggcatacgccctatggagaggatatttcccgttataactgaagtgtgaattggccttatgttccctgtctctagaccctattctcctgcttcctgtgaaagcagagggttttgtttgttttttgctttttgttttttgagacggagtcttgctctgttgcccaggctggagtgcagtggtgcactcggctcactgcaacttccgccttcccgggttcaagcgattctcctggctcagcctccggagtagctaggactacaggcgcgtgtcaccatgtcccagctaatctttctttatttttagtagagacgtgttagccaggtttcaccgtgttaccgtgttaccgtattccagccgggctccgcccctggattcggtggacagaccagctttacctccagagactccccctgtcttccctgcaccggctgactatacctacacacttcggtggcacaatctttgtttagatatgctgatgccttccttcgctgggaacggtccagtcctgcccgcctggcgctcagctctgcggatctcaggggatggagtggcaatctcattgctcccgcctctcctgacccctctcgccttctcctcgagacccgggttaagtgggcagagggctccgagggtcctctcccgccgtgggattgcacagagggctgggtccgcaggctggctaaaaggacctagcccaggattgcgaggcagcgccctccctgcagctggacagactcgggcgcccggcccaaagcccggcaggggcgtgtccgcgcgctcacctgctattggccaggtggggctgtcggctgccagcagtgcttatgctttaagtgcggagcgggtggctgcggagccaggcgcggcgcaggatggtggacagcgtgtaccggacccgctccctgggggtggcggccgaagggctcccggaccagtacgcggacggggaggcggcgcgcgtgtggcagctgtatatcggagacacccgcagccgcaccgccgagtacaaggcatggctgcttgggctgctgcgccagcacggctgccagcgggtgctcg

SEQ ID NO: 36211 - DNA, 2300 bp, Homo sapien
ctggtgttgtggcatgaaaggttggagtgagaaagagcagggttgtgggaggagtaagccctgggagagggtgggggggtgggcagcatgggagcctgatccttctgacataaataaacacaatgcatgcaggaactgaaaaagactatattgtttacccttccgtctgtggaacccacatccctgcaccccagctgtagtctgctctagaggctggccctggtgtggggctgctggtccccatcttccagacagagcctagcagtgcctgggcagaggcttgtgggagctgaggccacactcagtctgtcctcttgagcacgtggatgaagtagcagggaatgtaggtttggcctggcttgtaaggcttgaagtcgcccaggacgctgtgctggcacttacctccgaaggctgcttggagcagctccgtgaaggatgccagacagtgtgggtagtaggagagccggaacttactgtaacagaggccccagcaaccatgaggactggtgacctcagctcccccaactaccgcctcacccccactaagccaagtggtacctcaagccaggagagccatcctggccagcccccggcacctgcaccgtatagtccagggtcaccatgtgggccttgttgttcactatcagcactgatgttgtgacgtccttggtcaagtcactctgtaggtggtggggcagccggcattagcctctgtaacccaccttggggccactggaccctccctccaccccacccccacccccacccccacccccaccccagagggccccaccttatagtagatgttcttccctgggggtgcacagcctgtactgaggatgtggtcgtagttgcgatgatcaatgaccagtaggccccctgcccgcaccatgctcgcaatgtttttcagcgccagccggtgctcactctggtcccctgagctccaggcacgggcagaaagactccatctgctcagggcccccagcaccagtctccctcccatctctcccctccccaggggtgccagagccaaggcagagagtctgctttggcaggagagcaggtgccagatgtctgtggaagggggcctcaaggcgggggccatgcccaaggccacaccctctcttacctttgcagtctggcaagtgagcgaaactgtttccaaggcagatgacagcatcaaagccaccctctgctgactggggcacatctttgtccagagtcatccagttggcttcttcgatgactaggggtcaggaagagaaagaggaatcagggaggcacgatggtaccagtagcagccacctccaccaagtgcagtcctgcctgggtttcttcttaagacacacaagctccccgttcagttagggggaggagaaaagagggatcaagggagaaggaaccctggttgggaaggagggctctgtgcttatgggtttttctttgaggggagggacaagatgccacaaacacagttaaaaccagctcttcacacccggtgtctcattctggagcttaagacttgcttttcagagaaatgacagtaatttttctgtctccccgaggaaaacacaacactccacccccgcccccacttaaaggagccccaggcagaatgaacagtgttcctggtgactgggctgggggagcctggctagacctgcataccccacttgtcgaaggcgggctcgtgccgccggttccagcgctccttaagtgcatacttcagcatcttgtcactggcatccacactcgtcacactgaagccctcttccaccagcataatggagtccaccctgagtacggccagcgaggagaggcagagagaggcagttaggggagcctgggagggccaggaggagaccctgcactggacacttttgtctctacttctcagagtccgttcctctgcctcctctccccaggccctctccactgacctcacaaatctgtttcctgtcaccacaaggcaacttttttttaaaagcacctcttcagagccaggcactctacaaatatgcattaattctcatggcaatcctgagaggtaaatagtgtcattcccatttgagagacagacaagctgaggctccttgaagttaaaatacgtgtgcacaaaaggcagtagaacatggtggtttagagcacaggacaaagccgggcgcggtggctcatgcctgtaatcccagcactttgggaggccgaggtgggcagatcacaaggtcaggagatcgagaccatcctggctaacacggcgaaaccccgtctctactaaaaatacaaaatattagctgggcgtg

SEQ ID NO: 36212 - DNA, 2300 bp, Homo sapien
atcatagcctcaaattcctgggttcaagtgatccttctgcctcagcctccccatagctgggattatagacacaagccatggttcctggttagtacattcttgcatgctattttatttatttttttctattatttatttttttgagacggaatctcactctgtcacccaggctggagtgcagtggcgcagtctcggctcactgcaagctctgtctcccggcttcacgccattctcctgcctcagcctcccgagtagctgggactacaggcacacaccaccatacccagctaatttttgtatttttagtagagacggggtttcaccatgttggccaggctggtctcaaactcctggcctcaagcagtccacccacttggcctcccaaagtgctgggattacagccatgagccactgcgcccagccccttataatatgcaaatctaatagttttcatatatttgtctttcaaattttcaggaatgtataatgtacaaaatagaagactgcctcaagaagaaaggagagatggagaaagctgagcagtagctgaaagagaatgtaaggtctagaaaatggagattggcaccatccaattcatttattgtaagtgaaaataattgttaataattggaaatgcagtgggacatgatggcttatgcctgtagtcccagcactttgggaggctgaggcctgaggatctcttcagaccaggagtttgagaccagcctaggcaacacagagaaactctgtctctacaaaaaataaaaaattagtccaggcgcagtggctcatgcctgtaatcccagcactttgggaggcgtaagcaggtggctcacttgaagccaggagttcgagaccagcctgaccaacagggtgaaaccccgtctctactgaaaatacaacattagctgggtgtggtggcacacacctgtaatctcagctacttgggaggctggggcaggagattctttgaacctgggaagcggagattgcagtgagctgagatcgtgccattgcactctggcctgggcaacaagaccgaaactccgtctcaaaaaaaaaattggctgggtatggtggcgtgtgcctgtggtcccggctacagttactcgggaggctgaggtgggagatcacttgagcctgggacggtagaagctgcaatgaatggggatcgtgccactgtactccaacctgggtgacagagtaggaccctgttgccataaaaaaggaaatgtggcctaccactagctgagtgtcttgtacagaacagtggaggtgaagagaaggatggaatctaaataacagcacacgcaggaagtcgactgttggtgttatgctgacagaagccttgaactcctttccttctgcctgctctgctgcctgccccgctctaggatagaaagtgaatgggtttccgatctgcaaggatttggggggggggggtgaaagaaaagctgttttgtcttcaacttaagtttggtgggagtaaaacaaacagaacaatgaacagggcaagaagtcctggaacatgggttttgtgccagatgtgctggaacatgtgtggtggcaccaagcactccagggctgtatgaatcacatctagtaattcactcagcagccactatatacctataagcaagtgtgagacagttttctaatcctgctactccctcctgcaacctttcctgcaaccctcaaacctcagtgctcacagttccacaggggaagctgcaggagctccgcagaggagcggactccttccgaaacatttcacctagagctcccagtactgggcccagtcatcccgagcatgctgactgttcatttatcagtcaataaactgttacgttcatgccacggggaaaaatagttaagagaacattacttccgtagaaggcaaagataaatcccttaagcacaagttcaaatggcgcatgggtaaacgctacgcaaccgcagcgatgaaggttactgcctatcgaggcacgacgcagatcaatccgaggcgcagctaaccccctcagagcaagttcgcggcacccgacccccctccccttttcctctggcctcccctgacggaagcggaagcggccctcgcgcacactagtcgtctggctctctggctccggaagctgcgctccttcaccctcctcgttggtgtcctgtcaccatggcgctggctgtcttgcgggtcctggagccctttccgaccgagacacccccgttggcagtgctgctgccacccgggggcccgtggccggcggcggagctgggcctggtgctggccctgaggcctgcag

SEQ ID NO: 36213 - DNA, 2300 bp, Homo sapien
ttttaagactaaatattttattttatatagaattttaaaaatttattttttgtacatgaataagttctttagtggtgatttatgagattttgatgcagccatcacccaagcagtgtatactgtacccaatgtgtagtatttttttttttttttgagacggagtcttgctctgtcgcccaggctggagtgcagtggcatgatctaggctcactgcaacctctgcctcccgggttcacgccattctcctgcctcagcctcccgggtagctgggactacaggcgcctgccaccacgcccggctatttttttgtattattttagtagagacggggtttcatcgtgttatccaggatggtctcgatctcctgacctcgtgatccgcccgcctcggcctcctaaagtgctgggattacgggcgtgagccaccgcgcccggcctccattgtatcattctcatgcctttgcatcacaggtttcttcttttttttttgtagacggagtcttgctctgtcgcccaggctggagcgcagtggcatgatctcggctcactgcaacctccacctaccggggtcaagtaattctcctgcctcagcctcctaccgggttcaagtgattctcctgcttcagtctcccgagtagctgggactacaggcgcgcgccaccacgccccgctaatttttgtatttttcatagaggcatggtttcaccatgttggccgggatggcctcgatctcttgactcgtgatccgcccacctcggcctcccaaagtgctgggattacaggcgtgagccaccgcaccctgtctaatttttgtatttttagtagaaatggggtttcaccactatggtcaggctggtctcaaactcctgacctcgtgatctgcccactttggtctcccaaagtgttgggactacaggcgtgagccaccgagcctggccacaggtttattctttttgtcgtcattgttgctgttttgagacagagtcttgctctgtcgcccaggctggagtgcagtggtgtgatctcggctcactgcaacctccgtctcccgggttcaagtgattctcctgcctcagcctcccgagtagctgggattacaggcgtgcaccaccacacccagctaatttttgtatttttaatagagacggggtttcgccatgttggccaggctggtctcgaacctctgacctcaggtgatcctcctgcctcagcctcccaaagtgttgggattacaggcgtgagacaccgtgcctgcctggtttacattctctcttaatcctttgtttatacacatctgtgattcaccagactgcgaactctttgtgggcataaactgagtcttacccattagaacacggacttgagcagggtggcaagtaagggatggatttcctgagacagtcaacaatgaagttgcttttccactgcgttcccaactgctcaaatctagctggttccccaatcccagtacacttgcagtagcaacggggaccctcttcctaaagttgcaccaagccagggattctccactcatttcgcccaggtcctagccctgccaggcttcccctttgctcctctgcaacccctgtctagggaggcgggtgtcttggaaggtccttgggagctccctccatcaattttgcatctgcaattagggctactttaccccagtgaagaaaggtgccctccgtattagggcttccttcctccaattccgactggacagggtagcagagcgggcaaagtgtgagagcctttagaaggaaagagcagggctccaagcgccgcgaagaatggccgaggccgacgcacagcagacgctggagtgcagccctcctagccaagcttgggtttccccttatccccgcctccttctctaagctcgacccactttagggcgggaccacccacttcagccaattctggaagccgaaccctggcggtttgtactatttctttccaataagaaaaaaaggaagcagcttggctccaatgaccaatccgaggaggcggcgcctggttgtcaggcagttttgtaggagttcgggccaattggaggcgcaggcaccgctcgacccgggcgcagcgcgcaggcggtggcgaagagacgccgagcgggccgagtgcggccgagcaaagccggagccggagcggggccgcaggagacgggccgggtccggacgggccgagatgccctataaactgaaaaaggagaaggtgagcgtggccctttttcccccaccgccgccttggagcctgcgcggagctctgggaggggccggagccaggcccgggacagcc

SEQ ID NO: 36214 - DNA, 2300 bp, Homo sapien
tttgtgctatgctgggcaggccttctcttgtcccttataggtaccttggaggggccaggggctgaggaaggccggacccaggttccaggggcgcaggcagtgcggcttttggctgtgtacatagggtgctttattctccacagagtgatacatgctaaggtgggttgggcttggaccgatgtccccatatgtacagaactgaataaagtgggtctctgagaagtctgatgtgccttgatgtggaaagggagacggggaagatggaaatggacattacaaccagggatgtgttcagtcctgtgctggttctggcctggaatgtaggaatataaggcagctctcactgtggtcacttccaggcaggggatgcctgccgggcttggagggctttctgtaccacatcttcccactgggcatccgatatctcccgagcccaggcaggaacccctggcgcaggcaggcttactccagccattgtccttttcaccagctctacatgttctgaaatcagagccagaggccattcaggcatagaaataatgggaccagctcccctccccaatccccgaatcaacccagagcccttgggctgctagggtcaccaaatccaccttgttactttaaggcaagcctgcccatccccaaagctagcaaaagagcatttcacttggactctgaagtctacaaaatcttagtttacaaactatctttttaggatagggtcttcctctgaaacttccttctactgactcatgccagttcatttccttagtaattattccagaatgaaagaatgatcttttacctgggtccatgggaatagagctgtggttgttcaacgctgtagctccctcctcatcttcatcttcactctctaatggtgggtctggcaaatgaagccccagggcctgcagagccacagaagaccgtttgggtctaggctttcagggagcccagcttcacctgttcaggaaccatccctcctccaccctacctggattcgatcctggatgtcagcaactacatctccatcccccactggtgccagttccacctcctcttgttcaggatcttggttcaggggctggtaggagtagccagctgggcccgaccccgtttcctcctgctcttcctcaggctcctcactgctccaatccccagtgccttctgaagggccctgatgtcccagttcctcagtctgattggggaagatacgctcagggcccatggtgtctcctcctagaactactgttgccatccgggcaggggctgcaagaacagggaggcggtaggacagggatcggatgaaaccaggcccatcttcatcctctcatcatctccttgtagtctcctgcgtgcaaaaaaccagctcctccccgaggctcctgcatcctccacccctccgccccaattccagcctctcgttcctccccctcctaagtcggggttcttatcttgaaccaggccccaccaacttgctccgccacttcctagttaaacgcccaaccggaggccctgccacctcctaaaagacaccccttccagaaccccggctccccgcgccacgcctcccccgcgacttgggaactctgggtcatcagactcccctaaacaggtcggcgtacccgcccccttctcccctctcctagaggaccccctctgtaccgcctgacagatgcctttcaggccccatgggctcccctcaaatggccccagctgcagcgtcccccacccgcccccatccgaatcccggcgccggtgttcccgcgcgcctcacccgctcagagcccgcggcctccacttccggcggggcaggacgtgcagaggtgcctagtcctccagccccgccccatatccatgattgacgctggcgaggacgaggagtccgccccttgccccgcctccgtcattcccagcccaaaaaacaaaggactgcattacccagtggcctcctcggtctcgacacatatttgcacatgcgcagaatctctcctacgcccctgcccactcctcagccctctcgtccctcaggaaacgtatggactacaagtcccgaaatgcctccggcacttagctacgactgcacgtgcgcgcacagctgcccgccggaagaaccgagcttggctgtgtttatctcgttggggactaaggcgtcggttggcgcgcaacgggttctaggctgcaggcagctcgaggacccgcggccccgccccggctcggcctggcaggtagcctgggatgggtagaagggcaagggagaattagggggcttaggacgtgctgtctggagctggagtggc

SEQ ID NO: 36215 - DNA, 2300 bp, Homo sapien
ctggcgacagagcgagactctgtctcaaaacaaaaaaaaaggggaagggaggcaaaaaatgcccttgggcaggacaagagaaagatccagcatgagaagtcatggtctttttttttttttttttttttagatgaagtctcgctcttgcccccaggctggagcgcaatggtgcaatctcagctcactgcaaactctgcctccctcccgggttcaagcgattctcctgcctcagcctcccaagtagctgggattacaggcgcctgccaccatgcccagctaatttttgtatttttagtagagatggggtctcactatgttggccaggctggtctcaaactcctgacctcaggtgatccaccgtcctcggtctcctgaagtgctgggattacaggcgtgagccaccatgcccagctggtcatggtctcttaaacacaacctgtcaacctagtggcacgtacacctgggtacatctgaggttttttcaggcaaatccttgcaactgacaatgcttttgctggcaagcatctcctgagtttgggtgtatcatcatctgctccctgtttaagaagccctggcagaggaaagggccaggcaaaacctcaggcactaaaacagctcaaataagggaggccccttgcaggaaagagacatggctttcagctggcttgctagtcccacccacccaacctcccccaactccacaccctaagctttaaatagccatgggacccatcctgaaatagccccagcaggaagctactctcacttcattactcccgctctccaaaatatcttgggtctgggcttgtggagactgttaggaggtcgatgggcttaagaatggaagtcttccatcctcccttatattctctattcttcccttcagatatgtcaaggtaaagtaaaatatgcacaggagaggagataagcaattccagccaaaggtggagaaaaaaaattttagtttctctgccatataaacaactcaaattcaaggagaacaagcccccaggcgctcaggggctcctcttatccctgggtctccccagtcctccatcaccaccaagcattttcaaacttcttctattcccttaatgtatctacccgcctggtctcttgcattttttattccccatttctcgcccttcttgatctcgtgagagctttgcagttttctcatttttccttctcctaccattccaagctccacccaacagccctccattttcccacctccactaaggaaagaaaaattagcatgcactgaccacgatacccctctctgcatatgactctatccctgtcttcttccagacattccggcctcccctagcccaccacgccagacacccctccccttccattatgctcagcttccctgttttcatggcccagtcttccttcccatttccttcattgcttcctccagacaccaggtctctcctacccatctcctcgccatcctcccctagccctgctttccccattaacactctcctttcccatcatccccctagctccctccccacccccacctcatcactctcaggcccctcccccgccactccagctccagacagcacgtcctaagccccctaattctcccttgcccttctacccatcccaggctacctgccaggccgagccggggcggggccgcgggtcctcgagctgcctgcagcctagaacccgttgcgcgccaaccgacgccttagtccccaacgagataaacacagccaagctcggttcttccggcgggcagctgtgcgcgcacgtgcagtcgtagctaagtgccggaggcatttcgggacttgtagtccatacgtttcctgagggacgagagggctgaggagtgggcaggggcgtaggagagattctgcgcatgtgcaaatatgtgtcgagaccgaggaggccactgggtaatgcagtcctttgttttttgggctgggaatgacggaggcggggcaaggggcggactcctcgtcctcgccagcgtcaatcatggatatggggcggggctggaggactaggcacctctgcacgtcctgccccgccggaagtggaggccgcgggctctgagcgggtgaggcgcgcgggaacaccggcgccgggattcggatgggggcgggtgggggacgctgcagctggggccatttgaggggagcccatggggcctgaaaggcatctgtcaggcggtacagagggggtcctctaggagaggggagaagggggcgggtacgccgacctgtttaggggagtctgatgacccagagttcccaagtcgcgggggaggcgtggcg

SEQ ID NO: 36216 - DNA, 2300 bp, Homo sapien
attaagggaatagaagaagtttgaaaatgcttggtggtgatggaggactggggagacccagggataagaggagcccctgagcgcctgggggcttgttctccttgaatttgagttgtttatatggcagagaaactaaaattttttttctccacctttggctggaattgcttatctcctctcctgtgcatattttactttaccttgacatatctgaagggaagaatagagaatataagggaggatggaagacttccattcttaagcccatcgacctcctaacagtctccacaagcccagacccaagatattttggagagcgggagtaatgaagtgagagtagcttcctgctggggctatttcaggatgggtcccatggctatttaaagcttagggtgtggagttgggggaggttgggtgggtgggactagcaagccagctgaaagccatgtctctttcctgcaaggggcctcccttatttgagctgttttagtgcctgaggttttgcctggccctttcctctgccagggcttcttaaacagggagcagatgatgatacacccaaactcaggagatgcttgccagcaaaagcattgtcagttgcaaggatttgcctgaaaaaacctcagatgtacccaggtgtacgtgccactaggttgacaggttgtgtttaagagaccatgaccagctgggcatggtggctcacgcctgtaatcccagcacttcaggagaccgaggacggtggatcacctgaggtcaggagtttgagaccagcctggccaacatagtgagaccccatctctactaaaaatacaaaaattagctgggcatggtggcaggcgcctgtaatcccagctacttgggaggctgaggcaggagaatcgcttgaacccgggagggaggcagagtttgcagtgagctgagattgcaccattgcgctccagcctgggggcaagagcgagacttcatctaaaaaaaaaaaaaaaaaaaaagaccatgacttctcatgctggatctttctcttgtcctgcccaagggcattttttgcctcccttcccctttttttttgttttgagacagagtctcgctctgtcgccagactggagtgcagtggtgtgatctcggctcactccaacctccgccacccgagtgcaagcaattctcctgcctcagcctcctgagtagctgggactacaggtgcgcgccaccgtgcccagctaatttttgtatttttagtagagacgggtttcaccatgttggccaggatggtctccgtctcttgatctcgtgatccacctgcctcggcctctcagggtgctgggattacaggtgtgagccactgtgcccagccccttcccctttgcattgcacactcccacctctatccgcctttcaggaacccaagttgtggaagagcttgttctctcttttctactggaaatggcttgttctctaccacagtagcagggatggggaagtggcaggaggagaaaacccctccctctatcaccatcccccaagcctaagcatacacatacctttctggcttaagtcctggcagcataccaggcacagctgtcaaaggaactccttgtgcctgtggggggccctgggtgaccccaatgacaacaactcagcttgacaggagctccctgtgaggggctaaccaaccgcggtaacatggaggtccctgtcctggatcagtcccgccctatcttgggtagggggattgttccactctaaaagcctgaaagcttttctgctttgaggcactcatgccagctttcaatggactgtttgaggctggctgggctattaatagctgtgagtattttgagatccctttccccacctcaaagaacacagattcttagagaggtggcagtaagcagagcagagacaagagaatataccgtttgggaagggggcttcaagtttgtgccaagccagggacagagtggagcctccacgagtaggttgtgaccatgatatgcagattctgagctggcaatcaggtgggggtggccccacccttcactgttggagaacactgggcccaggctgctccctgacctcggcagctcccttggggcagggccagccacctgagctgagactagtgcccctgtggaggggtagtgtgggagggcccccagggtgacacttggaggcaaaggctggttctgggcagagtcacagtgagctgggcagaagcctcgcctgaggatcccgtggccccaatttgtgtgcagatagcagaggcagcaggccgtgccgggggggcatgttgctgtaaccagtgg

SEQ ID NO: 36217 - DNA, 2300 bp, Homo sapien
cagcagaataaattatatgaaaaaaaaatacagctcggcagcatcactttctgagacctaagcttatacagttatttttgtgaccatgctgagaacaactgattaaatcttagaacctagctgcaaagtaaagacaagtttaggagcctctggatcacattggttccagaagatctggctgcttccctttgaatttcgttcttaggttccaattaaccaccagatgttactttatgtataatttttcaggttcaaattaaccaccagatgttactttgtatataatttttcctgtctgggtcattctgagatacttcgtctctttgtatcagttcagtttaactcttgctggctgggcatggtggctcatacctgtaatcccatcacttcgggaggttgaggtgggcaaatcagttgaggtcaggagttcgagaccatcctggccacatggtgaagccctgtctatactaaaaatacaaaaattagctgggcatagtggcagccaccagtagtcccagctacttgggaggttgaggcaagagaattgcttgaacccgggaggcgggggtttcagtgagtcaagattgtgccactgcaccactgtactccagcctaggtgacagaacaagactcaaaaaaaaaattaatatggttgggtgggtggggaaggcctcaggaaggataggagtgctgagtcagagccttaaaaggatgggagttaagagcaaaaatgggtattcctggtggggtgaggcattcctggtgagggtaaggtggaggggctgcctggttggctctaagcaaagcaggaaaggcaggttgggatgttgactgacatgtatacacagatctcaggtgcctggacactgcaatatacatacatacataaacataaaccggaaatccatatgagcttggaggtagaggagtgggtggtgttggatttggtggtgggtgggttctgattgttcaacctagtaggtctcttaagtaagaggtggctgtgggtggttgacctttaggaagttggagagactggtgtgtttttagcttggttcaaacatcccttagcttgggctgagggccccctcttctttctgtctcttattgttggccttccaggtgggagctgaatgccatgaccaccaacagcaatatcagtcgccccatcgtctcctcccatgggtaggaggaagtttctgccacctcccctcctgagcctgctgtcatcttcactgcccctgcccatctgtcacccacctgctcctttgacccctggacttggtatacctccatgtggagttgttgggcgagaggtgttctctgtgctgtgaattcagtggggagctgtagcggggtgggggctaggttcctccccccttgggccgagggccccttccccttggtgctctgtccccatccacctcctttcagctgctcctgggcctcagctctgcccagggccagccaggttctgctgggaagggaagggaatggggagaagggagaagcaagcagtgtctgagcctcaggagcttccccctccccctttgcctatcccctcccctctgcttgagccttgagccttgactgggagctgaaaggagttgcagctgttggcatgagacctccttctccccgtcttggggaggtggggaccagcagataaatcccacccttccttgagctgtcgctgtactctgaagttcagccagctcagattttataaaaattaattaaaatctccaaacgtgttgtgtgtttttgtggaatatggtggagaaggctggagtttgcagtgggggcagggtgccgaggacaagcaccctgaggttctggcttctcagccaagggtattaggaaaccaaatgccaccaaggcctggtccaagcttctcgggcgtggaacccagcaccctgcgactcgggcagaaggttgcgacaatgtctccagagcgggttatcctttgggcccggctccctggccctcgaccgcgcagttttctgcccattcgtcaccacgttgagaccgggaacgccggaagaggcggggcaggggctgccgtgagcggaagcggcgccattcgtcttccgagcgctactgccagctgatgccgggagctaactaccgcgccggggccggggccggggccggggcccgacgtccccgcggggcccgggaccgcgaggaggacggcgggggcctggagcccgcggccgtggcccgcgacctattgaggggtgagggcatggggcagggcgggctggggaggggaaggagattcccaggcggggccctga

SEQ ID NO: 36218 - DNA, 2300 bp, Homo sapien
gcacacacgctgggccaggcacataggtgttcatagttggttgaattgagtagtactgagatcatataaaaagtcatcagttgggctgggcacggtggctcacgcctataatcccagcactatgggaggccagtgtgggggggtcacgaggtcaggagttcgagaccagcctgggggccaacatggtgaaaccctgtctctactaaagatataaaaaaattagccgggcctggtggcgtgcacctgtaatccagctactcaggaggctgaggcaggaggatcacttgagcccgggaggtggaggttgcagaaagcctagattgcactgttgtactccagcctgggcaacagcgtgagactccatctcacaggaaaaacaaacaaacaaaaaaaagtcaccagttgggccgggcgcagtgcctcacacctgtaatcccagcactttgggaggccaaggagggcagatcacgaggtcaggagttcaagaccagcctggcaaacatggtgaaaccccgtctctactaaaaatacaaaaattagctgggtgtggtgctgtgcatctgtaatcccagctactcagaaggctgaggcaggagaatcgcttgaatctgggaggcggaggttgcagtgagctgaaatcgtgccacagcacttcagcctgggtgacagagtgagactccatctcaaaaaaaaaaagtcacccgttggccaggcgcagtggctcacgcctgtaatcccagcactttgggaggctgaggagagcggatcacctgaggtcaggagttcgagaccagcctggccaacatggcgtaaccctgtttctactaaaaatacaaaaaaattagccatatgtggtggtgcgcgcctgtaatcccagctactccggaggctgaggcaggagaatcacttgaatctagaagacggaggttgcagtgagccgagatcgcgtcactgcactccagcctgggtaacagagcaggactccgtctcagaaaaaagatagaggggcaccagtgagctttaaagaactcatgtatccagcataatggcttggagttactgacctggtttgggaaagaataggggcttccttctttgttcaccaactttcattctccctgtcatttagctgagcagcgccagttggcactagctgagaagttcaaggagctgaaacgcagcaagaaattggagaacttcttgagtcgaaagaggcgacgaaatgcaggcaaggacaggagacatctccctttgagcaaagagtaataaggaactatcctctgctctgccactgccccagggagacatggatctgtgaggacagatttggccacggctggtttccgttcaagggcaaggatcacagctgcccttgaatctcattgcctcagagaagactagagggctcttggactatccctagggctacacaagaatagttcagccttctgccatgccacacagcctcagcttgaatctggttcattgcgtcctcgtgttcttctctcatccttgccttaaaccagggattctgataccgaagaagaggggccaatgaaaaccatggagtctgttcgtgactcccagggctgggacattatgtaggagccacttcataaacattctctttactcatctttttattctgttttttgtggccttctttttgtgtttcccccccgaaacagagtctcgctctgtcacccaggctagagtacagtggtgcaatctcgcctcactgcaacctccacctcccaggttcaagtgattcttgtgcctcagcctcccgagtagctgacatccgccaccaagcccagctaatttctttcgtatttttagtagagatagagttttgccatgttggctagtttgatcttaaactcttggcctcaagtgatctgcctgcctcagactcccaaagtgctgggattacaggcgttgagccaccgttccggccttaaggcctctgcttttatgtgggatttgtgggtagcctagaactactttttagtgggccacatattgggataggcaataaagcctaaggcatctacaactgggaagtcagatcagaaacccctcccacttaaatctgggcccctcaaggatgacaagatcatttagtgggtgaaccaatcccacaactcccctacttggctttggttttggatgcaagggatgttaagaggtagggatataaagcttccatggtaatatacaagcacagctggccttcagtactgtttgggacaagagtttataacccatgtggtctggaaaatcctcaggctgataactta

SEQ ID NO: 36219 - DNA, 2300 bp, Homo sapien
tctccacagagaccgccttcagagaacagatgggagacattcagggcctccccaaggagtggagagaagaggatggagggaagaagcagagggagtcaaggttttgggaagagaggcaagggacaaagtgggagacaggagagaggtgcagcggggctgggccaccttcaggtcgttgagatacagcagtagccacatctgcacggtggacacatgcagggtctggttcccaaactgcagctcagcccagcccagccacgtccactgcagtcgcctctgtgagcctcgctcaagggcagggtggctctgacctggaccaggaagggggagggagacaaagagcaggtgaaaggagggagttggtgttggagggagggtgcacgctggtcacgctctgtttatctctgcaaggcgtgtgaccccagcatttatggacactggggcttctggtctgagcttccagatctcagccttctctgggcctgcctctatggcaagcctcaggatctgggagctatcctatgcctagcctggtgccaagcaggttctcatcagtgccttcgaggattgccccatgtgtttttagggagacaaaaccatgaagggaggaaggactggggctcttatcaagctggaatattatgacaggaaacaatgtctcccctattaggaggcgccctgaccacaggtctgagcctcttccccctcctgtgttgctgccagctcagggatcagcccccgatggggagtttaggatgacaggtgactgaccagaaaagagccagacacctactcatatctggtggcctcaggtgcctcctgcctccatcctccccgtcacccacaaagagattcccaggtcttattttagaacagaaaaagcaatggtctggggatcaggtatctgacagcacctgccacccccagccaccaagctcctgccctttgttctcaaaaccactgtttttcccatggcctagggaattcttatccctaaagactatctctccctgaatctataaaaacaaaaattaaaaatgtaaattaaaagaccaactcttttttttttttttttttttttttgagatggagtctcgctgtcgcccaggctagagtgcagtggcacgatctcggctcactgcaacatctgcctgtgggttgaagtgattctcctgcctcagcctcccgagtagctgggactacaggcacacaccaccacacccggctaatttctgtatttttagcagagacgaggtttcaccatgttggccaaggctggtcttgaactcctgacctcaagtgatctgcctgcctcggcctcccaaagtgctgggattacaggcgtgagcactgtgcccagccaaagactatctctttttacatcaagcctcccaacatcagggtctgcccccaaccccaggtcctttcctagcagcccaccctctccccagtccccagtccctctgcctggctgctcactcttgttgtagaagttggagtatctgttcaaagtgcccctcaggtaggagggcaggcaggttctggggttcagtgtgtggcagattgaggcaacaggccaggagtgtcgggacaggacaagcacagacacttctggcattgccccttcatagtagaggtcctcattctcctcctcttcctcctctccctccgccacatccaccactgctgctgccccagcttcctcttccttctcgctcttgtgctccttgccactggccccaaggcccacctgaaggagcacagggttcccagatgccatggcctcctccagtctgctccacgcccctcttccccctaccctcttatttgcttatcccttccaaggcactcacctgtattttcttctctgtatcctccagcttcaggagttcctgatccagctgctggagctggtagacgtggaactggcgctgcagctccttagaggtgctcaggctctgcaacatctgctgggggaggcggttggggaagcagggaccgatctgctccagcacggccccctccagccagctcgagaccacgcccaggagacggtccgccatgtagtgcctgcagtgcatgcagcccgggccaagcctcagtgtgggcaccagtgtggcccagcctcccactccaaggctccagcctgcctctatcccagacttccaggcccatgagctggctctgccaccatcatcctgcctcccgccagctcccgctccttaggtccacactcactggtaataatgctcaaaagtggtggctatctccaagccggagaaaatcaggacagcttgcag

SEQ ID NO: 36220 - DNA, 2300 bp, Homo sapien
gtcttttagttgctgctcgggaaggggatgcgcatcctcttggggctctgcctgtggggaccctcatcaacaacgtggaaagtgagccaggccggggtgcccaatatatccgagctgcaggtatggggaaaggagttgcctgggtcctatagtttggaaaggcaaggagagtctgaacccatggttccacatctggtactggcagagaaaattaaggaaaaaacaaacatgaggatgaagatatgcatgtgtttttacctaaaacatagcatgcgtccttctttgtgtatctgctcctaaagagcaaagcaagggcagcatgtggggtatgtcccctgtgtaagtccctctgcacccccctgttttgtggagggtggcaaatcagcttctttccccagggacgtgtggtgtgctactgcggaaggtgaatggcacagccattatccagctgccctctaagaggcagatgcaggtgtgtatgggtatggatgggaggggtcagcaaaggaggaatttttggaatgtaactttcctgtctgggatagctcccaggtgttttatgatgcaaggaactgccttgagctgaggctgtccttttctgccacatgactcaggtgtgctttgtcggattggcaccataattaattttttttttttcgagacagagtcttgctctgtcgcccaggctggagtgcaatggcacgatctgggctcactgtgacctccacctcccaggttctagcaattctgcctcagcctcccgagtagctgggattgcaggcacgcaccaccacagccagctaatttttgtgttttagtagagatggggtttcaccatgttggccaggctggtctcaaactccttacctcataatccgcccaccttggcctcccaaagtgctgagattacaggagtgagccaccacacccggccctacttaattttttttgagacagggtttcactctattgcttgagtgcagtggcacaatcagctcactgcagcctcaaactcctgggttcaagcaattctgcctcagccccccaagtagctgggactacaggcgcacaccactccaccaggctaattttcgtattttttgtagagacagggtatcaccacgttggccaggctggtcttgaactcctgagctcaagcaatctgcctgcctaggctcccaaagtgctggaattacaggtgtcagccactgcacctgaccctggctaatgttttttatttttgtagagatgggatctcattatgttgcccaggctggtcttgaacttctgagctcaagtgatcctccagccttggcctcccaaagtgctgggattactggcgtgagctctttgttttcaactacttagttcctactgtaggaccttcacttagtgtcagccatcttatgcttttccttttccctcgcccttctctccttgagtctaagaagccccccaagggtgtgctctcaacattgtcaagctctttcccccccattgtacagaatctccatctgttttctctgtcaggtgctggaaacgtgcgtagcaacagtaggccgagtatccaacgttgatcataacaaacgggtcattggcaaggcaggtcgcaaccgctggctgggcaagaggcctaacagtgggcggtggcaccgcaaggggggctgggctggccgaaagattcggccactaccccccatgaagagttacgtgaagctgccttctgcttctgcccaaagctgatatccctgtactctaataaaatgccccccccccccgttttaatctgttactgtggttttgttttgggtgttttttgttttttttgttgttgttttttttttgcgggggaggggatggtacagactaaacgtggggaaaagaagtaaaaagtgtggaagagaaagtacaggacactgggtctgtccccaccccaattcccttacaagtaatggagccggggatggaaataaatgacgtccaaggtcttttccagttctgactttgggaaacggggagggcacttccgcaggagggaggactaaaggaagaggaaagggcggcgcaaagaaggaggtgctgcgtcgccaaggtggcatcctcggctccgccccggcgctctcccagggcccctagctttccgctgggtcgggcggaaatgagccgtggcttttggctggcggagccgctggcagggaccgggccccaccctgccccagtggctgccgactcacgcgggtgcagctctgttccgcggaggcacgccccctcccgtctctccgtctcgaccccctcgcggg

SEQ ID NO: 36221 - DNA, 2300 bp, Homo sapien
gggtttcaccatgttggccaggctggtcttgaattcctggcctcaagtgatctgcctgccttggcctctcaaagtgttgggattacaggcgtgagccactgcgcctgaccaatttttaaagttttagtagagatgaggttttgccatgttggccagcctggtcttaaacttgtgacgtcaggtgatctgcccgcctcggcctcccaaaatgctgggattacagtcgtgagccaccttacccagcctgttataaatttttgaagggtatgaaggaaaatgtcatggcacttcctgtgtatggcccattttcttcaattacccaaattgtctttagaagcatagaccaattacctattgctttgtattctactctctgactcctgtacacatactacatgcaaaaggagccaaataagtgctttttaattacattcctctgccttacaaggtacaagtgtgtcaatatacaagtctagggtcttaacatgtttttccttttgactgcttaaatccccctgtccttgttcccacctgtgtggtctcggcccccagacttcctcatcttcactggtgtaatggtgtacttggtacgactcttccaggacacaaagttggcattaagggccacagaagtaagaactgggcggcaggggagcaacatcaaggcagagggctgttggaggaggccattgttcatcatctagggataaaaagacatctctttcatttgaaagctaattgaaggcaaagcatcagagaaccaaggcagagggcacagatcaattttagcttgtagcccacttcctcctggatgtatcccaaaccagctatccaaaaactccacccttcacagcttgcacagtaatgttctctccttggtgatctccttccaaatttggctcagaactctccatctccaggaatctgtttttacctaaacaattcccttctccagagctggtagcttccacacatccatgtaccaccatcagtgccaattccttttgccctctgcattgtttctgggaattcttcacatatgaatggaggggaggggtcatttcactcttgttccttgatgtattcccagcatttcggagtaggttgatttggatttgaattttaaacatgcatctcccaaactgtaccataagcagcctgaaagctccagaggagcaggacttacttctcttttgtgtgactcaccagtcacccactaggacctcaggataccttcccctgaggccactgttcttggtatcttgccctgcattctctaatatcagcagtaactcatccttgcaggcatcatatcataatggttaagagcacaggctctgaaagacagactgtttagctctgatagttggtgtgtgaccttggactccttattttcctcatctataaaatgggaatagtaactgccttatagagtatttgaaaggagttcatttatttgaaacgtctattacctatacctggcttatcataggcactcgaaacgttattactgaaacctgcacaaccggtgatctgcaaagcactttcaccttaagtatctcgtctgaagaatttcgccctatgagaaagcaacacttgtagaggaaaaagctgaggctaagtgtgccttatccaaggtcacggacctgcatgactcctgaccagactcgcaactcccgcctcgcatgcccgcagaccccatctccggcagcccgaatggaagcagccttcttcccgggtaagatggattacctgggcggcggggaacagactcggggcaggggcggcgacggtcgggggcgccaggttcagagagcgcagagcgcgggtcagtgcgcacagggccatcagcacgacacccttacttttagccaagctgctcggtgctcctagatgacgttgactgtccggcgccgtcgctccgcaataacgtaaaaggaggcgggcagaaaactggagcccaagctggatacacacctcctttcctacctgaacgccgtgagagccaatccgcgggcagctctaatgtcgcgtgactaggaaacaggccccgcccccccagacccgtcaaaacaattgcctcgagcggcagccatcatggatttaaaggggcagtaccggcaagagcggcagccacaccggcagattgcaggtgagtctttgagggtatcctggggctgaaggttaaggtctctgccatctcttattctcgcactaccagaaagatgaacaaaccccctccaaccaaccttacaaaactccagcctccaaaactccgcccttcgcgattcttccccgcc

SEQ ID NO: 36222 - DNA, 2300 bp, Homo sapien
ttgaagggtatgaaggaaaatgtcatggcacttcctgtgtatggcccattttcttcaattacccaaattgtctttagaagcatagaccaattacctattgctttgtattctactctctgactcctgtacacatactacatgcaaaaggagccaaataagtgctttttaattacattcctctgccttacaaggtacaagtgtgtcaatatacaagtctagggtcttaacatgtttttccttttgactgcttaaatccccctgtccttgttcccacctgtgtggtctcggcccccagacttcctcatcttcactggtgtaatggtgtacttggtacgactcttccaggacacaaagttggcattaagggccacagaagtaagaactgggcggcaggggagcaacatcaaggcagagggctgttggaggaggccattgttcatcatctagggataaaaagacatctctttcatttgaaagctaattgaaggcaaagcatcagagaaccaaggcagagggcacagatcaattttagcttgtagcccacttcctcctggatgtatcccaaaccagctatccaaaaactccacccttcacagcttgcacagtaatgttctctccttggtgatctccttccaaatttggctcagaactctccatctccaggaatctgtttttacctaaacaattcccttctccagagctggtagcttccacacatccatgtaccaccatcagtgccaattccttttgccctctgcattgtttctgggaattcttcacatatgaatggaggggaggggtcatttcactcttgttccttgatgtattcccagcatttcggagtaggttgatttggatttgaattttaaacatgcatctcccaaactgtaccataagcagcctgaaagctccagaggagcaggacttacttctcttttgtgtgactcaccagtcacccactaggacctcaggataccttcccctgaggccactgttcttggtatcttgccctgcattctctaatatcagcagtaactcatccttgcaggcatcatatcataatggttaagagcacaggctctgaaagacagactgtttagctctgatagttggtgtgtgaccttggactccttattttcctcatctataaaatgggaatagtaactgccttatagagtatttgaaaggagttcatttatttgaaacgtctattacctatacctggcttatcataggcactcgaaacgttattactgaaacctgcacaaccggtgatctgcaaagcactttcaccttaagtatctcgtctgaagaatttcgccctatgagaaagcaacacttgtagaggaaaaagctgaggctaagtgtgccttatccaaggtcacggacctgcatgactcctgaccagactcgcaactcccgcctcgcatgcccgcagaccccatctccggcagcccgaatggaagcagccttcttcccgggtaagatggattacctgggcggcggggaacagactcggggcaggggcggcgacggtcgggggcgccaggttcagagagcgcagagcgcgggtcagtgcgcacagggccatcagcacgacacccttacttttagccaagctgctcggtgctcctagatgacgttgactgtccggcgccgtcgctccgcaataacgtaaaaggaggcgggcagaaaactggagcccaagctggatacacacctcctttcctacctgaacgccgtgagagccaatccgcgggcagctctaatgtcgcgtgactaggaaacaggccccgcccccccagacccgtcaaaacaattgcctcgagcggcagccatcatggatttaaaggggcagtaccggcaagagcggcagccacaccggcagattgcaggtgagtctttgagggtatcctggggctgaaggttaaggtctctgccatctcttattctcgcactaccagaaagatgaacaaaccccctccaaccaaccttacaaaactccagcctccaaaactccgcccttcgcgattcttccccgcccctcggcgtccagacagatagacagacgacctgccccgccccctgcgccaccgactgactcagtgacctcggggtcgttaggcctccacgtcctcgctggagctgcggacctcagtcgtccatccacacctcccccctgccgcccccgcccatctcactctcccaaccctgggcaccagggcaggtcgacagcccgaggcactcctctactgcgtttccaggcccaggagacccactccagcgccgcggttccttgc

SEQ ID NO: 36223 - DNA, 2300 bp, Homo sapien
gatgtatcccaaaccagctatccaaaaactccacccttcacagcttgcacagtaatgttctctccttggtgatctccttccaaatttggctcagaactctccatctccaggaatctgtttttacctaaacaattcccttctccagagctggtagcttccacacatccatgtaccaccatcagtgccaattccttttgccctctgcattgtttctgggaattcttcacatatgaatggaggggaggggtcatttcactcttgttccttgatgtattcccagcatttcggagtaggttgatttggatttgaattttaaacatgcatctcccaaactgtaccataagcagcctgaaagctccagaggagcaggacttacttctcttttgtgtgactcaccagtcacccactaggacctcaggataccttcccctgaggccactgttcttggtatcttgccctgcattctctaatatcagcagtaactcatccttgcaggcatcatatcataatggttaagagcacaggctctgaaagacagactgtttagctctgatagttggtgtgtgaccttggactccttattttcctcatctataaaatgggaatagtaactgccttatagagtatttgaaaggagttcatttatttgaaacgtctattacctatacctggcttatcataggcactcgaaacgttattactgaaacctgcacaaccggtgatctgcaaagcactttcaccttaagtatctcgtctgaagaatttcgccctatgagaaagcaacacttgtagaggaaaaagctgaggctaagtgtgccttatccaaggtcacggacctgcatgactcctgaccagactcgcaactcccgcctcgcatgcccgcagaccccatctccggcagcccgaatggaagcagccttcttcccgggtaagatggattacctgggcggcggggaacagactcggggcaggggcggcgacggtcgggggcgccaggttcagagagcgcagagcgcgggtcagtgcgcacagggccatcagcacgacacccttacttttagccaagctgctcggtgctcctagatgacgttgactgtccggcgccgtcgctccgcaataacgtaaaaggaggcgggcagaaaactggagcccaagctggatacacacctcctttcctacctgaacgccgtgagagccaatccgcgggcagctctaatgtcgcgtgactaggaaacaggccccgcccccccagacccgtcaaaacaattgcctcgagcggcagccatcatggatttaaaggggcagtaccggcaagagcggcagccacaccggcagattgcaggtgagtctttgagggtatcctggggctgaaggttaaggtctctgccatctcttattctcgcactaccagaaagatgaacaaaccccctccaaccaaccttacaaaactccagcctccaaaactccgcccttcgcgattcttccccgcccctcggcgtccagacagatagacagacgacctgccccgccccctgcgccaccgactgactcagtgacctcggggtcgttaggcctccacgtcctcgctggagctgcggacctcagtcgtccatccacacctcccccctgccgcccccgcccatctcactctcccaaccctgggcaccagggcaggtcgacagcccgaggcactcctctactgcgtttccaggcccaggagacccactccagcgccgcggttccttgcgacccggcagccgttcagcagacctcccattctttcctgcatcatcgggcattgtggaggcaccctacggtgattcctctcagagcctgtttgtaggtgaccgtgacagagacaaaaccatggaagtgactgggtttggagtgaccaggtgttcctccctcccctttcccagacacgcctcttgctgtaggtctctggttaagtctctctctctcattcccttcctgggagacagtagctccctaggcctgcaatgagggaggctggcttggggaaggagacgggaattgggcgtctttgaagacctgtgggcagagggagggagggagggtgtttgtcctgggtggggctctgggccaggtcctctgggtagctgtgaagtggtgaaagaaggggtgggaacgctggacttctggactttgggcagggcagatcctctgactctctggctgcagaacagtttcttccgtgctctggcctgagtgccacagccagggcctctgctctgtacacaggtaagaaggcttcaaagatgagaaacaagacccctctg

SEQ ID NO: 36224 - DNA, 2300 bp, Homo sapien
tgccctctcacctgggcctcactcagcccgagctcaatgttttccatagaacggcgaagctgccgggccttctcatgcaccagcccttcctcatggcctccctgctgcagacactcaatggtctgggacaggctttgcagcacggcctggtgttcactgcgtagggcctctagcccttggctgaccagccgtgtgctccccaggatctcctcttggctgagccggtggcctgcaggctcatcccgctgccccaacaccaggcctgacatcctggcctgggggaccttgcccggtctagggagaaacaacagagttcagctggtgtaaagatgagacagagaagctgagcaactttctcagagagtggtgggaatccaagtgaagggacaaaagtaagagtgaccctgtggcttagctggagagagagagtgaccagcaggcagggagcttagatcactaaactcaaagctaaggttgtgggcaaagcgagagggagatgaactgacttaaataaaggaagactatagtaggaacaaaggtgcttagaactagcagaaggatttaggacttaggaaaagaacaaaaaagcagttacagcctgagttaggaaaaggaatcaagggatgagagacagcactatggggatcacagaaggtctgtgggagagctgcaaatggcacagggttaaagtgggagatatgcagaaaataatgcaggggtctagaaaaaacggaaggaatctctgcaaagttaaatcagggaagaaagggaaaagaagaaaacaagagccttccttgcaggatccacattacagggtcccagaaagctcaaggtcttcaggctgcatcacctgcagaactaagcccagcatctccaaacctggtcagccctgcatattttcccactaaccttcaacccatacttcccaccccccaggactcagactgtgttcccacttcctcagaggggtcttgtttctcatctttgaagccttcttacctgtgtacagagcagaggccctggctgtggcactcaggccagagcacggaagaaactgttctgcagccagagagtcagaggatctgccctgcccaaagtccagaagtccagcgttcccaccccttctttcaccacttcacagctacccagaggacctggcccagagccccacccaggacaaacaccctccctccctccctctgcccacaggtcttcaaagacgcccaattcccgtctccttccccaagccagcctccctcattgcaggcctagggagctactgtctcccaggaagggaatgagagagagagacttaaccagagacctacagcaagaggcgtgtctgggaaaggggagggaggaacacctggtcactccaaacccagtcacttccatggttttgtctctgtcacggtcacctacaaacaggctctgagaggaatcaccgtagggtgcctccacaatgcccgatgatgcaggaaagaatgggaggtctgctgaacggctgccgggtcgcaaggaaccgcggcgctggagtgggtctcctgggcctggaaacgcagtagaggagtgcctcgggctgtcgacctgccctggtgcccagggttgggagagtgagatgggcgggggcggcaggggggaggtgtggatggacgactgaggtccgcagctccagcgaggacgtggaggcctaacgaccccgaggtcactgagtcagtcggtggcgcagggggcggggcaggtcgtctgtctatctgtctggacgccgaggggcggggaagaatcgcgaagggcggagttttggaggctggagttttgtaaggttggttggagggggtttgttcatctttctggtagtgcgagaataagagatggcagagaccttaaccttcagccccaggataccctcaaagactcacctgcaatctgccggtgtggctgccgctcttgccggtactgcccctttaaatccatgatggctgccgctcgaggcaattgttttgacgggtctgggggggcggggcctgtttcctagtcacgcgacattagagctgcccgcggattggctctcacggcgttcaggtaggaaaggaggtgtgtatccagcttgggctccagttttctgcccgcctccttttacgttattgcggagcgacggcgccggacagtcaacgtcatctaggagcaccgagcagcttggctaaaagtaagggtgtcgtgctgatggccctgtgcgcactgacccgcgctctgcgctctctgaacctggcgcccccgaccgtcgccgcccctgccccgag

SEQ ID NO: 36225 - DNA, 2300 bp, Homo sapien
aaataggaatattctgtaaactggtactttggaattatgaataatttaagaattatttggagatacgaattattttttcatcctgcagccgccttagtagtagatgagaatggaaaaagaaaagtattaaataatccccatctgagaaaacactagtgatattttaatggcaaatgacttcttgtatcaacacacaagtatatgccagtattcatgtggttcttccaggtagcttctccaccagattgtggccttctggaaaaccctagcagaggctaaacaaagtcccaggtccagagatagactggtccagagacagatgtgatcctaggtccagagatacactgtgaccatgggatggatggactctaggagccagtctttgggaggccgaggtccctgagctgatggggtagtgttgtctgtttcaggtctcccggggcctcagtgccagcaccatggacctctcttcaagcagctgacattcaacccggcccccaggtctgctgggtccccccacccccacagccctcacagcattccccattgctcctggctcttccccacccctaggtgggacagtgaaggggagcagtttaaccagaagattgctgctgcccttagggtctcagctccctcctcaggaatccctcttaggaaggaccctcaggacaccctctctgcaccctgtggtcctctagagtagctagctctgaggccccaaggtgggtacaaagcaggtatggccctcagagatgcagcctgctgctggcttttcagtcagagggttgggggctggccagccaagctgccttgccctggccgctcttactccctccctctgctgtctcacttcaggtccatgtatttcacttttcttaaataaaagaatcaggtaacctttctgtgacttgagtcctgattgaagagggtatgaagcagggcttgtgttggggcccttcacagaaggtgaggggcagtgatggatggagcagcaggaggagtgttgattcttggatctctcctctcttcctcccgttgtttgtatcatctccagcagggcctgtaggaaggcatctgggggatggggaagaaggaggctcacaacccaaggagaaggtgctgtggactgggttgtcagggacatgtggtggccatgtggcaggaccctggagtcctggcgccacttctcctggctgtgaggccctctgtggctgccattcctcctcccagctgcttgggggaagggaggtctaaacaggcctggggggccctccggaaccagaggggagacaaggcactatccatcccctctcagcatatcttggaggcctgagcagcagctggggcccatcttctaaagcttgactcctcctgacccgcctcctacaccccttgctgctttcacaacaaagaaagaatgtgggggtggtggcgctgggggtgggggtgcctggaacaagggttgtgctgggcctccccacagctggagacttggccataccctgacacagcccagactgcctggagatggacttgggatgaatttgtcagttagcagacttcagcctggctttcagagcccagcgtgtttctacctttgggttcagattggtctacagccaaaccagaccccagtcatgcacacttcagcccctctccgggctacacagcatcttcaggttacttggggacattaaggacaccctgctgttctgggtctgccgttaagattttgggttgctgaagagttggcggggcccgcctcttcccctgcccccacctggagaattctgggggaactgttggccagagcctccaggtatgcccagaatggaccattctccccagggtccacggaatcgcacaagtcacttaggttctcccggatccctgcagagtcggtggtgggtacagcaaatactcaggtcccctgcacttccctgagccttgctctctctattctccatccctctccagacccctccccctactgagctcctccccgcctcggcgaggagggggcgtcgagggggcggggcgccgtgcgggggccggaggggagggggcgtcgtggggcggggcttggcggcggcggcggcggcgcgcggggactcggaggtactgggcgcgcgcggctccggctcgggacgcctcgggacgcctcggggtcgggctccggctgcggctgctgctgcggcgcccgcgctccggtgcgctccgcctcctgtgcccgccgcggagcgcagtctgcgcgcccgccgtgcgccctcagctccttttcctgagcccgccgcgat

SEQ ID NO: 36226 - DNA, 2300 bp, Homo sapien
accatcctggctaacatagagtagtgaaacctcgtctctactgaaaatacaaaaaattagccaggggtggcggcacgcatctgtagtgccagctactcgggaggctgaggtaggagaattgtttgaacccaggaggcggaggtggcagtgagccgagattgtgccactgcacttcagcctgggtggcagagcgagactccatctcaaaaaaaaaaaaaaaaatattgggagaaaaaatgtacagtcctgccgtttatcatctttgggtgtatgtcttctttttctgtgcatatgtttttctttttttacctagcagttttattgtatatatagtttcagttattaaatttacatgattggctgagtgtggtagctcatgcctgtaatcccagcactttgggaggccgaggtgggaggatcgcttgagcccaggagttcaagaccaacctgggcaatacagggagaccctgtctgtacaaaaaatttaaaaattagccaggcatggtggtgcatgcctgtagacatgcttattgtagaattagacaatacagataactatgtagtttttaaaaatattttttaaaattatttatttttattttttttgtaacggtgtaattttatacccttttttacttaccattgtcaagcatttccccacatctttatacactcttcatgaatatttgttttgatgatcctaataatatttcaacaattggattcactgtaatttacttaactgttccttaaatgttggagatttgggttgttaaccagccacccacccacccccttttttttcattgctgcaataaacatctttaagccaaagtttttttctggatttaggtttatttcctttgggaaagattcccagaattgggataattatgcacgaaagggggtatgaacatttttatagcccttgatgtgagttgccaaattattttttaaaaggttggaccaattttgacatttccacctagagtgagagagtacagttgtagattctgaggaggaagtaggctccctctgctcaggtctgggggaactttctgggagaggtgaggcttaaaatggatctacagcctgggatggtaaagagcgggaatgggctctaggagggagaagtgatgggcagcggagtaggaacagggccgatctgggcccaaacagagtccggtttggcagacgtggaatgtcacacagggcagtaggaggaagaggtgagactgaagaattggaagaggggtaaataacggaggggcttctaacacttggctcaggagtttggactttgcctgtgggtggtcaggagcgatggtgtgtttttgagtagaggtgagggactgaaggcattgccagctgtctgtgtaaccctgatccttcccataatttccctttgttacccctgcagatgggagcagcctcccagagtgggtgacagacaacgctgggaccctgcattttgcccgggtgactcgagatgacgctggcaactacacttgcattgcctccaacgggccgcagggccagattcgtgcccatgtccagctcactgtggcaggtgcgaccgtggcagggccctggggctgggagggccctctggggtagcaccgtgtaccctgccagccccttggcttacccctccctgcgcctcgctggtctcttttcttccagtttttatcaccttcaaagtggaaccagagcgtacgactgtgtaccagggccacacagccctactgcagtgcgaggcccagggggaccccaagccgctgattcagtggaaaggcaaggaccgcatcctggaccccaccaagctgggacccaggtagggccacctctctcccacacccgtccctcctctcctgcagcccccctccctgcgagctggccagcactatggcttctcccccgacaggatgcacatcttccagaatggctccctggtgatccatgacgtggcccctgaggactcaggccgctacacctgcattgcaggcaacagctgcaacatcaagcacacggaggcccccctctatgtcgtgggtatgggctggggagggttatgctgcacaggaagtggtgggcccagacgtttgtcaccttgtactcagcccctgtgtacagaacatggcacagaagccatttttgtggcagcggtggggattcggccgtctcaccatgctgctgcacagtcttagagtccttgctcagagccgggctgtcgtttatttaacatccaacggtcggtgtgtgtgtgtgtgtgttgtgggggagtgggggggtgttctctt

SEQ ID NO: 36227 - DNA, 2300 bp, Homo sapien
ttcatgaatatttgttttgatgatcctaataatatttcaacaattggattcactgtaatttacttaactgttccttaaatgttggagatttgggttgttaaccagccacccacccacccccttttttttcattgctgcaataaacatctttaagccaaagtttttttctggatttaggtttatttcctttgggaaagattcccagaattgggataattatgcacgaaagggggtatgaacatttttatagcccttgatgtgagttgccaaattattttttaaaaggttggaccaattttgacatttccacctagagtgagagagtacagttgtagattctgaggaggaagtaggctccctctgctcaggtctgggggaactttctgggagaggtgaggcttaaaatggatctacagcctgggatggtaaagagcgggaatgggctctaggagggagaagtgatgggcagcggagtaggaacagggccgatctgggcccaaacagagtccggtttggcagacgtggaatgtcacacagggcagtaggaggaagaggtgagactgaagaattggaagaggggtaaataacggaggggcttctaacacttggctcaggagtttggactttgcctgtgggtggtcaggagcgatggtgtgtttttgagtagaggtgagggactgaaggcattgccagctgtctgtgtaaccctgatccttcccataatttccctttgttacccctgcagatgggagcagcctcccagagtgggtgacagacaacgctgggaccctgcattttgcccgggtgactcgagatgacgctggcaactacacttgcattgcctccaacgggccgcagggccagattcgtgcccatgtccagctcactgtggcaggtgcgaccgtggcagggccctggggctgggagggccctctggggtagcaccgtgtaccctgccagccccttggcttacccctccctgcgcctcgctggtctcttttcttccagtttttatcaccttcaaagtggaaccagagcgtacgactgtgtaccagggccacacagccctactgcagtgcgaggcccagggggaccccaagccgctgattcagtggaaaggcaaggaccgcatcctggaccccaccaagctgggacccaggtagggccacctctctcccacacccgtccctcctctcctgcagcccccctccctgcgagctggccagcactatggcttctcccccgacaggatgcacatcttccagaatggctccctggtgatccatgacgtggcccctgaggactcaggccgctacacctgcattgcaggcaacagctgcaacatcaagcacacggaggcccccctctatgtcgtgggtatgggctggggagggttatgctgcacaggaagtggtgggcccagacgtttgtcaccttgtactcagcccctgtgtacagaacatggcacagaagccatttttgtggcagcggtggggattcggccgtctcaccatgctgctgcacagtcttagagtccttgctcagagccgggctgtcgtttatttaacatccaacggtcggtgtgtgtgtgtgtgtgttgtgggggagtgggggggtgttctcttcctacaatgctgcctcccaggttcctgcagcagccacacatatctctgggtggctggggaggaggaccaggtcagaatgcagtaggacaaggttcttttctccaggaggcccagagaggatgatgggtcaggtaaaaggccctgcacttaactctctgcccctgggagacttatttctcctctggggacttgtttctgcatccacaggtgaaagtggtttaaatgagaagctcttaaactttcttggtttggcagcagagttatttttctagacaaagtataatgtgaaagtttaaatggatgaaaatgaactgaggaggcccccttggtgggagccactggggtgtgtgtggcagttgggggatcctgcatggtctcccttcattcccctaatgcctcttgaggcccctcagtgtgggccattaaaaggcccctagaccagcagatcccttctacagatctgcttattgaaaaacctgctctgtgccaggcagtgcctggaattctaaacctgaagctcccaaatgctgctctccggggcctggctcacattatcaagtcacttgggaagcttaacaaataacgtgggtttgtggtagctccttgacaggtgtgcttatccgtgtcgcctgtcttggcttccgatgcaaagccagcttgggaacccctggcctc

SEQ ID NO: 36228 - DNA, 2300 bp, Homo sapien
aagggattataatcaaaaagcatttcaaagctactagtctccaccagggctccttgaactttaatgagcttaggaatcagctggagagcttgtttgaaaaattcacatctttagacctcactctcaaatactctaattccctcattctgagtcatggtccagaaatcttttttttttcttttgagacagggtttgactcctgttgcccaggctggagtgcagtggcaagatctcagctcactgcaacctctgcctcccaggctcaagcgattctcctgcctcagcctcccgagtagctggaattatatgcacgtgacaccatgcccaggtactttttgtatttttagtagagatggggtttccccacgttggccaggctggtctcaaactcctggcctcaagtgatcttcccgcctcagcctcccgaagtgctgggatttcaggtatgagccactgtgcctggcctgcatttcttttttttttttttttttttttgagacaaagtcttgctcttgtctcccaggctggagtgcaatggcacgatcttggctcactgcaacctccatctcccgggttcaagtgattctcctgcctcagcctcccgagtagcttggattacaggcacctaccaccacacctggctaatttttgtatttttagtagagacggggtttcaccatgttggccaggctggtctcgtactcctgacctcgtgatctgcccgcctcggcctcccaaagtgctgggattacaggtgtgagccactgagccctgcctgttttttttaaaagcatcctctctatgtaacgcagagtatggtccttggagagtgtagaacccaacttattaaagttcccccatcatatttaagacactatggcaaaaaagtgtgaaaaagatatttagcaaagatggtgatgacttgcagtcaaatagagtcccttaggtcacatgagaaaggtaactgacttcctgtcagcctatgtctcatcccagccagagaatcccaccttgactcccctgactcttgaagccatcccctttctgccattcaactacatcctgtccttgtgaactaaactcaaatggttttctctactaggaagacttctttgttaaccacaaccatctgtccacctacaggacatgggtgtcttcaacatctcttaatgcctcccacttgctttctgttttacctcaagtctgtaaggcacaggtcatactcatgtacctaatctcctcactagatcataagtgccccaagggcaagatgcctgtcctttccccccctcccctccctttgagacaggatcgtgctctgttgcccaggctggagtgcagtggtgtaatcatggctcaccgcagcctcgacctcctgggctccaatgattcttcctcctcagcctcacaagtagctgggactacaggcatgcccccacgcccggttaacttttttttattttttgtagagacagggtcttactatgttgcccaggctggtctcaaactcctgagctgaagcaatcctcctgccttagcctcccaccgcacctagctgatgcctgtctgttttaattttgcattcccaagggcccctggggccacacctggctcagtgaggagtcactggctctgtgagtgtcctaatttgtgagctctttagtcctgaaatctcacttagctggtgtagcaagtcccatcctgtggcttctcctctacagccactatacacagttcctgcagtttcatggggaaggaggtaggggtgtggtgtcaggtggccaggtcacttgtcctgtctgggtcttagtaaattcacatgtaataagagggggccagcctgaagggcacagagctgcttccccagagagattgggggcagccagggtcccattcacctgattcatctgccagccatgcctttctgctctgcctccagagtctgtgacctgggacagcctagcaggcaaggaatggtcccctgggagaaagggcagagccttctgcctaccctgccctgagctctgatttggtttatgaggtcacttcactgccagcttggaagcagactctccagtcacatggaaggaagtagatccatttcagaggggagaggaggcagctgtgggcaagaagaacctgagggaaggaagaaggggccgggccacagcaagccccaggcactggaaaggtatggactgaggtggcagggggtagcaggcaagctttcccttcttcactgtttcaaccaaggtctgctctaccacaggggccccagccagggctctgtgcccagaaca

SEQ ID NO: 36229 - DNA, 2300 bp, Homo sapien
tcccaccttcttgacctataaaatggcaattttgtagggttcaacctatatataatgcaaacaaacattttatgcaacaatatttgcccttgctttttgtgatacccattaatttattcttttaaatgttgattgtagtatactgaattgatatcactaccactaccagtaatgactaggttacaatcaactgctttatttaatctccataatttttcgggcaggaataatcactgcctcccatccccttaaacatgccaagatgctttatccctaggatgaggtgacttactccaggtaactcctattgcctaaccactgaccaattactctgccctttagtctttatgtcattaaatctgcattaagaatttcatggaataggcccggcatggtggctcatgcctgtaatcccagcaccttgggagaccgaggtgggaggatcacttgaggtcagcagttcgagaccagcctggacaacatggcgaaaccccatctctactaaaaacacaaaataactagccaggtgtggtggtgggcacctgtaatcccagctatttgggaagctgaggcagcaggagaatcgcttgaactggggaggcagaggttgcagtgagtcgagatcgtgccagtgcactccagcctgggcgacagagcgagactctgtctcaaaaaaaaaaaaaaaaaaaactcagggaatggatagcagcattgatgaatattgcgtctggagagatcagatcacttgtcacttgtttccaggcacagggcttaccaagaggcagattccagatttaaataattctgtaacagcaaagtccaagctattttcactgctttggagaaaagacccagacccagagcttgaacctcactttgcagcaccccagttctaatcttttaagtttttttttttttttttttttttttctgctgggcacggtggttcatgcctataatcccagcactttgggaagccgagggggaaggatcgcttgaggccaggagttcgaaaccagtctgggcaacatggcaaaaccccatctctacaaaaaatacaaaaattaggccagagtggtggcgcgcacctgtagttccagctacgtgagaggcggaggtgggagaatcgcttgaacccgggaggcagaggttgcaatgagctcagatcccgccactgcactccaggttgggcgacagagcgataccctgtgtgaaacttttttttttttctccaacgggctttccagagaagtgtgtgtatgtgcgtgtgtgtgcgcgagcgtgcttgcttgggcttaaactttctgtcgggccacactttcccaagtctttgcactggctgtagggtgggctttatcctcgggacgtcctcctccccaagtccagcctgcagctggaagtcttcactgatctccatctctcctccctgatctccgtctctcctccctgcccgcctcaggactgggaggccgatctctctctctcgccctcccctccaccagccttttccagatgtatgtctgccaaagaccccccagtgcagaggatgatgaatgaagatcctcgagccagcccggtgggaaagtttcgtcgcctacaaaagcgagggaaagggaagggaagttgggggtaggggaaaagttagagctgagaggctggggcgcgacgagtctggacaccgggcggggacccaagctctctccgctcagccaataactgtgcctcccttaggaaggcgtgaggaaatgctccaatcaatccctgcactcctcccttggaatttgggctgtatttttttatttactgcaaaccccacaatccacccaggggtttccccagtgtttgcctccagcggtcccggtgcccatttactagtgctgctccctctcttccgcaagactgcgctccagtcccagcctccttctccgcgggtgcctcccaaaccgttctatcattctcgggttcagggaggcggaatcgtgcctgctctccggttcctttaagaggcgtcggctccacccctctcagagtcgcggtctgacgcgagatgacagcaacgagttcggtatgtctatgcaaataagcgccctcttgtgggccaatggggagcggaggtgccggaaccacggaccaatggggcgggggcgctggggctcaccatataaggagcggcctcgccataaaaggaaacattgtatctctttatatggggggaagggtcgggggatccctccgccgccagcgcgtggtcccggccccctccacccgccgtctcggccgcggccagcagcccctgcccc

SEQ ID NO: 36230 - DNA, 2300 bp, Homo sapien
ccagtgtgtgggggagattctgggtttgcccagtcctgggttgtttccaggagaaagccgggggaggggccctcaggccattccccaacggggtggggagggtgacccacagctctgggcctctttttgccctttagggctgttgctagggagagggaagagggagaccaaatgtcggggttggggtgggagggcgtcaggcagaggcaactgacttcatttgtgccacacgcatgggcattgcagccttgcgctgtcccaggcatgcagctgcctggggcccaagttgcagtgagcagggtggggtctgggagggggtgagaggcaggaatgggggtcagaagaagtgggagcagcttcttgggctgagtgcagccaaaggggagccagaaatgggcagttctcccagggagtgagcagctactgtaacttttttaaattaagacaaaaagccttgaagaaaatgactttatttttctaagtgtaacctcagtatttatgtaatttgtacaggggccatgccccacccccctcctccccctttggggtagaccttgagggtgggccagcataggggggagggtcttttaccctgtgtcagagcctaccttcaccacctatatccagaaggggagctttttcagaaacagggcagcagtggggtgaaattttcttaacccctaagactgccttcagtaggaacaagctggcttctgtgattaggtgaagggatgggggaagattttatgcacagcctagttatcaaggggatgatttgccgacatgtttgagaaccccctaacctctaaccctcattgctgtcttgccccagtttggggtgccaagatggaagtcacctttctgggctttctcctggagatagctggggcttatgggtggctttcaaggctggggcatggcaaatcaggggccagagagcaggggagcttgggactcaggtctgtaactgcccagccccttttctctgctcttgtttcactccaccatcactcactcactccccactcccccacccatggggaggagacctttgatgaattcttcctctccttcccacaaaagacagacccagtgagtgaatcaggcaaagtgcttataatgtgtgttgtgtgagcgtggccttgggaggacatgcgtgtgtcagggatgagttgaggtgatatttttatgtgcagcgacccttggtgtttcccttcctcggtggctctggggtatgtgtgtgtgggtgtgtgcgcctgagtgagtgtgtgtgcttgaatgtgagtgtgtatgtcagtggtttctacttcccctgggatgctgacccaggaatagtggacatggtcacagtcctatgtacagagctttcttttgtattaaaaaaaaatactctttcaataaatgtatcatttttgtgcacagactgtggggtctttggttctgtttttctacttagggagggatgggggtatgaacgcgaggcaaactcctaaaattgctgctctgagtagcgatccgggctgcttgatgagaacggtaatgctaaggtgtgctttgggctgtttaattctatacgatttaatttaaggaaagttttgcggggccgaggaccttctccctgtgcgtggcttcgctaggtgttaaggccaacgcagaggagcaaattttaattaacaggaaaagtgacacaactaatccaaagcattgctgaagggtttgggaaactcatgggcacctgacctactgaaaagtcaaaaagggcagccttaaggtgggaatgtgggttaccatgtttcgtcagcatgatcgctgtgatgggagagggaggattaggagggccgacccagtgaagaggagggggcttcacagttgactggatggaaacggcttcttcctgctgctgagagaggagcaacgtgacctcgatcccaggctcctccggtagcgcgcccccacgcccctcttccagtgcagccgcccgcggtagcacgcatgctccactcgcgcgctgttccgccacgctcggcgtgggccgcggtgggacccgtaggtgcccggccgtgcgtgcactcgccgtgtgacccggaagggagctctgaggaggcggggccaggacggcgggaccggccgctgggtcccagcgagggctgagccgggcggtgggaggtgagaggagagttctgcgccgacccaatccctccccttctcctgtcccctccccggtcctttagccactgtccatggggctgacgaagggaaccaggtcttgctctctgagattcactggatcttttcagctt

SEQ ID NO: 36231 - DNA, 2300 bp, Homo sapien
acatgttatgcaatcctgagcctcagatccgccggagtgcaggcaaaatgctgcaggctctggcagcccacgatgctggtaagagacagccagggaagaaggaaaggaatggagaaaatggggccacagggaataagaaagaggagagatttcctagctctgtaagaacacctagtatttggtgaatatcaatttgatgcaaaggaaaaaatatagattaataggctatttcaggtatataaagaggctaaaatgatagcctctggcttatctgttcattctcagtgcattgaccagagaagagaataggacttatctgtatttttgaaactggattgagatttattagttggttttgaaatcaatttggtgggttacaaccaacatttttttaaaaacttaagtcattagtgtgtagcacttagtaggggtaaattttgtagcataaaatatatgtttcagttatatgtatgtatgtttgtaacaggttaccatgtaaaatgtatttctttctgtgagccttagtaacaaagtttgaaagcgtctggggtaggagatagaatctaggaaaggcagggagaaagtactggggattgaggagaagatatggattgggtatggattacagggagtcgggctcacgtccttctatcactgagccagcaagatggcatcgagcagcacatggattttgacagtcgctatacattgctggagctgtttgcagaaaccacatcctctgaagaacactgcatggcctttgagggcattcatctgcctcaggtacactgccagctgtagggaaatgctgtgtacaagggctaagacattatttatgaaaacgtggttcaggactgaatgttagcaccagagccacctgggaacttgttaacatgaaggttcatgtcctccctcccagcccctctccattcagaatttctgagatgagaacccaggaatctgtgttttaagacactccctatgcctttcttacacaaatcaaagtttcagaactacaggcctggggagaaggcctttatatttttctgtagaggaggatacttcagggaaggggagaggctaaagccaggaagagatgaacctgtcccaaggattgtgtcttacagatcccaggaaagctgcttttctccttggtgaagcgctacctttgtgtcacgtccctcctggatcagctgaatagcagtccagagctgggagctggagaccaaagctccccatgtgccacaagagagaaaagccggggacagcgggaactggagttcagcatggctgtgggcaacctcatctctgagcttgtgcggagcatgggctgggcccggaacctcagcgaacagggcatgtcacctccccggccaacccggtccatctttcagccctacatttcaggccccagccttttactccccaccattgtcaccacccccagaagacaagggtgggtcttccgccagcgctctgaattctccagccgtagtggctatggagaatatgtgcagcagacactccagccagggatgcgagtgcggatgctggatgattatgaggagatcagtgctggggacgagggcgagttccggcagagcaacaacggcattccccctgtgcaggtgggcagcacatggtggtgagacactgttgggagtttatttggggtggggtgtagctgggacttcataaggaggactcctgcaggccacccaagaagaacccccctggggaattggaatgatacaagggggttggcatttgtgcggggtgcatttggagggctgagaaaatctggcaggggtgtgggtgggctgtaagttcatgggagactcacccaggaagcagaactgataaatggagatacctccccaccaacaccagtggaagaggctaggaaggaatgtcgaggcagagaatcatggttaagaaaagaggcagggcccactcctgataagggaaggaagccttttgccatatgggggtttttccaggcttagccaggtgtgtatctgagggtgcgccccagatctatgcttgggcatgtcctttcaagccttcacaggccaaggctcagagggttgagccttctctattctgctctctttcttcctccctcataccaggttttctggcagtcgacaggccgcacttactgggtgcactggcacatgctggagatcctgggccctgaggaagccactgaggataaggcttcagcagctgtggagaagggggcaggggctactgtgttgggcacaggtgagcctaagaggggacatggatagcatgtc

SEQ ID NO: 36232 - DNA, 2300 bp, Homo sapien
aagcgctgccagcaggtggtgttagggtgtcagccagggctgaggaggaggaggtggcacacaagtttctccttgatctgcttgggagatggcccaggacctgttgagtcccagagatgtggggatgtcctgagcagttctagggagctcagggcaggaggcttggctttggtagtacttagtggctcaagcggcttgggtgacagataagtctgtgcatgttccagggcggcattgacacccgggttcggggtgtggaggtcctgggccctaagcccacattctggccactgttccgggagcagctgtgtcgccgaacatgtctcttctacacaattcgggcacaagcctggagccgggacatagcagaggaccaccggcgcctcctccagctctgtcccaggtgggtggggcctgaggagggaagatgggtaagggaacaggacactgtgagaagtaggagggatgctcctgtgggagtccggaagggaaagctgcagccaggacatgagggggaaggtgaacgtaggtgagaagtttgtgttaattgggaaaagttgggtcagggaccgaacaggggtgattgggagctgatctgcacttgaatggaggcctctgggaaatcggtgccattaatcctccgccatgcactgtttgttcccagactgaacagggttttgcgccacgagcagaattttgctgaccgcttcctccctgatgatgaggccgcccaggcactgggcaagacctgctgggaggccctggtcagccccctggtgcagaacatcacctctcccggtaaccatgctgacacctggccccactaaccagttccttgtccttattcccagggatcacctgagttaatgctcttggttcttttggttcctgtctttatccctgaaggcctgtcacctcagtgttcctctctccttcctgccccaggcactgctccctgagactctggtatttgaatctttcccactaccccatccccaccctgttaacatttcccctgactccagctgaaacaaaccttggtgaggggaggactagggccccactacccctcaagcctttttgtacaattgatctttctccctcctctgccctgagctgtctgttctcccatctcccatggagacctgttcctgacctgtcttctttcagatgcggaaggcgtgagtgccctgggatggctgctggatcagtacttagaacagagagagacctctcggaaccccttgagtcgagcagcgtcctttgcttctcgagttcgtcgcctttgccacttgctggtgcatgtggaacctcctcctgggccttctcctgagccatccactcggccctgtaagtcccagctgtggccagtggagctgactctgcggacagtggtgtatctggctccctcctccctgggtcttactcttgctgctttgctaccggcctttccaggcccctgagacctactggcctttccaggagatcactacccaagaccggtgtactcacccagaggctgagatgaaaccccttccttctccctctgtctctacagtcagcaagaacagcaagggtcgggaccggagcccggcgccttcgccagtgcttccaagcagcagcctgaggaacataacccagtgctggctgagcgtggtgcaggagcaggtgggcagaagcaagcagaagtctgcagaggggaggggctgctccttttatgtcatttcttgcctttctcctcaggtcagcagattcctggctgcagcttggagggccccagactttgtgcctcgttactgtaaactctatgagcacttgcagagagcaggctccgagctgtttgggcctcgggcagccttcatgctggctctgcgcagtggcttctctggcgccttgctgcagcagtccttcctcactgctgctcacgtgagtcccaccagctccccacagggctataagcttgtgttccaagttcatctctttctgctctgccctttcacctcctttcgctccccagtctcctactccactccctcattcatggtttgctcatgccctttcccctgcccccagatgagtgagcagtttgccaggtacattgaccaacagatccagggtggcctgattggtggagcccctggagtggaaatgctggggcagcttcagcggcacctggaacccattatggtcctttctggtctggaactggccacaacttttgagcacttctatcagtgagtgcaggtctggaggcataggggatgggaggcctagatctagagagtggaaagatttgagtc

SEQ ID NO: 36233 - DNA, 2300 bp, Homo sapien
agctcatggccaatcttgcttcaatctgtacccccatctattccccacccccaaaatttaaaagataagtactctttgtttaaaaaaaaaggatactacagttatcaagtatttagaaatttgcagttccttgtatgaagtatacagtcattgctcatatttccctgattgccttggggttttttggttagttattttgtttagtgaggatccaaacaaggtccacgcattgcatttggttgcattatcttacatctcccttactctataggtttccacctcccattttatcctccttgcaattatttctggaggaaagtgggttattcattcacaggctggattttcctgattgcattcacgtggtgtcctcaagcataattcctctgtctcctttatttcctgaaaactgatttgtaggtgtagaggcttattcagatttgggtttgatttctcaggcaagaacacttcattggtggtatgtgtccttccaccaggaggcaggttcagcctgtctccctttgtgatgttgagatggatcaatggatttcagtgtgtcagtcttgtctatacattacatgtaattttccatcagcttttcaccaggcaggcatttctaccattgcttaggtctatcatttcattaggggttttgaaatagttatatctagttctgtcactccttcttcatgtattagctggaatgctttcaagagaaaccctttcactaactgtttatctaccctgaagtccggtttatacaggaaaggcttgattgtttccacttccaattatttttaactcattttaaaaataatatggtggttctctagtaacttttaaataaaaccaatgaggtcttttaaaaatatatcattatgaactcacagattttaaaatattttgtgtggttccatcacacattgcaggtggatttttttttttttggattctcaaattgtcccatctttggtaagacagcatctctcaggcaggctcctagtccctttaatactctccctttgacagcttccttgctttccagtatgaacagatgtctcaggctcaccttgcctgagctgtgaaacaggaggaggaagagatccagcccagtgggtctttaaaactgtgagctccttgagggcaaaatgcaagtgttttctctctggtgtttttgcatggaacctgcctggctcagggctaggcgctgggtctagggatgggctcctagatacccgtggctcatcagggaggcaggcgcagggaaggctgagatctggaagcttgacaaggtatctctctgtctgaaaatgctggggccctcctccccatagggactagtaggagcaaagcttgacacctcaacccctaaaccccttgtttcgcccattctgtgtctccacccttctccttgacacttgcctaggtcagaaccatccagtcctggacatgggaccacatcggcgactgcagtggacgtggctgggccgggctgagctgcagtttgggaagcagatactgcatgtgtccaccgtgcagatgtggctgctgctgaaattcaatcagacagaggtgcttcagcccttagcctctctctgccttctctgctaccttatctgtcgctgttctcctcctaaaccctgttcctccttcatccttactcccctcttccttttctttcctttgactcctgactgggcgtttctgctcatcaggaggtgtcagtagagaccttgctgaaggattctgacctctccccagagctgctgctccaggcactcgtgcccctcacctcagggaatggccctttgaccctgcatgagggccaggactttccacacgggggtaggtcattgggggccgggctgagcctctgctgctggtcggggggtcgccctcaagatggggggactgtgagaatggggtcatcttagtccccattcatctgtccctctgcctcctctggtacctgaccgggagcgggttccaggtgtgctgcggcttcatgagcctgggccccagcgcagtggggaggccctgtggctgatacctccccaggcatacctgaacgtagagaaggatgaaggccgaaccctggaacagaagaggaatctcttgagctgtcttcttgttcgtattctcaaagcccatggggaaaagggcctccacattgatcagctggtttgtctggtaggcagagaggggaccatgaagttggcggagggagggagtcatgcttgggattggggatgaacacagtgaactctttcaatataagacttctgtagggtgacatttcc

SEQ ID NO: 36234 - DNA, 2300 bp, Homo sapien
gagccaggaagctacctgggagaacagtgttccgggcagagggaacagcaaatgcaaagactctgaggcaagggcatggctgacatgcttaaggaacagccaggaagccagtgaggtggcagagaagtgaatgaaagtaatagaagctggagttagggaagtaagagggtgacaggatcatctggagccttgtgagctactgtgaggttttcagtttttaccccaagtgagatgggaaccactggagggttttgagcagaggagggtcatgacctagatcactcaagctgctgagtggagagcaaactgtagcagggaagggccaggggaggtgtatagagaacccttgacataagtaattccatcttagaaagactccatcactgggcacattcgcttatgcctgtaatcccagcgctttgggaggctgaggtagggggattgcttgggtctaggagttttgagaccagccgtggaaacatagtgagacctcgtctctacaatttttttttttttgagatggagtttcactctgttgcctaggctggagtgcagtggcgtgatcttggctcactgcaacctctgcctcccgggttcaagcgattctccagcctcagcctctggagtagctgggactacaggagtgtgccaccacgcctggctaactttttgtatttttagtagagacggggtttcaccgcgttagccaggatggtctcgatctcctgacctcgtgatctgcccacctcggcctcccaaagtgctgggattacagacatgagccaccgagcccagccaattttttttttattagctcagcatggtggcacgtgcctgtagtcctagctactcaggaagctgaggtgggaggattccttgaaccctcaaacttgaggcacgagtttgaggctgcagtgagcaatgatcgtgcctctgcactccagtgtgggcgacagggaccttgtcaccaaaaataataaataaataaataaataaagttttaaaaaacttcatcttacatttcaaaaggcatcaagccaacagggtccagatgttcgcctaaccaatggagacaacacccaaccagataagggcatcaccctttactataagtcctcatcagaggactcaaggaccataaaatgatcaggacttcagcagctagacacggccaccttaacagaccgagtcttgctatcactcgtgcccagcacctggtgtctgcctctgaaggctctgcccaaatcaaggactcttccttgcaagctcttgatgactatccccatcaggccgggactctgtccacagcactctccttggactggttcgttaaccccttttctcttgatgttaaatgttcttgtgtttgatgtgaaattttaacctgtaacatttatatccttacatataatactatggatggtttgcaatacagtctgacttgtggagtggctccagcttgcatgcccgcggctctgactaccgagtgaacaggtggtcctaaggagaactgacttcttgggaactccgtgtgacgcctagcttttgtgattgaaatagcatcagtaaaaacctgatcttgtggacagacacaaaggtgggtggacctggttctgtctgaccttgagcagctcacgacatgtggacacctgttaggaggctgtggagagcccagaggaggcttagaccagggtggtggccctgtaggcggtcgtgagatttcagatttggaaggacgaatccacacgagttgtcaatggatgggacgcagagtttgagagaaagggaacgatccagatgactccgagggtcttgggcctgagcagctgggaggatgcagctggggaagacggcggggaggaggggagcagaagcgggtgaggtggggaagccctcgagttctgcctggacaaggtcaagttaaggtgcgtgttaggcatccgaacgtcaagtccaggaagggtgtgttcccgaaagggtcccggctggatcctcccagttcgtcgtccccattccacaggtgtggactcagcagccgggctctgcgctgggccgggcggggtcacgtggccgcgggctggcgccccctggcgccggagagcgcgggcggctggggaatggctgctgccatggtgccggggcgcagcgagagctgggagcgcggggagcctggccgcccggccctgtacttctgcgggagcattcgcggcggacgcgaggacaggacgctgtacgagcggatcgtgtctcggctgcggcgattcgggacagtgctcaccgagcacgtggcggccgccgag

SEQ ID NO: 36235 - DNA, 2300 bp, Homo sapien
atactcatcaactggatgtgggatgtcccaggaagggggtatgatcttggatgaggcagctcccttggccaagggcaattcccagagaacaggtcagctgaaagcagtcagccttcaacatctcatatctgggagaataagcacctacattctggagggagatctgaatggctctccacagtatccactacagttccaaaaaccaaatggataaaatctaatcttcttagcactgcacacaaggtccttcatgatcttgcacacgcccgccccagcctcatctcatgctgtcttctcagcctggaagtctctttcatgctctgccctggccccacttgtctgttggcaaacttctactaattctactaattcctcaaattacagttgaatgtacctcctccaagaagccttccctgactactcttgcaggctcaatgatccttcctcccaatgtggtgattagaaccatggactccagagccagggactgaattccagctctgccactttctagctgtgtaacccaatgcatattacttaacctgtctgtatcttagtttcctcatctataaaacaagggataacaatagtactcttacttcatagggttgtcatcaggattaaagcaattaacatatgtaaagttagagtagtatctggcagaagtaaataactgctgcaattgttgttgttgttgttgttattattgagacagagtctcgctctgtcatccaggctggcatgcagtagcataatcacggctcactgcagtgttgacctcctgggctcaagaaatcctcccccctcagcctcccgagtagctgggactgcaggtgcacaccaccacacccaactaatttttaaattttttgtacagatgaggtctcactatgttgcccaggccggtcttgaactcccgggctcaagcgatcctgctgccttggtcccccaaagtgttgggattataggcatgagccattgcacttggcccattgttgttgttattattattcaagttgctctgatgcatttgttgaaggcattaaggaaggaaagaactggctgggcacaatggctcatgcctgtaatcccagaaatttgggaggccaaggtgggcagatggctttgagctcaggaattcaagaccagcgtggggaacatggtgaaaccccgtctctacaaaaaatacaaaaattagccggggatagtggctcatgcctgtagtctcaaatatttgggaggctgaggctggagactcgcttaagtccaggaagcagaggttgcaataaactgagactgtgccactgcactccagcctgggcagcagagtgagaccctgtttcaaaaaaaaaaaaaaaaaaaaagaaggaagaaactgaaagagacaggcggcatgcagaatgtgttgttcaaggaatgttggaatgttgagttgttgagtaacccaacatgtcagaaggggagtaatggcctaatgggtccatgttgggaagatgttttgatgttacagtaaagagtgtccatcttatttggtaagcagtaaaaaccaatggcagagtttgtccacaaatgaaagaaagggccaaagaaagagagacacagattgagccaaaagataaagcatataggtggtgaggtgagaattgcacatgacgggtggtgggtgcgagtgtgggatggtcccagaagtggtgggtgatggggacgtatgggaggatgggtacaggagagggggatgagttgagaggaaggcgatataaacatgtagaggatggagtggggaatcaggcgagactgatgggtcagatgaggaattttagacatgctaggagtggggaagataaagggtgatggagacaggtgagttttatgggaacaggtaaggagtgatggggctgtgctgggagatggagtcaagcgggtggcagagagctgtaaggagaacctgagagctggagcgggacagccagagagtcccagggctggaggagagcggagcggggccgtcggaacgtgatgtcagaggaggagccgtgatgtcagagcgggcggcgggcggtgatgtcagggctggtgctgatgctggcggcgcggtgcattgtgggcagctccccgctctgccgctgccgccgccgtcgcccaaggaggatcggggccgggccgggccgggatgatccgggtcggaaggccgccgccgccggagggagcgggtcacccaacgccgcactgagccgcccccgccccgccccggccccgggggatgcgccgccccgagctgctgcctccgccgccgccgcagc

SEQ ID NO: 36236 - DNA, 2300 bp, Homo sapien
gagtggccacaaggttgctgtctatctgaaatccatgtcttgagtccatcacctgtgttcaccccatctcttatatcctgacctcccaaccccatggctgtgtcagtgggttcagctcaccctgagaaaggtgtatgactctcagcacatccatccccctcagttaacaccaccctcaaggggctttagtgcctcccctcattttcttgattaccacatctcccagggctgattagcaggtcactttggtgtgggtgtcccatgggtcaccccttgggtagcaggtcttcccttttcactaagcctctgttgcacagctccatggacattttgtggcacagggactcccctaagggggagccaaagcccaggcctcccctacaagggaaagggtcccagtctggtatgcccccttggtcagcaagtcttcctggcatcagttagagtatgtctctctcccctcggcctgttcactgtcattttcctcttcttcattggtcaacatgtgtgtcctgttgctgattttaaacatctctagtttgtagtctgtatctcccttgcactggcctttatacaatctttcccctggtaactcctggagcatctgtccagtggggccaggaagaatgcagagcaggagtggagctcctctcctccatatctgccaggtggtcctgggtccgcagcccgccctcacaggccctcctcactcccctaggtagatggccccctcagggcaggcccggcggacacccctccctctggctggcggatgcagtgcctagcggccgcccttaaggacgaaaccaacatgagtgggggaggggagcaggccgacatcctgccggccaactacgtggtcaaggatcgctggaaggtggtgagtgagtgacccggcgggacagagggagggtagcggggagggaggcgaggacctggagacttgttaaaaccggtgccctccgctcccctaccctaagagggaggtgcctctaagctcatttgcatactgcttgcatgtcattatttttgccaacacgtgtggacaatagctttctcccagtgccctctctcgagccccgccctctctcacccctcttcccgctaggtcacgttggtcaggccaagcccggaacaactcctggttggatgtctgggcaggagctgcagaggccagtgtggcggaggaggaagaggggtgggggagggagctttttctctgacggaccttggagaagggcagtggacgagcatgtgtccctccgcttccgcagaggacggaaaggcttgggtttggggaaagaggccctgcaggctgctcccgccgcacccgcactccatcttctccatccagcctcctcccctcgccgggtcctgcggcaggtgcagcacggcgagactccatctcccggcgtgccctgctcctccagcccggggcttcgggctgctcggcctgctgggagttgtagtctcagcctcctcgggagccgggcctgcctcggagcgggggcgtgagggctgggggaatgatagtatttggggagcgagacctactgtaaatcacctccctttttccgtcacttaatagcgctctggtgtcctcttattattgtgggggcaggataatgtggggcagactgtgggcggcagtgtggggaaacccgtgtgtgagcctgtgggactgcaccggagtggggagccagggggaggggagggagaacaacagaggtcaggtacactcctgacctctgagtcgtgtgtgtgtgcgtgtgtgcttggcgcgtgtgcgcacccgcgtgctttagtggggaggctcagttcacgggagtgcggggttggagaggagggtgaggcccgggtgcaggcgggtctccacggcaacagccaccggccgtgcaagtcccctagaaacctagaaagaggcaacggtggcgacgttttcagagatgtctctgggactgggggttgggagtggaagggatgaagaggaggagacttctaggggtccccaagggatgaggaaaggggctgtttatgtcccagagggggacttcctgagagggagagtacagaaatcgggggaggaagagccagggcagtaataaaaggaacgagggtctggcgaagacaggagtgttcctctgaaacctcggggcccctggcaccggagcttagtttctggcggattggaggcagaatgacatttgcactgaagtggtgaggaaaagacagtttttacacacatgttgagtttaggctggaacttttttgtgatttctgagggaaggagtagaagatga

SEQ ID NO: 36237 - DNA, 2300 bp, Homo sapien
gggaggcccctgagagatgtttccatcttcccttggcctctgagtgggacttcactccacagtaggactggggccttctctgcaccagaaaaggggtctcttccaaagacccagtcctggggataggaggggtatcctttctggcatccactctgtgtgtctccttgtgagcaacctcagtccttacacactcacacaggttggcttacgtaggactgaagaccaccatttttgtctgtggtagcctggagtccctctccctggagacggagaaatgaggaaaggcagtttgggaagggatatgagtggagaagagaggtgggaaatgccttgaatgagacagtcctgaagggctgcctgcttttagaaaacaagaagcaaactggtttggctcacagtgaaccccagttgcagggatggtagagaaagttgagggctgaacaggatatcatagacagcagagggtctggatgggctctggggcactcgggagcaggagacagtacaaaagcagttgagatttggatttcccaccccactgtctcctgtctccaaccctccgtctgagctcccattacacacacacatgcaaacacacacacacacacgcacaagcaccactagccctgagccttctttggcaccctttctcccctttacatccatcaaaacaaactgtgcctcagaaaggaaatgatatcagccattgacatgggagcataaatataagaccctaggtggcctctctcaaggatgttttatttaagtctttattaacaagtcaatgaaaatattgtgcacagtcagactgggcaggtcccacgtaggctggggtggtggtattttaaggaagccccacaggcagttctgatctgcacccctgcctctgcagctgaagagccattgaaccacaggctcgatgctgggggagaatgaaagtcagccccctgcccacagcctgaatgtgagggagtggcacaaaccccagataggttaggcctccgtgctggctctcagtggggtaccctggcatttgagagagggcgattctttcttgtgtagcacctccccacacacacactactgtacaatcagaaatatcctcctcttggggctggcatgaccccaagttgagaagctctgaaagtaatgtgagattcacagcacagttcaatataatgaggctgggaacagtggctcgcgtctgtaatcccagcactttgggaggccaaggtgggtggatcacctgaggtcaggagtttgagaccagcctggccaacatggtgaaaccccatctctactaaaaatacaaaaattagggaggcgtggtggtgtgcacctgtaagcgcagctactcaggaggctgaggcaggagaatagcttgaacctggggggtggaggttacagtgagccaagatcatgctactgcattccagtctgggtgacagattctgtctcaaaaaaaaaaaaaaaaaaaaagataacgacagaagagatgtcccaaggcaggatcaatgcccttggggtaaagtcagatgggacccaggccctgcgcagcagagctcacagtctcttggggagacagattatgtgacagacatgaggttcaccctgtgatgagagagagatagaacgcactaatccttgtaggatgggaaaggcaggctacctgcccaaggtgacagccaacctgtatcagacagcaaagggtagaaggacaggctgtgtgtggggagaggtcctgtggggagaggctacattgggggtgggccgtaagggtggaatctgagatggggctggtgagggaaatggggagacagctgtattcaggctgtgagaggccttgagtgtaaaccaaggaatgtggactttgttgttggggccggggagtcactggagtttgttgagctgggactagcaaggccatcttgggggtgatgaaaccagccaggcaggcctggagggtgatggcagaggaggctggaaagccctctgtaaactcaagggccagttgggtgtgtttgcctggaagcagcaggaagcagccactggcgggtgtgagcactggagaggcaagaacaaagcttgcctgaggaagattagcttccctagggtggcccaggagagagcgttccttgcacagaaacccgagtttattttctgcttgtttgtattcctggagcacggtaagcattcaaaaacatttgttgaatgaatgaatgaatgaatgaacgaacgaactaacaaacgaactaacaaagccttgataggaagtgaggttggagggtgacaacctagag

SEQ ID NO: 36238 - DNA, 2300 bp, Homo sapien
gtgggcctggggtagcagacacagagaagtttaagaaggatgcttggcaggactccttggcagcgtagatgggcaggaaagtggggaggcaggatatccccggggcttctggtctggatgggctgtgttcggctagcttaggaagacagaagcccagcgtgttcgaaaatgctagcaaagtgctggacatcgtcagcaccgtcccaccatggaacaaagctgtgtcagccctgatgcgcccagggcattgcgggtgcctggggatgtctgtgtattgaacagggtggagctagagtgaaggagacacagcagccaaggtcctgaccaggtggtcagacctttctagtctggaaggaaggaggctaagggggacatggcaagagtctagaaaaccaaggactgctttgtccatcacattgccaagggctctgcacaaaactttgaagaggaaaatggaatggagctcaagtatacctgtcgagggctggacaaattcctggctgagaggatggattggaggtcgaggggcccagcctgcacttttaagggtagaggacagccccgcctttgcccttgtccagcacaggatctggtggccctgggcagccagctctctggccacagagaaactgcacaccctgaggtggtactgagggcatctaggagccagcccggcacagcccatccaggaagtggcacagatacttgccgccgtctctggacctggctttctcatctgtaaaaggaagggctgatctgcgtggtggtcgtggttccttccagttttcattttctgttattgttgctgactcgggtgcaggatgcacatggcgatgagaggggctggggacatagagaggctgggaggcagaaaggccaccaggatcagggcctgggacttcaggggacctagagcatggacagtcattcatcagaggtttcctgagcactcactaggcgccagagaccattctaggccctggggacagagcagtgaacaagacagacccagtgcctgtgcttaactttatggagctcacactctggtagacgacctgggcctgtgagtctcctaggttgtgggtgcagctgaagtcttcctgggcccaggagggtgggtgacctcagagggtccctgtgtatgccccttgcaggtgttctccgtggcgcccccatttgaggtgaatggcctcccacgagctgtgcctctgagtctgccctaccaggacttcaaaagagacctctccgattaccgagaacgggcgcggttgctcaacagggtccggagggtgggcttctcgcacatgctgctcaccaccccccaggtcccactggctcctgttcagcctcaggctaatgggaaggaggaagaggaggaggaggaggaagatgaggaagaggaagaagaggatgaggaagaagaagaggaggaagaggaagaggaggaggaagaagaggaggaggaggaagaggaggaggaggctgcagcggcagttgccttgggggaggtgctggggcctcgtagtggctccagcagtgaggggagtgagaggagcactgaccggagccaggagggtgccccgtccacgctgctggcagacgatcagaaggagtccaggggccgggcctccatggccgatggggacctggagcctgaggagggctccaaaacgctggtgcttgtctctcctggcgacatgaagaagtcgcccgtcactgccgaactggcccccgaccccgacctgggcaccctggctgccctcactcctcagcatgagcggccccagcccacgggcagccagctggacgtatctgagccaggcaccctgtcctctgtcctcaagtctgagcccaagcccccggggcctggggcagggctgggggccgggacagtgaccacaggggtcgggggcgtggcagtcacctcctcacccttcaccaaagttgagaggacctttgtgcacattgcggagaaaacccacctcaacgtcatgtcttccggtggacaagccttgcggtctgaggagttcagcgctgggggcgagctgggtctggagctggcctctgatgggggcgctgtggaggagggggcccgagcgcccctggagaacggcctcgccctgtcagggctgaatggggctgagatagagggctctgccctgtctggggccccccgggaaaccccctcagagatggccacaaactcactgcccaatggcccggcccttgcagacgggccagccccggtgtccccgctggagccaagccctgagaaagtggccaccatctcccccagacgc

SEQ ID NO: 36239 - DNA, 2300 bp, Homo sapien
caaagtgctgggattacaggcatgagccactgtgcctggccagggctgcagatttagatttgagtttcctaggagccaatgtcaggagggagaggtaaccactgcatgattatcagctatttctgatattaaagcaggagagaaattcccattgtgaaaactaagtcgtcacagccaatggctgaggttggcctcgttagctgtcttctctggctgtgaaaaaacttcagagtattaccctgtggagccactggatgggacatggagatggggtgaccacaaaacttacctctcaggagctgcaaagtgttatggtattttatacattttatattaataatatcattacatagtattaaatgagggaggaaccaacagtgtgaggtcacacgtgagtgaggatgagaagggtggaggtgtctccccttgagctggtcttcagggaggtttgggcatccacttggtgaatgaggaggaagccacattgtccaagggaccacactagggtgtgacatgccaatgagctggtgtgtgcagagaactagagggaagggagcatgttggagaggggtcaggggtggactgggggagaggatctagtcctagggaagtcataagggccaagctaaggagctagactttccccctcaggcagcagaagctggtgaagggttttaaacagggatgtgaccctcttagatttgtgtttaaatgttcactgtggccagtgtatggagaatgggttgaaaggggtgagactggagacagggagggttagcttattttaaccctcctgtaagctccctaagggtagggaccgtgtctgaggcatctatgtaccctctagaatggcgaggatgcactagagactcaaacatttcttctcattgtcaccccctgtcactgccaccaccattagctgcctcttgcttcactccatggctgtcagcacccccattaacacacgccatgccatcgatttagctcctttcccagcgctttctcagggatcccagcctggagcagactgggacatcaccagctcagcagcttaggtcaaaagtgagattcctggtctggagtcaggggacctggtcttttcttcagctctgctgctgagtcattgtgtgaccccagcaggtcccctccctgtctttagttttctgacctgttcaaagtaggagctggattaaaccagtgggtctgccagctaagtgtttggagaatcagatgagaataaaccagacattgctggtttctgctgtacttttgctgcagggaccatgattgagaattgagtgggagggtcagattgaacatttgagtcttaggtattgcatgtacctttgacaagaccttggtaactccccctcccccattccctacccctccaaaaggtaatcttaggcattgcaggtaccttggcaacatgtcccccgccattccctatccctccaaaaggtaatttaggaagctgctggaaataggggaatgggacaggcagttggaaccatatgtatggggagagtccctgagtgaagtgggaatgggatgagcctgggatcctcagagacatcaagttgcccggtgtgatcacaggtgtgtcttaggccagggcatcagctcccagcaggggagagggatgcgaggaggcctcatggctcagcagaaagaaacctggttaggatccagctttcagtcctgaatcctgggctgtcggccaggccatggctgtagctgcaaataggcaaggctgacctaaggtctcacaggacaaagggcaccctgggagagctggccccaggccccaggggcctcctcttcttagggatcctgggagctctgctgaccaaggggctaggggctcacctcctatgccatcacccagctacctcatcatggtagccttggtccctgaacactaatgggtaagccccagagccacgagccagtgacctctgaatggatggcttccccttcccccaggcaccaggcaagacaggtagaggtccctggagacctgatggctggggagggcccagtcctgggccagcccctgagggctggattctggctgcaggctctccagtccatccactcccacctccagagtccaagggtctatgtggtgggcagtttgagctggctggatactagagggaggctgcacctgaagcatttggtgggtgagcagcatgggctttgaggagctgctggagcaggtgggcggctttgggcccttccaactgcggaatgtggcactgctggccctgccccgagtgctgctaccactgcacttc

SEQ ID NO: 36240 - DNA, 2300 bp, Homo sapien
atttctcttatatacctgggtataaacctggaagtggaattgctgagtcatatggtaactctatgtttaactttttgaggaactgccagactgttgtccaatgtggccacaccattttatgttgccaccaacaatgtatgagggatccaattttgccacattcttgccaatatttgtctctttaattataaccatcctagtcagtataaaatggtatctcattgtggtcctaatttgcatttccctaatgactattgatattcagcatctcttcatgtgcttattggccatttgtgtatctctagaaaaacatctattcaaatactttgctcacttttaattgggttgtctttttgttattgcattataagttatttatataatctggttactagatccttatcagatttgcaaatatttcttccattctctggatttaaatttcttgaaatatcctttgaagcactattgaactacttttttttttttccaccagttgtcaaatgatcctttattgaaatattttcctttgtgcttaactggctgggcattccacagaaccactgttgatatcatctatgatgtcatgagggtggcggccatcaacattacagcccacagactgggcagtccccaggatctctttaatggtgccagagagtctattgaactacttttaacaaatatttatctgggcatgggggcatatacctgtaatcccagcacttagggaggcccaggcaggtggatcgcttgagcccagaaattcgagaccagcctgggcaacatggcaaaaccccatctctacaaaaaatacaaaaattagccaggtgtggtggcatgtgtctgtagtcccagctactccagaggctaaagtgagaggatcgcttgagccgggcaggtggagactgcagtgagctacgatgcaccactacattccagcctgggcaacagagaccctgcctcaaataaatacattcattaaaaacacaaatatttaaaaattttaaagcaaaccagattagaaatgtgtagttggttttcatttttatttatttatttattttgagatggagtctcgctcttgtcccccaggctggagtacagtggtgcgatctcggctcactgcaacctccacacctcccggttcatgcgattctcctgcctcagcctcccgagtagctgagattacaggcatgcgccaccacgcccagctaatttttgtatttttagtagagacgcagtttcgcctcgatggccaggctggtcttggactcctgacctcaggcgatccgcccaccttggcctcccaaagtgctgggattacaggtgtcagccactgtgtccagccaccctacagctttaggagtaaacgattgtatacagaccatgttctgaggcttccaaaccgagtcttgagttcattaagggatccatcatagtgatagctatagctgttacagcgtttacatgccaggcgctgtttgggcactctacatgtattaacctatttaactctcataacaatcctatgaggcagagactgttatcatactcattgcacagatgagaaaatggaggcagagagggaggttcagtaatttgcctgaagtcaaagagtagggtaccagagacgggctccagattttgttgctttcaaccacttgctatactgccaaggtggaattttgcatttcaaagaatgcctactccctcgctttggagagagtagtgttttaatgatgtctgcactgtggacatttttcctgtccttaccgctccagaaactagtagagctccctgtccaggtgtcttcgttacacatgtgccttcctagtctggagtccacggcttcaagatcctctctcctccccgtgggtctgaccgaggctttaatgctctttgaagtaacagcgaaatagccctttgtctcccaagtggagtggttctaaatttctgataaccaatgagcgccgaggaaccgcggattccgcccagggaggctcaaagctgagccgtgggtggagcctgcggagggggcggaactgagccgcagcggcgtacctactgtgtgccgcgtgcgctgcctggagcggagctatgagctggacctgtccgcgttgccagcaacctgttttcttcggtgaggcccgggctgcggagggggagaagatggggcgaatgggagccgctggattccctgaggacgcggagggctagccacagtgtagtcccagacacccttttcacctgcagcggctggtagtctccgcaccacccgctcccactcgggtcttctc

SEQ ID NO: 36241 - DNA, 2300 bp, Homo sapien
aaaatagagcatagcaatatacgatgtagcaatctcactactaggtaaccacaaaaactaaaaattattattttttgagactgagtctcactctgttgcccaggctggagtgcaatggtgtgatctcagctcactgcaacttccgcccaggttcaagcaattcttgtgcctcagcctcccgagtagctgggattacaagcgtgcaccaccatgcctggctaatttttgtatttttagtagagacaggatttcaccatgttggccaggctggtctcgaactcctgacctcaagcgatccacccacctcagcttcccaaagtgctgggattacaggcgtgaaccatcgcgtccggcttcatttcttttttaaataatttttaggccaggcacggtggctcacacatgtaatctcagcactttgggaggccgaggcacatggatcacttgaggtcaggaggagttcgagaccagcctggccaacatggtgaaaccccgtctctactaaaaatacaaaaattagctgggcgtggtggcgcgcacctgtagtcccagctactcaggaggctgagacaggagaattacctgaacccaggaggcagaggttgcagtgagtcgagaacgcaccactgcactccagcctgggcaacagagcgagactctgtctcaaaaaaaaaaaaaaaaaagaaaagaaaaaaaaaaaacaagaaatgagaggcagaaacaagacaggaaaattcagtggaagctaaaactaatatttttcaaatttgttaaagaagaagcctttcaagaaacagttataaaactaagcatcttgaaatattccctgaaacaagaaacaaataatgagaaagtgtagaaaaattacagtgtggaaggcttctacccttagaacttaagaatgataaaacaagtgttataagtaaaaaggattgatggagacaattcaggaacaggaatatccagtggaagttcatagaccccagtccctaccccattacccagatgaaggaactgatgtcccaagaggagacacttaagacagtgcgcctttcacctagcagagcacagcactgcagtccattgatgaatttggtgcaagcccttcctcaacggatttgatgtaacaaaggaacttactcaagaaaactcggtttcacttccatccttcatagagggattgattattgtctcctctgctgggacactggcacaagtttatcagctcttccctccagctcttcattggctacctttccccccagtccccctgcctttttttttttttttttttgagacagtctcactctgttgcccaggctggagtgcagtggcgtgatctcagctcactacagcctcaacttcccgggctcaggtgattctctcacctcagcctcgcaggcacatgccaccaagcccagctgattttttgtagagatgaggttcgccatgttgcccaggctggtctctaactcctaggctcaagtggtccacctgcctcagcttcccaaagtgctgggaccaggcgtaagccaccacttctggccgccttttttctttagttttcttcaggttctattgttgttgttgttgttgttgttaagacattacgcatataccataaaattcgcctttttaaagtctacagttcatgctttttagtatatttccaaggttgtacaaacattactgctatctaattccagaacatttttatcttcccatagagaagcttcgaacccattagtggacatttccaattccatctccttgactggccaaccactaatctactgtctgtctctgtggatttacctattctaaatatttcatatgaattgattcatatgatatgtggcctcttgtgtcttgcttttcttacttaatgtttttatggtttacctgtgttgtaacatgcatcagtattacattcttttttacagttgagcaatattctatcatacagatatactacatattgtttatccattatcagttaatgaacttttgggctgtttctaccttttgactattgtaaatagtcctgctatgaacattcatgtacaagtttttgtatagacatatgttttcatttctcttatatacctgggtataaacctggaagtggaattgctgagtcatatggtaactctatgtttaactttttgaggaactgccagactgttgtccaatgtggccacaccattttatgttgccaccaacaatgtatgagggatccaattttgccacattcttgccaatatttgtctctttaattataaccatcctagtcagtataa

SEQ ID NO: 36242 - DNA, 2300 bp, Homo sapien
taacagaaataagtgaggtagtttcttttacatatatatatatgtatatatgtatatagttttatatatactatatatagtatagtttcttttatatatataatatagataatatatatataaacatatataggcaagctttgttgatatattaatatatatccctaaaccttggttctcaccttaacaaagcttacatactaaatctaggataagaacctaaacaaagtcttcatttattaacgatttatgtgagaacatggacaaatagttttgtgagcacatctctttagagtttaaaattgcagtaatttttatgtaatttttaactaagttgtgtatacaatattcatcgataagccacgaagttgaatttataatgaaaatcttctactcttaaaatcacaactctcctgatttgccctcaacccatatacacttccagaagaatacatataaaacatgtatgtttatgttgtagcatttaatgtggttgtaattttacatttatgtttctttgattaatatatgctccccttaagtacatgataaactccccaaagcaagaagtctgtctttgcttactatttttttaatcattgtattcacagtgcacagttgtctggcatatagcaggtactcaataaaaattcattgaaagaatcaatgtggtaatagtagctgtttttattaacaaattgtgaatacttagcaaattataagtcagtaaaaactgtaaattgcctattgtattttctgggtgtttagcactctagaagccagctgtcctcttgcttctgtcctgggtctttgtatacaaagcactgtatcattgaggcatgtcaaggttgccattggttccctcacttcaacagcattctggaataatggcaccaggccatgatgggaacactgcttctgcagctcctagaagagaaactgaggatgagaaggagttaaactgaccttacagttagcaaaaacaaaaggttttggggatccagttttcaaatggcctcctttttccttccagccagacttcataagcatgctgaagtcagtcaaaccccaaacccctctgatttggttgaagaagtaattcaacagtttatggtctccagcatcctcttgtcatctcatcaaaactaaatcgtaaccaaaaaaggttgcctttgggagagggaaaaggaatgctatcactttttattttgtatcttctgttttgtttcaacattgtgaccatgaaaatgcattttctataaaatataaatgttttataaactatacacatgcacacacatacatgtataaaatgataacatgtagtaagggttatccagtgctgtggaattataggccagttttttttttacccctctgtatacttttctgtattaaaattattttttttaagttgtgtctctcctactcagtgcatccctgttttccttcacacctcttgtctgttttccatcattacaaataggtcctgctgcttttccctcaagacttcctaaattcttctattcccatcgatgctgggcaacataccttcttcaggaatgtcttaccattctttccttcttcctctcttcctcttcccattctttccccaacctctgttgaactggttgttcatattcattaatgttgtacaagcacttggacattaaatgatataaatcaagatacctgtttcacaaagtaatacaggtacacaaaagataaaaaaagtctgtcgcatgcaaaaggacagaagataacatctagatgtaatgatttaaagatttacaggctttggttccatttgtggaggattaggcaagaaagaagttttgtagaaaataagggaaatgagtatgtttaagggaagtgaacgaacagggtgaaaacagaggcagagttacataacgggagaacaaaaggtagaggatgtggagaaagcagagataaaatcagccatattaagatattattttatttcgtctctctgacactctgtccctgctaagtttccacccagccttcctgtaaccaccttcctaaggatgactatggtcacattgttacagactctcacccacttatcttcctttcttttcaggggcaattccaaaagtcttcagatttccaaaaggaaggactgcagcagacatttctgcccccagaaaggcagggatagaaaccacagaggccacggaaatgatgggtgcccttgtggccagtaggcaatcacctgaaggatctgacttccagaaggtgggtatgactgatgggggtggggataagttgtagagaag

SEQ ID NO: 36243 - DNA, 2300 bp, Homo sapien
tgctgattttcagtcctgttcacttagttccacttccctttagggggagactgatggttttagagaaagagttgggaggaggtaaccatatcaagatcccaatcctaaccttacttcctcagagggcattgaaatcttaccctgtaggttaggagggggctacttgagtgagaagagaaaaagaggcaaaatttattgtaggaagggcagaactagttcaggtagctagggctggagtactttgagcctaagctttggtagtaactcctcttgtattctctggataacttcaggatttacaccaaaggcatctaccaatccggctttttcaaaaataatgctcacttaagagttacgggagtgacattctttatatcttccttgaaccagcagagggagaactttgaggattctgtattctgggcaggaagtgttgctgcctccttccttttggttagtgggatctagctttggaacctatccagagaagacaggtgaaaggaaggacagaattctaacccagtagctggagatagagcatatttttttgttgttctctactatcacagtactgaataaactttcaacttaggagacttaggcacatggaagaaatgggccctgaattttaaatgcagcttatggtgtaatataactatgttttaaattttacaaacatcaggaacaacttttatcagatatcctcaattgtgagaagcagatgatcagcaattatgtttaaatttgggcaaatacctaattttacctaaggtgtataacccgctaaaaattccccctggccttgcaaatggggggcttcctgctttacaagccatattatattcacagggcacataatattctgctaatattgctgaataatatagttaagtattacttcgcccatgacacttcatctttctaaaaagtcagaaagttagtattttggtagcagagcatgccagcacatagtcaatttatcagtctgccagattccaggactgaggaagaatggggtggggaggtggacatacaggacacatgcatccaataggaacataaagtgtaattttaaaaattggaggagggttcagagaggatgtagcctgtaacagaaataagtgaggtagtttcttttacatatatatatatgtatatatgtatatagttttatatatactatatatagtatagtttcttttatatatataatatagataatatatatataaacatatataggcaagctttgttgatatattaatatatatccctaaaccttggttctcaccttaacaaagcttacatactaaatctaggataagaacctaaacaaagtcttcatttattaacgatttatgtgagaacatggacaaatagttttgtgagcacatctctttagagtttaaaattgcagtaatttttatgtaatttttaactaagttgtgtatacaatattcatcgataagccacgaagttgaatttataatgaaaatcttctactcttaaaatcacaactctcctgatttgccctcaacccatatacacttccagaagaatacatataaaacatgtatgtttatgttgtagcatttaatgtggttgtaattttacatttatgtttctttgattaatatatgctccccttaagtacatgataaactccccaaagcaagaagtctgtctttgcttactatttttttaatcattgtattcacagtgcacagttgtctggcatatagcaggtactcaataaaaattcattgaaagaatcaatgtggtaatagtagctgtttttattaacaaattgtgaatacttagcaaattataagtcagtaaaaactgtaaattgcctattgtattttctgggtgtttagcactctagaagccagctgtcctcttgcttctgtcctgggtctttgtatacaaagcactgtatcattgaggcatgtcaaggttgccattggttccctcacttcaacagcattctggaataatggcaccaggccatgatgggaacactgcttctgcagctcctagaagagaaactgaggatgagaaggagttaaactgaccttacagttagcaaaaacaaaaggttttggggatccagttttcaaatggcctcctttttccttccagccagacttcataagcatgctgaagtcagtcaaaccccaaacccctctgatttggttgaagaagtaattcaacagtttatggtctccagcatcctcttgtcatctcatcaaaactaaatcgtaaccaaaaaaggttgcctttgggagagggaaaaggaa

SEQ ID NO: 36244 - DNA, 2300 bp, Homo sapien
atgccctaagtctagtcggagaaattacccaagagatctatctagatatgttggtaatattacctcttggttagaggctaaagctgcttgttcccctggggaaagggagaggaaatgttcttggacttcatgattatagtcttttgccctaagcattttatagcccccttgacaaacaccagtctcttagccttgtctgctcttattctttccaagtccatttgttcaatgatgcttctctttttcctcagggatgacctgactgatgattctgtcttcactcgaagctcccagtgctctcggggtcttgagcgatatatttcccaggaggaagggcctctcagtcccttcttgggacaacttgatgaggactaccgaacaaaagaaactttcctgcatcgatctgattatagtccccatatcagttgtcatgatgagctgttgcggggaacagaacggaatcgagaaaaactcaaaggctactccatacgatctgaagaaaggagccgggaggccaaaagaccccgttatgatgacacagtgaagataaacagcatgggaggggatcacccaagttttacatcaggaactcgcaactatcgacagcgtagaagaagcccaagtcctaggtttctcgaccctgagtttcgagaactggatcttgccagacgaaagcgagaggaagaggaggagcgaagtaggagcttgagtcaggagctggttggagttgatggtggtggtactggctgttccatccctggattgtcaggtgtcctaacagcatcggagccaggatattctttgcatcggcctgaggaagtatctgtgatgcccaagaaatccattttgaagaagcggattgaggtggacataatggagccctccatgcaggtctctgctgcatttcttgtagggcctcttgctagtctccctaatatcttaaagcctgcttactttcctgtgggctatgttcctaatggtatctttgtaatatgtgctggaccgacattgtgagctacaccttctaggactctccaaacgaaactgtaggccttttaatgcatcagtagagggttctattgctgtatattaggctttatattaataaatagatattttggagagtactgtaagtttttttacttaaattggattatcctttggcaatctttgagtatgggtttgttggaaatgaaccttgaagggcaaggggaggaggtgatctcaattttctcatctctctttagagagaagacaagatgtatgagttgtaggacactggactagaaatcagatgattctgattttggacccacttctgccaccaacttactgtgatttttagacaagtcacctcaccattctgagccttgatatttttccctgacctgtgaaaggatggtcagaccactagtggaaagaccactagtttttagctgtcctcttaggagataaaggcttctgaagaggttcccaagcaaaggaatgctgatgagttagcgttccagagtttcctctccccacttcagccaaagcagctttttttttccttttcttttggggatccatagaaaagaaaacaagctaggggatctctaaaattcttttgaattcaaattccttttaacaaatagataaaggtgaggattccatccagtttgcctcacttcctgtttctcctcaacagtagaaacatctggagataaggggattcacattttgaatctggctaaggatacttttcctcccttttatccatacttgtatctcacctgttaattcaggaagaccaaagtatttaagtatttatctcaattactaatgttctgagattctgcataagactaaatcagttgtgtttgtctttgcagcttgagagtttttccagcagtaccagctccagccaggatcaccctctctactctgggcacccatcccttccactaagtggtgctattgctgcttttgcctcagagattgaaaacaaggggactatggtagagactgccttgaaggaacctcagggcaacctctaccaatggggtccccttcctgggattcccaaagacaacagtcctctcagagaaaaatttggaagttttctatgccacaaggataatttggatttgaaggctgagggacctgagcgacacacagacttcctgctgccccatgagagagctagccaggatggcagtggtttttcccgcattctgagcatgttggctgattctaccagtacacaggaaaaaaggcgacgtagctttcccgacattgaagatgaggagaaatttctctat

SEQ ID NO: 36245 - DNA, 2300 bp, Homo sapien
atatattttctactgcaatatgactactgtcatgactgaaaaatacttgaaaagtgaaaggatctgcaagagatttcatgcaggatacagaactatgcatagagcaagtgtgaaggggaagcagaagagttttctgattatacaccgtgtctccccctgtcttgaaacaccccagctcctttgataaaaatattcagtattagaaatgggttgaggagtaaaagttgatacagaatataacaaacatgatttaaaatttattgactccaagtatctatacacactgatttacatttttttcacatttattaagtcccaccaaaagtatgggtaaccaaaatccatatatactctaataaagacagggcatacacctctggcatatttttattatttttttcattaaaatgttattggtttcttattttatataaattatataaaatgtgaagctgggtaaaagtagtcaactagtaaaaattttatacatttttactgagtatatgccattataagaacgtatggaaatggatatatatatatatggatgtattttttgagagagggtctcactctgtcacccaggctggagtgcagtggcatgatcacagctcaccgcagcctcaacctcccgagtagctggggtacaggaacgtgccaccacactcggcaaattttttttttttttttttagaaatggaggtccttctacgttgcccaggctggtctcgaactctcaggctcaagcaatcctcctgccccggcctcccaaaatggtgggattataggcgtgaccctttgcgcctggcccacttttgtatttaggatgcagggccctgagattggcatctaggaaaattctggacttaggccaggggagggggcatgcctggatctcttacaaaaacttgccacgcctccagttggtcatgatgtgggcccctggtaatgaaggacctccaccatgaccacaagtactttagtcagaaaacagctcgaaaacgtgtgaagagagtccaccaaacaggcttcgtgtgagcaacaaggctgtttatcttacctgggtgcaggcgggttgagtccgaaaaaggagtcagcagagggtggtggaattatcattagttcttataggtttgggataggtgtacaaagtacattcttaagggcgggggagaatattacaaagcacctacttaagggcaagggggagaatatatcctgtcagttagggtggggcaggaacaaatcacaatggtggaatgtcatcagttaaggctattttcacttcttttgtggctcttcagttgcctcaggccatctggatgtatacgtgcaggtcataggggatatgatggcttagcttgggctcagaggcctgacaacgtctattttgggtttgattctggcccaccacctccacctcgtactttcctatcctcaatttcaacctctagaaattaggcaaactggaaagtaaactgatgcgggtcgtgttgcttcagctggggacaggatttcggtgggcgctcctgccggggtccgtaacctcccacacagctaacgtttacaggcccgtttatattatcacgaatggttttcaaccatttcgtgtccatccctaaattaagaggcttgaggggcggcacgaaagagcgaagacacctccgcacggtctccaaacccctaagtccagaggcctggagcatccccggaaaaccagatccctctccagagaagcccttccttccgctccgcccaccccgcgcggaggccacaggggtcacgtggcggccgcgggagggggaagtgggcggctctgcggccgccatcttgaggattcggaggcggggcgtgcagagctcagggcgcgcgcttcgcttcccctcccctcgcccagcctcgcgccggcgtctgtgctcctccccacttttcttggttcctgcggccgctccctgagtggaggagcggggaaccccggaggcgggggggggtgtgtcggacgcgtgctcgcgccctccaaccgccagccgcgggggcgcgctcggccgggcccccggggcgacgcggggccgaggggagggggctgctcccgcggctgaggcggcgcgcagcggccgaggtggcggcggctgcagctgcggcggcgcgctccgagcctgcgtctagggcgcccccgggtcagagctgtcgccgtggccgccgctgcaagaaccatgtaccgcagcagcgctcgctcctccgtctcttcccaccggcctaaagacgacggcgggggcggcccgcgcagcggccgcagctct

SEQ ID NO: 36246 - DNA, 2300 bp, Homo sapien
atgagcccctctgcccggccgccaccccatctgggaggtgtacccaacagctcattgagaacgggccatgatgacgatggtggttttgtcgaatagaaaagggggaaatgtggggaaaagatagagaaatcagattgttgctgtgtctgtgtagaaagaagtagacataggagactccattttgttctgtactaagaaaaattcttctgccttggaatgctgttaatatatgaccttacccccaaccccctgctctctgaaacatgtgctgtgtccgctgagggttaaatggattaagggcggtgcaagtgctttgttaaacagatgcttgatggcagcatgctcgttaagagtcatcaccactccctaatctcaagtacccagggacacaaacactgcggaaggccgcagggtcctctgcctaggaaaaccagagacctttgttcacttgtttatctgctgaccttccctccactattgtcttatgaccctgccaaatccccttctgcgagaaacacccaagaatgatcaataaaaataaataaataaataaataaaaaactgtgattcatgggattcatgggaggaggacaacgtatatcaacattaacagaagtttggaagaagctgattccaaccttcacggatggaccttcaagacatcagtggaggaagtaactgcagatgtgatggaaacagcaagtgaattagaattagaagtggagcctggccaggtgcagtggctcacacctataatcccagcactttgggaggccaaggcaagcgcatcacctgaggccaggagttcaagaccagcctgggccaggtagcaagactctgttaattaattactaaagattgtgaaatgcaaacctacatctcttagtttttaaaaataggaaaattaattcttgacgttgagggatatggggcttcttactgagattaagtgggataaccataattgtcatttgtttagcttttcttcttcaagcactgtacacacctatgtaaaggcggataccaacaccatgcctgacaaacataataaaataaagatgcagaagtaacctgcccaacatccctctgctaaaagcattcaaacccaggtccgtataattataaaggttatgttcttcccactgcttccttaaaagatttattggaggactaccctaggcaaagcacttgccctaagcactctaaattaattattcaactctctcaacagtactttagtattggtattgtccctgttgtacaaataaagaagttgaggctcggccggggtggtggctcacgcctgtaatcccggctcttcggaaggccaaggcggacggatcacgaggtcaggagatcgagaccatccttgccaacatggtgaaaccccgtctctactaaaaatacgaacaaaaaaattggctgggcgtggttgcgcgcgcctgtagtcccagctactcgggaggctgaggcaggagaatcgctttaacccgggaggcggaggttgcagtgaaccgagattgtgccactgcactccagcctggtgacagagcgagactccgtcccccccccaaaaaaaagttgaggctcaaaaaagttaggtaacttgtccaaggtcatgcagccctagaataataagggaaaacagtgtgtcccaaaatggcattatttgtccgtggggcaggtatgtttgaatttccatccatccatctatctatctgagactggggtctcgctatgctgcttggactgttctcgaactcctgggctcaggccatcctcctgggatctaccggcgcgcagagactacgggcgcgcagggactaccgaggcgcgcaaccgtgcccggctccccacctcttcaagaaatggagattgcaatgcttgtgccaactagtaagcttacacagttgtgagcgaatactccacgtgagaggttataaatgacgttgcactaagggagggatggatccttaacgcaagtcaggccacaaaagcgtaccaaaacgcaactgtgcgtctgcaccagcgcgcctgcgtgcaaaggccagccgaagcagagagcagtgcacatgcgtgcagctaccagcatatgggcgtggcgaatagcgccggctaggtcttccaacctctaggtggggtgccagccggggcgggcccagcaccccggccgggcagtactttttttttttttgcatacaccagttctcaggatatcggaatccggtgcacagcagcttcttcaggtttgaggttccggatgcctgggggcggagaaacgggaggggaaaaacagatgg

SEQ ID NO: 36247 - DNA, 2300 bp, Homo sapien
tgccagcactgtaggaggccaggagttcgagaccagcctgccaacgtggcagaatgccatctctactaaaaatacaaaaaattggccgggcccagtggctcatgcctgtaatcccagcactttgggaggctgagacaggcagatcactggaggtcaggagtttgaaaccagcctggtcaacatggtgaaaccccatcttgaatcgcttgaacccaggaggcagaggttgtggtgcgccaagattgcaccactgcactccagcctggacgacaaagcgagactctgtctcaaaaagaaaaaattatttttagtagagacaaggccttgctttgttgtccaggctggtcttgaactcttgggctcaagcaatccttctgcctcagcctcctaaagttctgggtttacaaatgtgagccaccatgcccagccagaaatagaaaaaaattttttttttctttgagacagggtcttactctgtcacccaggctggagagcagtggcacgatctcggcccactgcaacctccacctcttgggttcaagcgattctcctgccttagcctccagagtagctgagactacaggcatgtgccaccatgcctggccagttttcgtatttttactagagatggagtttcactgtgttacacaggctggtcttgaactcctggcctcaagtgatccacctgcctctgcctcccaaagtgctgggattacaggcttgagccaccatgcccagcccagaaatagaattcttaaaggctgattttttattcccatctaaatccctacaaataactgtcatcaggtggacttttaagaaaacccccagctactcgggaggctgaggcaggggaatcgcttgaacctgggaggcggaggttgcagcgagctgagatcacgccattgcgctccagcctggcgacagagcaagactctgcattttagcttacaagtaaacttttttagtaacctagccgtgccacaaagggtgtaacagactcagtcctctttttgtatgaactttcaagacatcctgatactcactgctgcagatacgttttcctgtatttgattcttttttttttttttggacagagtctctctttgtcacccaggctggagtacagtggcacgatctcagctcactgcaacctccgcctcccaggttcaagcgattctcgtgcctcagtgtcccaaagtagctgggattacaggtgtgtgccaccattccctgctaatttttgtatttttattagagaccgggttttaccatgttggccaggctggtctcaaactgctgatctcaagtgatctgcctgcttcagcctcccaaagtgctgggattacgggcataagccactgtgaccagcccctgtatttgattcttaatgcagacagatcaccttttgtttattaaaaacatttttttatgccaagaagatataaacacaagcaaaaagagatatttttctttagctaaaggagtcgcaaaagcaatccacaccaccttctataatcagtggaaagagagtagaatattccaagcctttataaagtttaggctaccatattagaatataaaagctgtatgtaagtccgatttttattcatttaatagtgcttcaggtgaatttaagggtactgttaggtggatccttttgtaaaaatgaatatgtaccctttatcagttatctgcatgaaaactttggattttcttttttttcctgagacggagtcttcccctgtcacccaggctggagtgcattggcgtgatctcagctcactgcaacctccatctcccagattcaagcgattctcctgcctcagcctcctgagtagctgggattgcaggtgcctgccaccatgcctggctaatttttgcatttttggtaaagatgggggtttcaccatgttggccaggctggtctcgaactcctaacctcaggcgatcctcccgtctcagcctcccaaagtgctaggattacaggcgtgagccacggcgcccagcctggattttttttaaaattttagattcatgaggcatatgtgcttgtttgttattatacatggatatattatgtgatgctgaagtttgggcttctaatgatcccatcaccaaagtagcaaacgtagtacccaggattttttttttcctagttagtcttcatgttaagtacaatcttacctcaaaattgttaatgtctgtggtttaaaaaaaaacatgaatcagaaatggtgtgggtagtttagaaaatgagttaggttcaggtggccggttagctcagttggtcagaaaat

SEQ ID NO: 36248 - DNA, 2300 bp, Homo sapien
aggaagtcatctgtctggctccaaacaggtctttagggccagagctgggacccaagtctccaacctccttatctagggcacagaccaccccatggctgcatgtagagacctaggagaacctcagctgcctctttgggtaggctgaggggaagggaataggtcactttcctgcctgggtcaactccaggtgtttagggtttggctgaatctgcagagctctgggttctgcagtgattgtgggtaccttcacaaaggggatggcagtcctgggggttcatacagcatagttgtcgacccttagtggaacagctcagagtgctcctggagggaagggaggttgatagatggttatggcatgaggcattttcccctacctgtgacagctacagacgaggagttttggcccttgcccatcttccctgggcccattagcctgtttgaccctgggctgtagtgtggcctcttatgcctgtgtacttctacaggaatagtttctgtgccactcaagccgggggccggaactggggggccagcccccgaagcccacatcttttggttttgggagatagccctttgtccctcatctaatgggaggagagcttttactccactgtggtgacctggctccaccttccaccactcctcctaggaaggtggggaattcccactccaagctgtccccagctggagcaaatggagaagtaagagactgggaggggaagcaacccagggctgaaaaggatttgaagggcaggatttccagaaagtactgaggtgaggaagaaaaccaagactagggcagtgcagagtatctgggagcttagagtactgaacattctgccagcagcctggggaaggcttggcagggaagacacatgagcagtgcctccacttcacgcctctcccttgtctcctttccctagcttgtgacagagctgctgagtggcattcgggtcatcaagttctgcgggtgggagcaggcactgggagcccgagtagaggcctgccgggctcgagagctggggcgactccgggtcatcaaatacctggatgcggcctgtgtatacctgtgggctgccctaccggttgtcatctccatcgttatcttcatcacctatgtcctcatggggcaccagctcactgccaccaaggtgaggaccaggaaggaaggggaccagcatcaaggagacttcagcgaagtgaagacagaggcttgggccctcagtgctggctgagaaggagggagggatccctgactgcctcatctctcaaccaagggaaaactgaagaaacctttttgtgggggccttggatatataaccctcccctctgtgaaggagttcctttctttcctctcctctacctttcactccagcttctattcagttccaggcttggggttaggtctcttcatcctcgttctaatggccttaggaaaaaaatgtatgatgcaatcctgggtctagccaaggccaggtgatgttgctacttggaaattctaaaaaaaagactcaaaatgagctaggcctgcctagttaaaaagatgcaaccttggccaggcgtggtggctcacacctgtaattccagcactttgggaggccaaggcaggcggatcacctgatgtcaggagttcgagaccagcctgaccaacatggtgaaaccttgtctctactaaaaatataaaaattaaccaggtgtggtgatgcatgcctgtgatcccagctactcaggaggctagggtaggagaatcacttgaaccctggaggtggaagttgcagtgagccgagattatgccactgcactccagcttaggtgacagagcaagactcgtcaagaaaaaaaaaaatgcaacctgaatcccttgaggaacattggaatttctaggattctttaagtgaccatctctgccacatctgatcccaggattggccagccagcccttcagttctgtcattgcccagttcttccctccgtagacctgtccacagggcttcccatagaaacaggcccttagataactcctggggcttcaccctgcacccacctcactcaggtgttcacggccctggcactggtgcgaatgctcattcttcctctcaacaacttcccttgggtgatcaatggtctcctggaggccaaagtgtccttggaccggatccagcttttcctcgaccttccaaaccacaacccccaggcctactacagcccaggtaatgggaagctagtgggcagaacctggcacagggtgaggagggaagtggagccacttgggtgctgcgcatagatgtcaccaagagggc

SEQ ID NO: 36249 - DNA, 2300 bp, Homo sapien
atcctcttctctctgcttctcatgcaaggtgagagcgtgcctgggagtctcttacatcgtaacggctgtgctgtctaggtgcccattaccttgcactaatcattacaaagcccagagactcaccaagcatgggtcacagctgggacaaaagccatactcctaattctgagagatgcccaggggccagaggcatgtgctctatagctggcttctgttctgccccctaggttagctcccattctgcaagtctgagatcctgttctccccagagctgaagggtgacgggcctatgagagaagcccacactagggaggatatggggtagtggcagggtggggaggccaggccaggcggatggagatgggcaggaaccagaggcaagggcggagaaagggggcattggaatagaatgaacaagggagaggagcctcttacagctttttccttcctgtccccacccagccacgcggaacgctgctgactggtggctctcccactggatctctcagctgaaggctgagaatagctcccaggaggcgcaaccctccaccagcccagcttctatggggctcttctctccgcagctgctcctcttttcccctggaaacctctagtgagtggctggggctgggggtaggcctggtgctctcagagtggtcgccaggcagggagtgagggttgtggccggtattccagatgctgtgacttctggagggtgggagagatggcatgggggaggagaaaggacccccgagtggccctagttttggttaccgacagccccctcctcaccacccagcatcccagtgttcccactgcccaaagctgcccccaatggctcctcagacatccgtttctacctcaccgtgtatgcgaccattgctggtgtaaattccctctgcacccttctccgggcagtgctctttgcagcaggcacccttcaagcagctgccactctgcatcgccgcctgctgcatcgagtccttatggtgaggggctgggacctcgggggtaggggagtgcagtcctagcccctgtggagtgtcctcccaatactcgggctccactggggatgggagagtctttcctgccctgggatattcttcctcaacctctgccaatctctcttctctgcccccaaattctggggatattttagtccttccctattctctatcttgggccttcccctccaccccacctcccccagtgctgcctgccaacccctcttctgccagactctgccctggcccaatcagcgtccttctcccaggcaccagtgactttcttcaatgccacacccacgggccggatcctaaaccgcttctcctctgatgtggcctgtgcggatgacagcctgcccttcatcctcaacatcctcctggccaacgcggcaggcctgctggggctcctggccgtgctgggctctggcctgccctggctgctgctcctgctgccgcctttgagcatcatgtactatcacgtgcagcgccactacagggcctcctcacgggagctgcggcgcctgggcagcctcaccctgtctccactgtatagccatctggccgataccttggctggcctctctgtgctccgggccacaggggccacctacaggtgtgtgaaccagagcccagggggatgaggtgttggggggagaggaaaagagagacccccaagaagaggaatatgcagggtatggttggttcagccctcctggggacaagggatggggaaggaggaaagcaacagaagaaggagatagggaggcagagtggacccccactttgaaagagcacactggcatctgcagccctgagggaggcctgtgggtatacagaccagctcccaagaaggagctgctcaataagggccttccctgttgaggccctgaggctgggtggctcagggcaacagtggagtggcttcacatccctctggccttccctaggtttgaggaggagaacctgcgactccttgagctaaaccagaggtgccagtttgccaccagtgccacaatgcagtggctggacattcggctacagctcatgggggcggcagtggtcagcgctatcgcaggcatcgctctggtgcagcaccagcagggcctcgctaacccaggtgccacccaggacccctcacccctacctcatccacaagttagtccaccgctctcccagatctctccctgcaccatccccccaacattttcacctcccacccagggttccctgtgaggatgtatcatgattatcatcatcacccccgtttggagttgaggagacaatccccaggaggga

SEQ ID NO: 36250 - DNA, 2300 bp, Homo sapien
tgtaatcccagcactttgggaggtcgaggcgggcggatcacgaggtcaggaaatcaagaccatcctggctaccatggtgaaaccccgtctttactaaaaatacaaaaaaaaattagccgggcggggtggtgggcgcctgtagtcccagctacttgggacgttgaggcaggagaatggcgtgaacctgggaggcggagcttgcagagagccgagatagcgccactgcactccagcttgggccacaaagcgagactccgtctcaaaaaaaaaaaaaaaaaaaaaaaaaaaagtgttaatgctgaaaagtattaataagaaaaaaaaaaaaacctctataattcgatcatccagagaaaagcactgccaatgtcaaagtacgttcttctttgtttccggcttccccccaccgcactttacatattcttagcttttttggacatctttagacgtcaaaaaaaaaaaaaagtatttttaacagtcacatagtgttgatgtgccataatttatttgcctacagtaatttttgaattataggttgtttgcaatttttcaccaaaaaaaaaaatgtgtttaaacaaaatgaatggtacagccatgtcattactcaaattcagagagctcttcagggaagaggcgatcacagctgagaggaggccagctagggagctgagtgggtgtaagtgttatatccaatggagactgcaggaaaaatgagccctggggctctgtgcctgtggaggtggctgtgtgaaggtgggaagctgctctgccccgactagcgactgctccttccgatgttttgaatttaaagatggtgaaatctcaatctgaaggactagagatgggcgctagcgttcctgacctctgccctgttgtcctgcacaaactagaaattatgttctgggtccttgtctttttttgggggggggcgggggtcggagttttgctctgtcccccaagctggagtgcagtggcgcgatcttggctaactgcaacgtctgcctcccgggttttcaagcgattttcctgcctcagccttccgagtagctgggattacaggcgcgcaccaccacgcctggctaatttctgtatttttaatagagacgggtttcaccatgttggccaggctggtctcgaactcctgacctcaggtgatccgcccgcctcagcctcccaaagtgctggaattataggcgtgagcccaccgagcttggctgggtccttgtcttgaaatgtgtctctgagccattagccagaagggggcaaagaggcctggagggcagctttcccccactccccctccgttactctctgaatctgagctccaggtttgggcagttgaggtttagcctgaggccaaggacgaacgtgatggggtacaggagaagacttggcggtggagggggttttgtgtgcacatttacagagtcaggggcattcccagtccagaaaggattctcagaggcagtcacaaaaaggaatggggtggaagggctgagacttgagggagggaagggtggtgggggtagggccggggtgtggttgggtggatcgggttgatatttatatagggataggttgatcttggaaggctggagacggcaacgtggacaggaagaagcggagggcgaggaggagcagaggagcacacagatgaagcaggtgatgaaggctttacaagcggggaggcgtgggctggtgacaggcggagggcggggagcgattgcctgcgtgtgcatagatctatatgagaagcgtgatgagcggcggacaagcgaaggcagggctggggcgtgggccgcggagcgctggtcgggaaagtgggcatgggagatgagagaataacggggttgcgctcctttggcttaatagtttgctcccattgagactcctaagatttcctcctctcttggaaggaagctgggttcggggcgttgggtagccgcggagggccggggccccggggcgcgccgggtgctaggtgtgcgccgtgcgtcgcggggggggggatgggggtgggggcgggctccgcccctggcagggggcctgagcgcgcgcgaggagcagccgctgccgccgctcggggtcgcctggagccccagattcccgagcgctcggctcgcatggcagccgcttcggcgcccggccccgcggccagctaggggcggccccgcgctccctcacggcccctcggcggcgcccgtcggatccggcctctctctgcgccccggggcgcgccacctccccgccggaggtgaggactgcggggacagggcgcggtggggattccaggccccgcg

SEQ ID NO: 36251 - DNA, 2300 bp, Homo sapien
tggagccattgcacttcagcctgggtgacagagcgagaccctgtctcaaaaaaaaaaaaaaaaaaaaagagttaattaaacaaacagaattttaaaaaaatttattgaatacctactatgccaggcattgttttagacactggggatgctgtgatgagcaagaaaacatcccagacctctggagtttgctttgtagtggggagatggtcaataaacaataaatatttaatataatgtcagataatgatatctgacagagaaaagcactgaaagtctcgagaaaaaaaaattagctgggcgtggtggcgctgtgcctgcaattccagctatactggaggctgagacgaggttgtactgagctgaggttgcactactgcactccagcctgggcgacagagtgataatctcaaggaaaaacaaacaaacaacaacaaaaaacaagttatagatgttcattgtttaaaaaaaaaaaaaaaggggcgggcgcggtggctcacgcctgtaatcccagcactttgggaggtcgaggcgggcggatcacgaggtcaggaaatcaagaccatcctggctaccatggtgaaaccccgtctttactaaaaatacaaaaaaaaattagccgggcggggtggtgggcgcctgtagtcccagctacttgggacgttgaggcaggagaatggcgtgaacctgggaggcggagcttgcagagagccgagatagcgccactgcactccagcttgggccacaaagcgagactccgtctcaaaaaaaaaaaaaaaaaaaaaaaaaaaagtgttaatgctgaaaagtattaataagaaaaaaaaaaaaacctctataattcgatcatccagagaaaagcactgccaatgtcaaagtacgttcttctttgtttccggcttccccccaccgcactttacatattcttagcttttttggacatctttagacgtcaaaaaaaaaaaaaagtatttttaacagtcacatagtgttgatgtgccataatttatttgcctacagtaatttttgaattataggttgtttgcaatttttcaccaaaaaaaaaaatgtgtttaaacaaaatgaatggtacagccatgtcattactcaaattcagagagctcttcagggaagaggcgatcacagctgagaggaggccagctagggagctgagtgggtgtaagtgttatatccaatggagactgcaggaaaaatgagccctggggctctgtgcctgtggaggtggctgtgtgaaggtgggaagctgctctgccccgactagcgactgctccttccgatgttttgaatttaaagatggtgaaatctcaatctgaaggactagagatgggcgctagcgttcctgacctctgccctgttgtcctgcacaaactagaaattatgttctgggtccttgtctttttttgggggggggcgggggtcggagttttgctctgtcccccaagctggagtgcagtggcgcgatcttggctaactgcaacgtctgcctcccgggttttcaagcgattttcctgcctcagccttccgagtagctgggattacaggcgcgcaccaccacgcctggctaatttctgtatttttaatagagacgggtttcaccatgttggccaggctggtctcgaactcctgacctcaggtgatccgcccgcctcagcctcccaaagtgctggaattataggcgtgagcccaccgagcttggctgggtccttgtcttgaaatgtgtctctgagccattagccagaagggggcaaagaggcctggagggcagctttcccccactccccctccgttactctctgaatctgagctccaggtttgggcagttgaggtttagcctgaggccaaggacgaacgtgatggggtacaggagaagacttggcggtggagggggttttgtgtgcacatttacagagtcaggggcattcccagtccagaaaggattctcagaggcagtcacaaaaaggaatggggtggaagggctgagacttgagggagggaagggtggtgggggtagggccggggtgtggttgggtggatcgggttgatatttatatagggataggttgatcttggaaggctggagacggcaacgtggacaggaagaagcggagggcgaggaggagcagaggagcacacagatgaagcaggtgatgaaggctttacaagcggggaggcgtgggctggtgacaggcggagggcggggagcgattgcctgcgtgtgcatagatctatatgagaagcgtgatgagcggcggacaagcgaaggcagggctggggcgtgggcc

SEQ ID NO: 36252 - DNA, 2300 bp, Homo sapien
cgagtagctgggactacaggcgcctgccaccacacccagctaattttttgtatttttagtagagacggggcttcaccgtgttagccaggatggtctcgatctcctgacctcatgatcctctcacctcagcctcccaaagtgttgggattacaggcgtgagccaccgcacctggcctttttctttttactttattctaaaaaaatgttaggctgggcacggtgactcatgcctgtaaccctagcactttgggaggccaaggccggtggaccacttggggtcacttcgagactagccgggccaacatggcgaaaccccgtctctactgaaaatgcaaaaattaactgggcaggccgagggcagtggctcacgcctgtgatcccagcactttgggaggccaagcgggcagatgacctgaggtcaggagttgtaaaccagcctggccaacatggcgaaaccctgtctccactacaaatacaaaaattagcctggcttggtgggggcgcgcctgtaatcccagctactcgggaggctgaggcagaagaattgcttgaacccgggaggcggaggttgcagtgagccaagatggagccattgcacttcagcctgggtgacagagcgagaccctgtctcaaaaaaaaaaaaaaaaaaaaagagttaattaaacaaacagaattttaaaaaaatttattgaatacctactatgccaggcattgttttagacactggggatgctgtgatgagcaagaaaacatcccagacctctggagtttgctttgtagtggggagatggtcaataaacaataaatatttaatataatgtcagataatgatatctgacagagaaaagcactgaaagtctcgagaaaaaaaaattagctgggcgtggtggcgctgtgcctgcaattccagctatactggaggctgagacgaggttgtactgagctgaggttgcactactgcactccagcctgggcgacagagtgataatctcaaggaaaaacaaacaaacaacaacaaaaaacaagttatagatgttcattgtttaaaaaaaaaaaaaaaggggcgggcgcggtggctcacgcctgtaatcccagcactttgggaggtcgaggcgggcggatcacgaggtcaggaaatcaagaccatcctggctaccatggtgaaaccccgtctttactaaaaatacaaaaaaaaattagccgggcggggtggtgggcgcctgtagtcccagctacttgggacgttgaggcaggagaatggcgtgaacctgggaggcggagcttgcagagagccgagatagcgccactgcactccagcttgggccacaaagcgagactccgtctcaaaaaaaaaaaaaaaaaaaaaaaaaaaagtgttaatgctgaaaagtattaataagaaaaaaaaaaaaacctctataattcgatcatccagagaaaagcactgccaatgtcaaagtacgttcttctttgtttccggcttccccccaccgcactttacatattcttagcttttttggacatctttagacgtcaaaaaaaaaaaaaagtatttttaacagtcacatagtgttgatgtgccataatttatttgcctacagtaatttttgaattataggttgtttgcaatttttcaccaaaaaaaaaaatgtgtttaaacaaaatgaatggtacagccatgtcattactcaaattcagagagctcttcagggaagaggcgatcacagctgagaggaggccagctagggagctgagtgggtgtaagtgttatatccaatggagactgcaggaaaaatgagccctggggctctgtgcctgtggaggtggctgtgtgaaggtgggaagctgctctgccccgactagcgactgctccttccgatgttttgaatttaaagatggtgaaatctcaatctgaaggactagagatgggcgctagcgttcctgacctctgccctgttgtcctgcacaaactagaaattatgttctgggtccttgtctttttttgggggggggcgggggtcggagttttgctctgtcccccaagctggagtgcagtggcgcgatcttggctaactgcaacgtctgcctcccgggttttcaagcgattttcctgcctcagccttccgagtagctgggattacaggcgcgcaccaccacgcctggctaatttctgtatttttaatagagacgggtttcaccatgttggccaggctggtctcgaactcctgacctcaggtgatccgcccgcctcagcctcccaaagtgctggaattataggcgtgagcccaccgagcttggct

SEQ ID NO: 36253 - DNA, 2300 bp, Homo sapien
gggaaataaaaatggctgacctctccctctgggaatctggaagcctctgctgaggtttttgtgtgtgtgcgttgatggggggtgggtacatgagatcagcttcaccaaggggcagaccagctccatctctaggcccagggaaatgggataccttgctgctctgaaatgttgatgagctgcggaggggagagggacaggggagcagatggaattcctggacaattgttccggctgtcaccagagaggataggctggagggggccctggataatttatggagggacagatgcttctccggaaccatctggccaagagaggcctgggctcggggtggatgatgtctttaggtctgaggagactcctggcctccagccttcctcatttcctctacctggcctgctcggtgccctggggctttcctaggatggctgtgctccctgaggacccagctgcagaattccacctgatcctcatctcactctctcctttgctgagtctggggcttgtctttgctaccattcctgttagtgctaagtggggccttgaggtcatgtaacttccatctatgcattttcttattttatagtattttcaacccctcttctccaccagtatattccaaaatctgtcaatcaccaacctccataccatttattcattcaataaatatttactggccggtgcagtggctcacacctgtaatctcagcactttgggaggctgaggcaggtggatcacttgaggtcaggagttcgagaccagcctggccaacatggtggaatggtggaactcccatctctactaaaaatacaaaaaattagctggcatgcgcctgtaatcccagctacacaggaaactgaggtgggagaatcacttgaacccgggaggcggaggttgcagtgagccgagatcgcaccactacactccagcctgggcaacagagtgagaccctgtctcaaaaattaattaattaattaaacaaacagaataaaaaaaatctattgaatacctactatgccaggcattgttttagacactggggatactgtgatgagcaagaaaacatcccagacctctggagtttgctttgtagtggggagatgatcaataaacaataaatatttaatataatgtcagataatgataagtactatgaatgaaaacattaaagcagggtaaaggagaatagggatgctgatttagattgagtggccaaggaaggcttctctaaagtgatgacacttgagcaaagacacaaatgagagtcaatatttggaggaagaacattccaggtatggggaatagcaaatttagagaccctgaggcagaaatatgcttaatgcattggaggaaaacatgccatttattcattaggcaattattgtgtgccaagcacctgctagggagtatgaagatgcaatcaaacatagtttttgccctgaagaagcagcagggcaaaagtggtataacatgtaaataaataattacactgcacgggacagctacagtaaagctatgtacaagttgctagtgatgcccagcaaaaggagcactaaagggaaatctttctgggggaggtgacattttagctgatggtttgaaggaataggaggaattgatgatgcaaaggaggaggagagagattagacatcttaaggcccgatgtcctgaaaacaaaggacaatttgggaacctgaagttcccaggagaggcaaaaaatgaggctgatgaaggtggaagagcctggatcatgcggatctttgaatgccaaactgaaaagctggttttattctctggatgacggggaaccagtagcacgattctctctcccactgtatctttgagatgtgttcccctattctttttttttttttttttctttcagtactggattctttccccgcttcccgctattgccctgctcctgacacctccttccttctgtggccagtcctccaatccctgctttcaggagagccccatttttcaccatcacctacctagtgtcccacctccccaacccgaggccccgcccccatggccccgcctcagatgacgcgacacgccaagtgcgtggggattcccgcggccctggccactacccggcctgccccgcggcaagatggcggcctgaacgcagctggcagcggcggaaagtttgttgtggggttggagtagtcgggcggggaagccagagttggggaggattgcgggggccctagcctgtagtaggggcgaagggggtactggctccagggttgaaaagaggagatggaatggagtaaggtccgaggcggaga

SEQ ID NO: 36254 - DNA, 2300 bp, Homo sapien
gtggggccttgaggtcatgtaacttccatctatgcattttcttattttatagtattttcaacccctcttctccaccagtatattccaaaatctgtcaatcaccaacctccataccatttattcattcaataaatatttactggccggtgcagtggctcacacctgtaatctcagcactttgggaggctgaggcaggtggatcacttgaggtcaggagttcgagaccagcctggccaacatggtggaatggtggaactcccatctctactaaaaatacaaaaaattagctggcatgcgcctgtaatcccagctacacaggaaactgaggtgggagaatcacttgaacccgggaggcggaggttgcagtgagccgagatcgcaccactacactccagcctgggcaacagagtgagaccctgtctcaaaaattaattaattaattaaacaaacagaataaaaaaaatctattgaatacctactatgccaggcattgttttagacactggggatactgtgatgagcaagaaaacatcccagacctctggagtttgctttgtagtggggagatgatcaataaacaataaatatttaatataatgtcagataatgataagtactatgaatgaaaacattaaagcagggtaaaggagaatagggatgctgatttagattgagtggccaaggaaggcttctctaaagtgatgacacttgagcaaagacacaaatgagagtcaatatttggaggaagaacattccaggtatggggaatagcaaatttagagaccctgaggcagaaatatgcttaatgcattggaggaaaacatgccatttattcattaggcaattattgtgtgccaagcacctgctagggagtatgaagatgcaatcaaacatagtttttgccctgaagaagcagcagggcaaaagtggtataacatgtaaataaataattacactgcacgggacagctacagtaaagctatgtacaagttgctagtgatgcccagcaaaaggagcactaaagggaaatctttctgggggaggtgacattttagctgatggtttgaaggaataggaggaattgatgatgcaaaggaggaggagagagattagacatcttaaggcccgatgtcctgaaaacaaaggacaatttgggaacctgaagttcccaggagaggcaaaaaatgaggctgatgaaggtggaagagcctggatcatgcggatctttgaatgccaaactgaaaagctggttttattctctggatgacggggaaccagtagcacgattctctctcccactgtatctttgagatgtgttcccctattctttttttttttttttttctttcagtactggattctttccccgcttcccgctattgccctgctcctgacacctccttccttctgtggccagtcctccaatccctgctttcaggagagccccatttttcaccatcacctacctagtgtcccacctccccaacccgaggccccgcccccatggccccgcctcagatgacgcgacacgccaagtgcgtggggattcccgcggccctggccactacccggcctgccccgcggcaagatggcggcctgaacgcagctggcagcggcggaaagtttgttgtggggttggagtagtcgggcggggaagccagagttggggaggattgcgggggccctagcctgtagtaggggcgaagggggtactggctccagggttgaaaagaggagatggaatggagtaaggtccgaggcggagaggaaaaaaaggagctggggcggaccggggccctagggtccagtggcagccctaggggagggggatttgggggcggggcagccagaagtaggtgttgtgcaggccctggagaagcagagtcacaagttggaggaaaatttcttagccgcgaataaagaagcctggagcgtgggatagaggcccgactgtatctggccggccagaggggaaagggatctttctagtagagtgggatagtgaggaagagagatctggaggatgccgggcagatctgctaaggagggaactaaagccagtcaaatgaccctcttctaggcttagatcagcctttccacagctgttagcagcatctgccccaatttcagctgaagattcaggtgccccagggactggaagaaattacagtgcctacttggaaagaagaagagatagcgacttgccccagtccaaccccagagcgggtaaggtggcttccagtgacaggtttctggctggcatgctccctgggaggaggatgcatgggcttagagtgatg

SEQ ID NO: 36255 - DNA, 2300 bp, Homo sapien
caagtagggaactgaatctcagaagtctttgagggtcttgatattagggcagaattgtcctggtattcctgtggcttcctggaaaagagctttccaggctttgcactggtattggagacaggggaactgggttatgtcccacttctgcttgtggtcttgggcaaatcacttgtgctttctgaccctcacaatgggagagctccctattctttgtgcctcactggaccataagcatcaaaggaaatatcatggaagggaaagagcttctgggatgataaagcacagtgtagatgcagggtttttgtctgtttgcctaggaactgttggtttcaccataaacatacatcccttgtgtaaaatgctaaccatacagaaaagtatacaaaataaaaagtaagaagatcctccctttcttctcccattgttcctgcctaacttgtttccccaaagatagggaaccactgttcgccatttatcttgtacccttctagtagttttttttttttttttgagatggagtttcgctcttgtcacccaggctggagtgcaatggtgccatctcggctcactgcaacctccacctcccaggttcaagcgattctcctgcctcagcctcccgagtagctgggattataggcgccagccaacacgcccagctaattttttgtatttttagtagagacgggggtttcaccatgttggccaggctggtcttgaattcctgacctcaggtgatccgcctgcctcagcttcccaaagtgctgggattacaggcatgagccactgcacctggcctctaatagctttttttatacgtctagacattcctcaccaaaactcaatattaatacagactcttcttcagctttctttgttgacttaagtgaccaaggagtggaatggtccctgttggagccgctgaggagcctggttacagcctccttcccagtcgagtgagttcctctggggctggctccctgggagggatggagaagttttactagagggtcttgccacagcaggcaccctggctgtctctgagggacatttttttattctgagatgaaattggcaggagtgtccttgagtgggaatcaggatggatataacagcgatgtgggcattggcactcccatctcacctgtgtctctccccttcactcatttcatttttgccttggaaaagagaaaaattatctgatttctcaaatcctatattagtgcagtgagagtccctgatttctgaaaccttgaattagccatgtcacttgctgctcttttaaaagcacaccagacccagttggtgtttttgttttcttgtgggtgaggattctgaaggtcacctgtcagtggctgtgctcagtctagagcaggggtcagggcctgtcggaagagttgttgtcttttttttctagacagttgtctcatcttcatagtcaggccttggcctatttgagctcttgggctgtagtcagagcaacatggggagcccagtgtgtaggcaattattggaagtgtttcctgtctgcgtgaatcttgatcctaggcttgggaaaaggccaggcccacctctgtggccagggtggtgactcttccctttttgccctgagtcatcagagagcctgcagggcttcctagaacaggagagaggacccctctcttgtcttttccctgccaacatcttaccctctgctaagcatcagtgggtgtggatatatgtgttgcagtcctgtcctcccgccccaggggacacatcttgtggggtctctggaatgccactgcttttgcctcatttgccttgcagtctgtgagctagaggtgtcacttcccccagggtggtctggaggcttcatggaagagttgtttctgccgttgatgggagagcttcttgctctgttgctcgtgttgcttgttctgagaggggagaatagtccctgttgctcctctggggctggttccctgggaagtgccacccctggccaggcggcagtgtgcagcccgtgctgttgactggcccagctgtaggccaggcacacactgccccattgtactgtgctttccgacgcagcccttgtcatagcctctaatccttgggctgcttctctcccagcccctcagagcctgtgggaggtggtgggatggactctgctggcactggtgcgggatgggttgcagctgcagctgtgggtggctttgttcttacagcctagctttcagagtcctggtgcagcctggcagcagtgtttggggaacaggcgagatagaggagctgagccccttctccaacagccgtcctctctt

SEQ ID NO: 36256 - DNA, 2300 bp, Homo sapien
caggaggcagtgctacagccacttcccaccagcacagctgctcttcattgtccccaggaagtccagcccttcctccagctttgctttgtttggctaacatttgttgaatatgtactccctgccaggaactgttaggtccggactctgctcttcggggcctatagtcagctgcaaaacattggctctcctgccccattaacttcactcacaggcagaaacgagggccacagtggtttactgcccttgcagccatatctccatctggtcacagtgcgtggagcacatttaaagaacctgagacgcagcatgtgctgagcatcaggcatactgtagcctgctttggtcagattcaaggtagaaaagccatgacttgctcatttcagttcagggaacattaaattaagatgccagctattatgctaggtgctacccagcgagcattacctcagttttataaatgagggaactaaggctcggtgaggtgaaggctgtataatcagtatgcagtagaatagggtgaaatccagttgtcagagtcaatggacaaaggaagccacctacctccattttctgccagaggctgctcttctgaagcagtcagttccacatagaataggccccttgatgtttccctctcgcgatagcaggggcctactctgctttgtggttggctgaacttgactcttgagccatgactgccataggggtttggggaagatggggcaggaggttaaaagacagacaaggcacttcctccccttagtcaggattagtcctcttctcccatgcacttgttcttcctgagcctctgcaagagcctgattctgcctttgtcttcatctcaaggctgagggctttgtcagagctcagaactcgtgtgtatagttcagcctgacttttctggaaggtctctgccatacctctgtggatacaggacccaccaggagccgagtgaacagctgagaggctgtctgcccctggggagaggtagcttgggtgccaggacttatttgaaaatggctttaggattggattaagggtgaaggttggaagaggttcttgaatcttctggttggcatgggagagggtagtcgaggcttgtcccagcattactgaattgcttccatccgtagagagccctgcagccctcttctgctataagagtctttgggcttcacacctgagccttcttgtggctatttggagggtgagccagccgggggtccagtggtccagagctgagcctcaagcctctcttttttgcctaggaacccctgactgatgcagaaaggatgaagtgagtatctgctacctgagatactgccctgcctcaactctgtccctcttagctccaggctagactgttggtacagttggactttcccttggattaggtagaaataaaggttgggatgggttgttttagggactctgggaggagtgttgatgttgtggatattttttctggaaaatgggattttattgttccatgggcttcaagagagcgtagaatcaggaggcgaatggctctgagggccctgctcttcttgctaaggagcccttccccagctcctggctcctgtaccagctgccacccttacagccctttagccacatgaggcctctggagaggagggcagtgctgggctggatttccaagagatgaataatggagaagcctgattgtgcagtggggaaactggagctgggggcttggtggccagctgacatgggctgtaaccagagacaggctgggagccatatccctacccccaattctttatttctattctccgatagtgaagggaggctggactgtcccctaccatcccctcttcctcccctgaccctccaacccaggctgtgttcccagggccagcaggcctatgaaatatgctgccttagactcagactaagactccaggagtttccctgtcctgtttgcctgtcctcatgtcatcccttccttcctgagcccactctggagctccagggcatgcccttctatctctcatacccctctgcccttgatcccacaacaccctgccaggctcttacaggaggagaatgaagagcttcgccggcgcctggcctccgccaccagacgcactgaggccctggaacgtgagctggaaattgggcaggactgcctggagctggagctgggccagagccgcgaggagctggacaaatttaaggataagttccgcaggtgtgggaatgaggggccagacacacacacacacacacacacacacacacacacacacacacacacacacactctctctgtctctctc

SEQ ID NO: 36257 - DNA, 2300 bp, Homo sapien
gagctgagcctcaagcctctcttttttgcctaggaacccctgactgatgcagaaaggatgaagtgagtatctgctacctgagatactgccctgcctcaactctgtccctcttagctccaggctagactgttggtacagttggactttcccttggattaggtagaaataaaggttgggatgggttgttttagggactctgggaggagtgttgatgttgtggatattttttctggaaaatgggattttattgttccatgggcttcaagagagcgtagaatcaggaggcgaatggctctgagggccctgctcttcttgctaaggagcccttccccagctcctggctcctgtaccagctgccacccttacagccctttagccacatgaggcctctggagaggagggcagtgctgggctggatttccaagagatgaataatggagaagcctgattgtgcagtggggaaactggagctgggggcttggtggccagctgacatgggctgtaaccagagacaggctgggagccatatccctacccccaattctttatttctattctccgatagtgaagggaggctggactgtcccctaccatcccctcttcctcccctgaccctccaacccaggctgtgttcccagggccagcaggcctatgaaatatgctgccttagactcagactaagactccaggagtttccctgtcctgtttgcctgtcctcatgtcatcccttccttcctgagcccactctggagctccagggcatgcccttctatctctcatacccctctgcccttgatcccacaacaccctgccaggctcttacaggaggagaatgaagagcttcgccggcgcctggcctccgccaccagacgcactgaggccctggaacgtgagctggaaattgggcaggactgcctggagctggagctgggccagagccgcgaggagctggacaaatttaaggataagttccgcaggtgtgggaatgaggggccagacacacacacacacacacacacacacacacacacacacacacacacacacactctctctgtctctctctctctctgtgtctctgtctctctcctttcataggaggttagctggaagatgccttagagatcatctaattcctattaaaaaactggataagttctgcaggtgtgggaatgcggggccacacacacacacacacacacacacacacacacacactctctctctctctctctctctctctctcctttcataggaggttagctggaagatgccttagagatcatctaattcttattagaaaactggataagttctgcaggtgtgggaatgcggggacacacacacacacacacacacacacacactctctctctctctctctctctctctctctctctcctttcataggaggttagctggaagatgccttagagatcatctaattcctattagaaaactgaagttcttgagggagaatgacatgttcaagatcccctatcggggaggctgaacagagcctgaagaacaggatcttgacccagggatgtgccttgtattatcccttttcaggctgcagaacagctacacggcttcccagcggaccaaccaggagttggaggacaagctgcacacactggtaatctgtctgggagggcagcttggtgggcactgtgctcatagcatagcagggggccaggatttgccaggggaatgccactctgccctggggcttgagggagatggtgggatggggcagtggtgggggtactgcagtgtgctctgcaagtcaagactgtcttaatgctcacactgtttctcttctttcctcgtctccccctcatgctgccaccgttgctgctgcactctcctctcaggcctctcttagccacagctggatttttgcagttgcgtctgagtttgtgtgtcttctcccttgccctggccttctcctcagctgagatctgggattgtgggccctggctgttaccctgtgccccttgagtacacccgctcctttctcttccctgtatgaggcccgtttaactgtcaatgcctccctcccaggagagaggtggggagcctagcctgctctgcccttggctctggtagaggtactgattgatgtctccactgaacacccaaagcttcttggctccagtggcagcaagcccaggctgtgggagtggggaggggaggctgcagatccagtccctgaactggagatcagaaggctacttttgagcctgcagcttgctccctgctcaacaaggtgccctggctgccaccgcgccctgctt

SEQ ID NO: 36258 - DNA, 2300 bp, Homo sapien
ttgagacagcaccgcctgcaccgtgcagtgtggctcagccgccttcacgtcctcaccagtgctccagggccctggccctggcaccttctttgtattggctgccccagtctcgcggcacggacacaccctcagatgtcaacagtgccctgcgtacctgagaaggtgtggcaccaggaccttgcatctatctgaggctcccctgccctagggaccctatggggtacccttctccccagcagctcaagctggctctgcccagccgtggcccctggggcctccctgatgaggccgccatcttggcgaggagcaagcggggaagtccccatgggccgggatcaccacgcacgctgcgcctcgagtcacgggggcgggagcgaggcgcggcgcggatgaaagggccctggggccttccaaataggagggaacagtgccctggattccggcgggggtatggaccttaggaacggggaaggatggaagaatgggcagaagcagcagtaaccgtgcccaacgccatctccacggggcgtgcctccattccgctccccgtcagccctacccactcagccctgccgcctgccgcctgccagttggctgaccccactcccaagggaagagcggcctatcgctcccagctccttgccccgaaccacccagtgtacgcgaacctcgcgggccggcgtggccttggccgggcagggggcggggcgagcgccggtgacgcggccgttgccatgggaactcgccgcccgctcgctctctggagctggagccggagctgccgccagccgcccgcctcaggctctctctgccagccgtgcggccaggcccgcggggtggtcggggggagccgggcggcagagaaggagggagcgggtacggcctcctagccgagaccggtaagccgaagcccttgagccgctcgctgccgctgccgccgccgccgccgcgaccgcgagggacaaggacaagcgccgagcagcgcctgcccaacccccggaacgcgcacccgccccaacgcccagacacggaccgtgcgggccgcccccgccccagcgccgccccacttcagcccggcccgcgccctggacgcctccgcacctctggccggctccggctcagtcccggtagctcttctccgcccccgccgcagcctccgccgcagccgcagcctccgccacagccgccgcctccacccccggccccactccgcccgcgacccctgccggggccccgaccccggccctatccccggccccgcccgcggccccaccaacctccgttccggccccgtacccggaggcccagccgtgggcacgatgctgcccagctccatccagatttcgggggagccgctgtccggcgccgaggtgcgggacatctgccgcggccttcgcgacaacgccgtgcgcctgctctcactgcgcggctgccgcctctgcgaccgcgactttggccgcatctgccgggccctggccggggccacgtccctggcgcagctcaaccttaacctgggcgtcgtgtccagccccagccgcatcaagcagctggctgaggctctgcggaccaaccgctccatccagtccctcttgtgagtgcgccccctcgcaagggggtcccgggcactgcacccttccatacactcccctggcacctcctgttcctccacactccttccagtaccatcctaccttcacatgccttatgcacatacaccgtgcctcggcccatgccttcacagcaccctccaagcacatgcttggactttgcacgcgcgaccctagccgtgttgggatacccaccagttcctgacatgaggtgggggccgtacctccccacctaatcatctgcatttacttcactggggcagctccttggttcccaagggggaatatccccgtggggacgagagccctgcccactgcagagttccggtccaccacccacccaccccttctctgcccctccctgtgcaatgtcctggatccctgccccagaaaacaaaccgaattctccctctatctgtattccctgagaatctagaactttccttctccttttccaggcctctcaagcgctgtgactgccctccccatacctagggctgacagaagtgaaagtgcccctttcccatgtagatagtgcggaggactgcagtaaccctgctctctcactctcctccagcctgcatgggagccccctgacagatgcggggctggccttgctgaacccagccctggccctccaccctgccctcgtggctctggacctgggggactgcatgctgggtgatgaagcca

SEQ ID NO: 36259 - DNA, 2300 bp, Homo sapien
tgggtggactgtccacactgcgcatggtaagctgggcaagaggcttccaggggtgggctgtcctcccagggagttggggaagacagcctggagctgtccatctcacaaagagccctaaatgggagggaagagcccaaagatggttctgccctgggtgggggtgtcttgtccccactcctcactttggagccaggccctttgagctgtattctcatggtcctaggtagcagtgttggtgtctcggaccgtgggccccacacagcggctgctcctctgtggcaccctggctgccctacacatgctcttcctgctctatctgcattttgcctaccacaaagtggtagagggtaagtggcaggaaggtctgggtgggggagaatgggaaagcagctgcctagagcaagaagctagatatgatggctggtgggctgggcccatctgatcctcgctcaccttccatcttccttccagggatcctggacacactggagggccccaacatcccgcccatccagagggtccccagagacatccctgccatgctccctgctgctcggcttcccaccaccgtcctcaacgccacagccaaagctgttgcggtgaccctgcagtcacactgaccccacctgaaattcttggccagtcctctttcccgcagctgcagagaggaggaagactattaaaggacagtcctgatgacatgtttcgtagatggggtttgcagctgccactgagctgtagctgcgtaagtacctccttgatgcctgtcggcacttctgaaaggcacaaggccaagaactcctggccaggactgcaaggctctgcagccaatgcagaaaatgggtcagctcctttgagaacccctccccacctaccccttccttcctctttatctctcccacattgtcttgctaaatatagacttggtaattaaaatgttgattgaagtctggaactgcagcggctgatccagtggtcctccctgtcatcccgcttcctatatactttcctactcagtcaacagtggtaatgtcatatgttcccttcttcatatcctcacccaggcaagataaaggtgggacaggccagactacatagaaggcagtgattgaatatcacacctgacccatgaagcggcagggaggcctcaagcacaaaagccataagcctgatggaacactgcagccagcttgagtctgggctcagctgctctcttgggaagccaaggaagcagtgacaattgaacaaaacatcccgacttaaaccccgtgtcaaaacaaggatcttctgcacctgggcattgtgttgataattttcctgtggagctcttaattgaagccaaatttggctttgccttggtggtactggggccagctccttttagtttttctgtctttcctcttaaaaccaaccaccactcctaacatagcaccatccacccccaccacctctttaatatgctccacttaataagttaattcaggtggctaagagtgggaatagggcctttgacctcccttcactatattgaatattatattttatgtaaaataatcatcttaacactagtaaatctgggtcagcagcatctatccctcctaacaaagggacaaacagaggtgcccttcatttgtcctgcgttacacaagtgagtcccccaccaccctggccagaggacaaagttgagacagcaccgcctgcaccgtgcagtgtggctcagccgccttcacgtcctcaccagtgctccagggccctggccctggcaccttctttgtattggctgccccagtctcgcggcacggacacaccctcagatgtcaacagtgccctgcgtacctgagaaggtgtggcaccaggaccttgcatctatctgaggctcccctgccctagggaccctatggggtacccttctccccagcagctcaagctggctctgcccagccgtggcccctggggcctccctgatgaggccgccatcttggcgaggagcaagcggggaagtccccatgggccgggatcaccacgcacgctgcgcctcgagtcacgggggcgggagcgaggcgcggcgcggatgaaagggccctggggccttccaaataggagggaacagtgccctggattccggcgggggtatggaccttaggaacggggaaggatggaagaatgggcagaagcagcagtaaccgtgcccaacgccatctccacggggcgtgcctccattccgctccccgtcagccctacccactcagccctgccgcctgccgcctgccagttggctgaccccactcccaagggaagag

SEQ ID NO: 36260 - DNA, 2300 bp, Homo sapien
gcagtggtgaagtgctgtctattagaggcaagcgcagagttcttttttttttttttttgagatggagtctcactttgttgctcaggctgaagtgcagtggcacgatctcggctcactgcaagctccgcctccgcctcccaggttcatgccattctcctgcctcagcctcccgagtagctgggactacgggcacccgcctgtctaattttttttgcatttttagtagagacagggtttcaccgtgttagccaggatggtctcgatctcctgaccttgtgatccgcccgcctcggcctcccaaagtgctgggattccaggcgtgagccaccatgcccggctggcaagcacagagttctataggaacaccaggagagaacaaactggggatgggattgaggaatgtggaacagaggaagtgacatctgaggtaggttttgagggaagatgagtagtcagttagatggaaaagaagaggaagatggtgtgctattattacttgtttcagtgacaggtgcagtgatgagaggtgatggggtcatgaagacggggagcccatcagagcccagggcttgaaatctgactgtagtgtgcatgaaggtctaggtgttaggagggaagcttcttcaagagaaggctcctcacctgcttcgcacctgagcaggctccacatcaaagtagggtctgaggatgtcgatgttggcgtacaagctgaaggccctggaggcttgtcttttcccagcctgccacatctgaagtaaggaagatgggcataggtattgtggtactgttggttctagatcctgttgcctattttccgtttgatttctacatggttctaactggacaacctggggcgaacatcaccaacaccaattccagaacacgggacatacctaggtctacttttctacctgcagaggattcaatcttgcttacctgatctgccacctgccggctcagctgtcccttaaagcccttcatgcccaggaactctccatcctcctcttcagcagcagctgcatcagctgcatcagcgtctacttcttcctcgcgcaggcgctgatgcagctcacccatatcctcgaagctagagcctgaggtatcatccatgttctccatgtcaatcacagctgagcctccgccctgtgaagacaatggctcctagagtgcaggacttttctgttccatccattaagtcctctgctcatcccagggtttagggctttgttcttccactgctgaggatacggcttggaatcactacagatcatgccactccattccccctcatatgctctcagaacgcctggtttctagctttggctatcttttctagcctgggaaacctactagtcttccattcatgtctttctcctatgttacctatcaaagactaaaaggctgaaaaagtgcccatttccttctttcctaagccccaaacaaaactatacacatagtatgttttcagcgaatgccagtgaatcccacccaaccccactccatgccttaccccgaccaacctcctaacttgttccaagaataccttcttcctaatgcctcgggcgggccctgaaacccgagatcctcaggctggagtagtagtctggccctttcaggtcaatgttaatcccactgactttagtgtgcacgaagacccaaagaagagagttttgtaaatggagcggacttccaggcccagagggggaatccccaagacacttctggacatcgccggccctccggctgctggcagctggtgccttggggccattacctggatgttttcttcgaaccctccccattccgggccagctccatttcgggcgccgcccgccggcgccgctgtagttgccatgtcccttgagggctcccgtcgctgaaacccgcgctagccccgcgcgcggagtgggcaagatgtgggcctccggaaggtagacgtccagggtcgaggagaggtgggatcggccggaacacaaaaaggagaagcccggatgtttggacaaaagcaacttccggaagctggggacgtggacgggggcggggaaaaatctcgcgatatttaagattccaggaggcggtgcgttgccacggagacggagcagggctactaggacgcacgcgcgagatagaacctctagtctcgtggagagattgaagatggcggcttctcaggcggtggaggaaatgcggagccgcgtggttctgggggagtttggggttcgcaatgtaagccttgtggccttgagctcgggcgggaggaatgagagcggaacagggatgggtcttgggattggcgtggg

SEQ ID NO: 36261 - DNA, 2300 bp, Homo sapien
tactgaagaacagaaactaccatagtgcttagttttgttgacactactcagtcctcttactagacttctgttatgcttggcattgattaaaaaaccccctcctggcccggcacagtcactcacacctgtaatcccagcactctgggaggctgagacgggcagatcacaaggtcaggagtttgagaccagcctggccagcatggtgaaaccccgtctctaccaaaaatacaaaaaattagctgggcatagtggcgcatgactgtagtcccagctactcgggaggctgaggcagaactgcttgaacccgggaggcggaggttgcagtgagccaagatcgcgccactgcactccagcctgggacataagagtgcctcatgaaaagcaaagaaaaaaatctcctccttttttgaactattcccctggtttctgagctctgagctccactcttcttccttctctgatgatcgacttccacccatctctaaatttgccaggttcttgtctctctcccaggtcaccttaactgtactaacagttttagcaactatctgttctgacaactcccaaaatgttatctcacttctgatctcatttcaagcatgcagtcttctagcctgctagatttctccacatgcagaaaacaatgcatcatcattcccgttccccagacccatttctcctctcagtaaatgataccacaatgcatcaaagcagttcccaagccaaaaagtcattttatgctacccccacagcctttaccaaagcaatcataaatttaccttctattctacctttgctctatttctaccatcagtcttagttcatgtcttcaacctcagcttcccttacaacagatctgcctgctccatatgatcctcctcaaactcattccctcccagccaccaaggttgcaaatctcatcatgtctgcttaagaactattcaatctccctatcatcaacagtgcccaagacacacttcaaccttgcctaccactcatgccagaactacttggacatgcccggagcacacttcacacaagccataattttttttcaagcattaacctttttcattgttcatactttattccttgtatcaacaggttaaaaaagtaaaattttcccaagcactgatttacagatcatgtttataagctgcacgcaaaggtcagttgcctaaacggtaacattcagtaatctatttaaatgcaattttaacccttattttaagctaagtgaaacaatacaaaagactaaatacacacaaaacctgtatatcctgaacttcactgacttgaaacaaacccttcataatttaactcctgttcttttttacttaccattcaaggctcaattgagatgtaccctcctcttgaaatgttaagtacctctccgcccctcttcctggtctcagcgtaatgctccccaccccaaccctgccgtcttcatcgctatcaaccaccttcaccatattacactagattcactgtttatacacaccattcctcaacaagactgaacatctttgcagaactgggtagaaaccgtgtctaatttggcctgtaaacggagcgtctagcacattgctcaacaaacttacaaacggagcgacccccaagagcagcttctgagacagacacaggctgctcagaccacaaggtctggccttcataaccctccccagacaactccggccccacttaccttctcgaagcggtcctggtcccaggcatcatcataaccggaatagttaccgggaaagtcagtagtatggacctagagcaaagggacgaatttgtccacgaagggacagtgagcccacagctatccccacgccaatcccaagacccatccctgttccgctctcattcctcccgcccgagctcaaggccacaaggcttacattgcgaaccccaaactcccccagaaccacgcggctccgcatttcctccaccgcctgagaagccgccatcttcaatctctccacgagactagaggttctatctcgcgcgtgcgtcctagtagccctgctccgtctccgtggcaacgcaccgcctcctggaatcttaaatatcgcgagatttttccccgcccccgtccacgtccccagcttccggaagttgcttttgtccaaacatccgggcttctcctttttgtgttccggccgatcccacctctcctcgaccctggacgtctaccttccggaggcccacatcttgcccactccgcgcgcggggctagcgcgggtttcagcgacgggagccctcaagggacatggcaactacagcggcgccggcgg

SEQ ID NO: 36262 - DNA, 2300 bp, Homo sapien
tggcttttccaagaaaagctagagcagagcagcccttctcccacaagccctcccacccccgtgcagccacatacctgtacagaatggtaactaagggtgctgtgcccaaccctgcgactagcaaggctcgcagcaagagcacagccctcaactacttgtgccagagtttctcttggaccactccaactcccactgagcccttttgctgctgggctggcaggaaactttccccactccctaaggggcatgtctgggttaggtgctaagtgctgaagagaacttggtcagttctctcaactttgctttgggcaagaatctggtcacctgatgggatccatggtacaggctactgctaaacttggcacagtatcaagtatagtacctccaaggaccagggctgggaagtctttagtgctaacatcccctttagagttcacacatcttgcccttccatgaatgacccctcagtctggcctccccagcctcaaggtccactcaggcacaagagccacagtaccctagatagtgtcacatgacaccgttgtcatccaaggataatacagaccaactaggctacatctgtgatgagcagctagcaaagccgctggtcttctcctaggactaagtccaggtgccttccacaatctcatggtctttcaggtccctggttacttttctcaaaggccatttccaaaagaatacatgccttcacatcacaacctgtactgtgagtccattctagaggtcactgaaaggccctgtaaagagaggacatggatacgggacctggccctgaggttattactggccgtaaggcagagttaatccatacagaaaccagtgtgtccatgtgctctgcacaaaaacagacctgttgtccatccagtccactgacaagagggtttccccgagagccgaagtggactgaagctacagtttttagctggtgcgggccacaggcagggtcagattgagaagaagcaaagctggggaagcagaagttgggagtcttgtgttgctccctcttcctgtgtggtgctctgggtttctgtggatcgtgaaggcgatctcaagagtgtttccctccaaacctgatagctgcctattcctgtctggttggggctgtggaggatgtagttgtatttattgcattgtaatatttttaacatcctgtgacttcatgctagaaattttctattgtttatagaaactttttgtagaaacattaactctaaagcacatctgcatgtcagtaaaaatctcagtttcgtacagaaagggacccatctgcctttttcaacctagtcttaaaaccagtgacatactccagggttacttcatgagcacccgggactaaaacaggaagaaatgtgactgatgattctggtctttcaagctttctgaaatggtgtgccagttagaaaaggatttctattcctgacatacccagactaggcagcccataccattctcacagtgtctttcgtgtgtggctgctgggcctggcccacaggaattgctactgttctttgttggagctgtcaatagcaacatgaacttccctggtaaaccaggagataggtgaagtggcacattcactctagcttgaatgtttttctagggtttggctgtgctcccagaaaccaccttaatttgccaattctcaggaggtgttctttctgttgtttttgaaacagggtctcactgttacccgggctggagtgcacatctgatgttcttaattggtaaatgctaaaccagttctgaagtgaggccccctgtttttcgcggtggctcacacctgtaatcccaacactttgggaggccccaaggcaggcgtatcacttgaggtcaggagtttgacaccagcctgaccaacatggtgaaaccctgtctctactaaaaatacaaaaaattagacatatagctaggtgtggtggtgcatgcctgtagcatcagctactcttgcctcagcctcctgagaattgcttgaacccaggaggaagctgcagtgagctgagattgcaccactgcactccagcctgggcaacacagtgagactgtctcaaaaaacaaactcaaaagtagtctcaaaaagtttttttgtttgggtgagtttatttacatctaaggccttataaaggcgtaaaaagtctcattttatggcacatttaacaaaatgtattgattaaagctggaattgtcccagaaaactcaggatccctagtcacactgggctctctgttcagcagtcctgtagggtgggtcagtcagaacccaaagcttcagcttgcctcaga

SEQ ID NO: 36263 - DNA, 2300 bp, Homo sapien
cctgccagactggctgggcagagcttctaccccagctgactatccttgctgtaggatcgagcagcccccaaagaactaaactgatttaattgccacaagacagcttcagttgcagattctgctcctaacctcctgttaactgaggagaggtaaaaagaggaatgcttgctcacagacccttgccaggaatgctgggtctgttatccttactctagaattaagcagggggaccagctgggtggagaacaggtatgtctagagacccaggaattctaaaaatgttgttaattctttccaagcaaagaggtgtttgagataccaccttcatcagggatgtgggataggttacagaaaccatagatgttttttttaaccttgtggtgtggagtctacagaagttgtcattgatgcctagaatcatccttggctaattttaatcatgaagtggacttgactttagatattatgtgttccaatcctttccccaattctagcatttatttcctttgtgttttcccagaggctttctcagaaatggcaagttatcaaccaaaggagcctgctgtggtaagggatacctacccactcttcttggtggatgaactggcagccaggtttggggtgggaaaaggaagcgggcagggattctgctgtcccagggtagaagagcagtaggttgtagtcattctcagcctaggtgatacatggcttgtctggacaggctgttaccagcaggcagactctgagatccagccttcataggggctactgttaccttactcacttattttaattctgtaatgtctatccaactggacagagtcactagtaataatgtccttcagtggatcactgctgtccattcccaacttttgcataaaacgaagacccaaaggagaagaaagtggtcagagagagtctgattagggtcgctgctttccttgtccttccttttctgcactcctgtggaacttggccccctggttttctgcagtggagaagatgaggctgcagatgaaaacccagagtctcaagagatgctggaggagcaactggtgaggatgttaacccgagaagtcatggacctaatcagtaagtggcatgtcgaaactggggctatagaggattttcctggaagaagagctggtcgctcagccaactccatgaaggcctgactaatgcaaaggattcatgtttgcggcgggcatggtggattgcgaggtcaaaagatcaagaccatcctggccaacatggtgaaaccctgtctctactaataatacaaaaattagctgggcgtagtggcgcgcaggcctgtagtcccagctactcaggaggctgaggtaggagaatcgcttgaacccgggaggcggaggctgcagtgagccgaaatcacgccactgcactccagcctggcaaaagagtgaaactccgtctcaaaaaaaaagttcatgtttgtagcaacactgacagatccaaaagaaataactagatagaagcaaggcagtccttaagtcaacctaaggatactttatgaattgcaagctgaatatggggaaacaaaaatagcagaaggaatttggattcattaggaataacttcctagttttgtcaaaatagggaaatgttttaaattcttggacatggaggctgttaattttctttttatttttactgtgtcattttgtttgtttgagattcaaagtagaccagggatgtatcaagcatcctttcctagtcactcactctcagagaattctgtaattttctctcagctagttgaacttgaaggaccaaaacagttcggtcatcagaatgcctctatttctattggtgaagctaattcttgtgccttggacggtacccccatcttcctccttcctcacctggccagagacaggttgggatcagtgggcctgaggtggctgttgtggtagtatatacccacccttcacctagtaaccctgctttcttgctttagcggtttgctgtgtttcaaagaagggtgctgaccacagtagtgctcccccagcagatggagacggtaagtgagcctgtgagaccttggagttctgctcttagcctcctaaatactgttccttctgaaccaggtcagtttccttgcagtctggtgaggagaagacaccttacatgtagttatcatctctggaccagccctcttgctgtgtgcctccatcatactcccacctccaagcctttgcacttgctgtttcctctgtctcagatgatttcctcccaaccatatatgtgatcttttctcttgctttattccaatgtcacct

SEQ ID NO: 36264 - DNA, 2300 bp, Homo sapien
agtcttgctatgttgcccaggctggtcttgaactcttatcatcaagcagtcctcccaccatggcctttaaagcactagaatcctagtgattacaggcgttcttatgggttccttgagcagcttcagcctatcttgtgcttcttccatcttgtcttgcactgccttgaccatctatttgttcagaaatgcagaatgtggagttcctataagctctatatgaacaagtgtatttacttcattatcttagcatacagagaaaatcgaaggcaatttattttttttccccgttaaccccttcttcaatttagccagtaggttgtggtgggtgttacagccattcaattataaataaatcatggcctttaacctgaaggatatttgtatactttcctgcctcctcgtgtgtgtgtgtgtgtgtgtgtgtgtgtgtgtgtgtgtgtgtgtgtgtgtagataggtatcaaagtttttaaaggaatagattttaagccatttcccaattgttaccttttttgttttgttttgttttcttgagagagtctcactctgtcacccaggctggtgtacagtggtgcaatctcagctcactgcaacctctgccttccaggttcaagtgattctcccacagcctgctgggactacaggcatgcaccatcacacccggctaattttttgtatttttagtagagacagggtttcaccatgttggctaggctggtctcgaactcatgacctcaagtgctctgcctgccttggcctcccaaagtgccaggattataggcatgagccaccacgcctggccttccagttgtgaccttgttaggatactgctttaattcattttcccattgaaaataagcatgaaaataactgtgcagtcataattgtggtatttgctgtgaaggaaagtggcagggctctgagtgtttatcgggagacctaacccagtctcagagggaagtcagaaggctgactcccaatggggacttgaaggatgagtacgaactagctaggttaggggcatgaggaaatgctgggcattctggacaaacagaatggcaggtataagatctgaggcaagagaaaaaggccttggtatgtccagaacatagagatggttgaatcatgtggctggagcacagggagctagtctgggaatgtgggatgaagttagagctagaggcatcagttgtctaaaccttgttcccatctcagaagcttcaggctggctcaccatcacagcccccatagtttgtctttgtcatcagctataacctgtgtctgagcccggctgtggtcaagcaatccaatggcattcctcagctgtgaagttagccaaaggaaggatgttaatttgcctttccagaactcatgtctgtctgtttcagcctagatagtcctgaatcttttcctttgacaccattccatttaagggttatgttgcagacaccagtaaaagtagaaattccaagaaatgtatagctattaatataaaaagtaggtgttgcttaccacacacccccatgccattattcaagttaagtcaggaactcctgctatagaaataagtggccaaccagaaatactagaatggacaaacagttcccacagatagcttctgactataggactcgaaatgtaaaacctctgattacacttaaaaatatagatattttaaggcagtttttaatactaaggtaagtgggtttcatttttagctgctacacatcttagtgttttgtgtaagattttgcttaaaaaaggggtttcataacttaattgtgggagcatccccagagctttatggaaaaatacttttgagttgtcactttttttggtacaggttccatctgggggaaaaaaaaaagcagataaaagagtacccgggtctaaagtcctgggtccttaagtagctttcaccttctcctaccaaaagagtgcagcaaatcacgtagccaactgctttgcagtacagcaccagacatgcacacatcttcacccctgaacaacagcttcctgctgtagagtgttggccaattgagactcctgacagtggagcatcatgttcttgacccgtatttccctgtaggattacctcaacctctcttggaactcaatgactctcctgtcttcaaaaccgtcttggaaagaatgcagcgtttcttctctaccctctatgaaaactggtaaggaaccaatgctgcctctccatattttcttcctcgatatgtattgtataggaatgtccatgggttggacttttcatctagtgtacaggtaaggcgaggcaagagtttgata

SEQ ID NO: 36265 - DNA, 2300 bp, Homo sapien
acctactttttatattaatagctatacatttcttggaatttctacttttactggtgtctgcaacataacccttaaatggaatggtgtcaaaggaaaagattcaggactatctaggctgaaacagacagacatgagttctggaaaggcaaattaacatccttcctttggctaacttcacagctgaggaatgccattggattgcttgaccacagccgggctcagacacaggttatagctgatgacaaagacaaactatgggggctgtgatggtgagccagcctgaagcttctgagatgggaacaaggtttagacaactgatgcctctagctctaacttcatcccacattcccagactagctccctgtgctccagccacatgattcaaccatctctatgttctggacataccaaggcctttttctcttgcctcagatcttatacctgccattctgtttgtccagaatgcccagcatttcctcatgcccctaacctagctagttcgtactcatccttcaagtccccattgggagtcagccttctgacttccctctgagactgggttaggtctcccgataaacactcagagccctgccactttccttcacagcaaataccacaattatgactgcacagttattttcatgcttattttcaatgggaaaatgaattaaagcagtatcctaacaaggtcacaactggaaggccaggcgtggtggctcatgcctataatcctggcactttgggaggccaaggcaggcagagcacttgaggtcatgagttcgagaccagcctagccaacatggtgaaaccctgtctctactaaaaatacaaaaaattagccgggtgtgatggtgcatgcctgtagtcccagcaggctgtgggagaatcacttgaacctggaaggcagaggttgcagtgagctgagattgcaccactgtacaccagcctgggtgacagagtgagactctctcaagaaaacaaaacaaaacaaaaaaggtaacaattgggaaatggcttaaaatctattcctttaaaaactttgatacctatctacacacacacacacacacacacacacacacacacacacacacacacacacgaggaggcaggaaagtatacaaatatccttcaggttaaaggccatgatttatttataattgaatggctgtaacacccaccacaacctactggctaaattgaagaaggggttaacggggaaaaaaaataaattgccttcgattttctctgtatgctaagataatgaagtaaatacacttgttcatatagagcttataggaactccacattctgcatttctgaacaaatagatggtcaaggcagtgcaagacaagatggaagaagcacaagataggctgaagctgctcaaggaacccataagaacgcctgtaatcactaggattctagtgctttaaaggccatggtgggaggactgcttgatgataagagttcaagaccagcctgggcaacatagcaagactctgtctcaacaaaaaaattttaaagttcgtctggcgttgtgatctgcctgtggtccaactactcgggaggctgaggcaggaagactgcttgagtccaagagtttgagcctacagtgagctatggttgcaccagtgcactctagcctgggtgacagagactatgactcttaaaaaacaacaaaaaaggggacatccattagggataagataaaccttaggagaaaaaaggttacatttcttacctaatatagcagatttttccgcgtcaagcatatccagagccttggtgaaaggctctgccattttggctagcatttctggtgcatataatgtattgtgggttctgaaagaaacaagaatgctattgagcttttccatctgatgcagaaggaaagagtgggttttgcttgtaatccagtgatactacagtttcacacagatctgcccatcaactcctggcaggggaaagaaaagaaggtataaatatctgaatgctcgctggaggagggaacagacttgtatagatataattatcttagtatacaatacctaagataaattaacatgagaactaaaccccaagacacaggacagtatcagagtccaaagctagaaagcaaaattcttttaaatctgaggtggtcccaggagttttttgaccaccagtgatacggaatgaaatgtgtgcaacactgtggatttacaggtaggaacacagaggaggtggtaatttgccccatttttcaatgttttgtcttaattccaagagcatggaccttgcaacagctgtttggacct

SEQ ID NO: 36266 - DNA, 2300 bp, Homo sapien
tataaaacaagctgatcttttcacagttgtagtatgggaaagtgcagttatccaaatactcaagacaagagctatcttccgcctaaattgccttgcttatttaggcaaaataaagacatataacagaattaccaaataataaccttataggcctgactttcctgggactgctttggttttcttctttcttccttgagtaagccacctctccttgaaaatcagacctttaccacctctggctttttttctttttgatctgtagcccaattttgacatgctttataaccatgtgaagcaactcctctccaatgagctactcctgacacaaatggagaagtgtgccctcatggaagccctggttctcattagcaaccaatttaagaactacgagcgtcagaaggtgttcctagaggagctgatggcaccagtggccagcatctggctttctcaagacatgcacaggtaaaggagatcccttgccctgactcttactatactcaagcacccattttggtttaagagctaggcccagggtggggtaggggttaaggatattgaagtgtgatggcattatccatgatatctgaagttctctaaaagcagtcttttgtaatttaatctctggttcaattagattgtgggtggggagggcacagagtgagactcctgtggtgtctgcattgcagcaccagcacatttagaaaaatgagaacagctaggaagggccatacaaccacacagacacttatctgtgctcacacagtagagaaattattttctttatattttgaagattatattcttgtttaattcttaaattgttactaataatatttgggagtgggaagggaaatttaaaccttcaaatgacaactgacaattagtatgattatactcctctcactataaaaactgctcttaagggccaaataatgatagcctgttaactcctgtggaagaaactgtccttgtttaaagtcatgatgtaacttgtttttccccctccaaccttcagagtgctgtcagatgttgatgctttcattgcgtatgtgggtacagatcagaagagctgtgacccaggcctggaggatccgtgtggcttaaaccgtgcacgagtaagactttcctgggaatgggaagtggcattggccatgggtaggagtagggtgttgtcttttgtcaagtttctcatagatttgttttttctatactggtgagaaacgtgggagtctccacttccctaagcttctcctttcttttcttctttagtcttgaattcttgagttagttcccacagcagagcagatggtcttttctatgaagtcattattttggctttaaggatctctaaatagctctgaagactgaaggtgtaatgaggaagtaggtcagaacttggtcagcagggtgagtcctccctgccattgctctctggcatgtaaagtcttaagtgatggcttaacttgcaaacctgagatttttcagtgctttgctatttaaataagcattgttcctggctccattatggcacaagtcccattaattaacctggcaagtagtaggttgattcagagtaccgtgaggggggattaggacactagctgtcaaggcccaataagggtcaactcaaagaagatgaagtgatggcattttaaacactttgttttggatcgtatctaagccaccttctcatcagggtcctgtgggtgggtcactgcagctcctagaaagacagcttactgcaagggaagtttccagagcctaccactggccctgaaaatggcagtgagaggatccctcttggacttcaccttaaaggaagggatgggggattgccggggagcagaggattatttcattctctctggcctctgtgtcacttttgccagaaccttgaatatatctaacagtatttggtctttttttttttttccttttaatatttatctgtcattcttatttttctatagatgagcttttgtgtatacagcattctgggtgtggtgaaacgaacttgctggcccactgacctagaagaggccaaagctgggggatttgtggtgggttatacatccagtggaaatccaatcttccgtaacccctgcacagagcagattctgaaacttcttgacaatttgcttgcgcttataaggtgagtcagaataatggcttttctctgttgttttctactttaccttaaaaatttcaaaagtttagtctgtttacatgtcttcatatcttagtggtattaatgagggattgatttaagtcttatttctttctagagggtgtctcagttt

SEQ ID NO: 36267 - DNA, 2300 bp, Homo sapien
cctgtagtcctagctactcaggaggctaaggcaggaggatcccttgagctcaagagtttgaggttacagtgagtgatgattgtgccactgtgcactccagcctaggtgacagaatgagaccctgtctctttaaaagatgaaaataaaatgtagccaaaatggttatttctaagtggaggcagccattgtcaacctgttttatgtctttgttacaggaaattcctgttaatgatggaatagagctattgcagatggttctgaactttgataccaaggatcccctcatcctgtcctgcgtccttactaatgtctctgcactctttccatttgtcacctacagaccagagttcctgccccaggtcttctctaaggtataaagcccatctcctttgtaaattttattttgacatttctaagttaatttttatttattttatttttttggagacaggatcttgctacattgcccaggctggactcaaattactagtctcaagggatcctcacacctcacccttctgagtagctgagactacaagcatgcacaaccatgcctggcctaggctaattatttttgtaactatttttaaaattatgtgaggcaaactaataaacacagctatttattcatttattaaatatctactcagtacttactgtggatcaggtaccatgctagtgcctcactctttaggaacactctgggaagaaaggcacaaaaacagttaatgttacctatatggcattgcaatgaagacttgtataaaggagagtattagagtgtgctgtcgggcagggaggggatttatgagaggaaggaacactttccaggtttccagttcagttgactaggtgggtgatagagccactccctgagtcagaataccagatcacaaaggagaacgggactaaagaagagaaagcatgagtattttggaatactgtgtttgaagaatatgtagaacatctttatggagacatctcacaataaattggctatttgaggttgaagatctagactctagaaagtaatgagataaaattaaagcatcatcatcatagtagtcccacgactaaaagtgaagtcttactgaagtgattatgtatgtagagttaggagacatgtgagtcaagcgaggaacctagtgaatcaccatcattggaggagtggagaaaaaaatgagaagcccccacagaaggaaaaagagccagagaaatgaagaaaatgttgtgtcacaagaccagtaggacttcagaaaagtgggctcatttgttgcaaattatttgagttggagaatgcccagtgagtttcttgactacactcttgtctgagtttaattccataatagtggccaagtaagcagccatatttcattggaatgaggagtaaatgggaaataatgaaatggaatagaagggatagaccatacaacttttgataaaagaagagagaggcgtttccatagccaagtgcttgggtgatggcatgaattgttctgggatcctattgtaaaatgttttgatggtaaaattgtgactccgatgactcttgtagaggttatctgagaaaatggacagtatgaataagctcatgcccgtagtcccagctactcagaaggctaaagcaggagaatcagttgagcccaggaattcaagtctagtctgggcaacatagcaagatctcatctctaaaacaaataaacatgagtgaccttttttcctcctctcccttagctattttcatctgtcacttttgaaactgttgaagaaagtaaggtaagaccattaattaaaccaatagattctaacttcttgagtacaaatgtatgaatacctgatactcagtttatatttttatataaatgggagggggtagtaagggtggtagattatcatatatgttgttttgccactatagggcatacaagaaacatggattcttggtggctataaatgttactccattatactcttagggttgtgaaaaatcattgtgaatttgcccctgactgagatattcacatgagtctatgcagcacctgtatattatattaaaagcagctccgagtttgttgaatgtctcttttcaggcccccagaacccgggcagtgaggaatgtgaggaggcatgcttgttcctccatcatcaagatgtgtcgtgactacccccagcttgtgctggtaagctgctggaccctggctgaagtagccaagtttggttacatttgtgtgtaaatccagctttcagtgtacctcacataaagaaaaaactagaaactatagctttgcatcatataagca

SEQ ID NO: 36268 - DNA, 2300 bp, Homo sapien
tgtgtgtgttttaaagcttgttctgcagttggaactggagaaggaagcctctgttccgtcttctcaccttcattcgtgcagtgggaagccatgactctttttttggaaagtgttatcacccagatgtttcgaacactaaatagagaagtaagtaattatttcccatgctgactgcatgattattttgacctttttcttttcttttctctttctattttgggacgctatatctctctgttgctcaggctgaaatgcagtggcacaatcatagctctctgtaacctccaactcctgggctcaagcaatcctcctacctcaggctcctgaggatctagaactacagttacttgccaccacacctggctaatttataataaaaatggagtctgtgttgcccaggctgatctcaaactcctggcctcaagcgaccctcctgccttggcctcccaaagtgctgagattgcgggcatgacccactatgcctggccagtaaactggtagtagaataggaaaatctatggatgtacatcttacagaagaggaaacagatttagagaggctaaatagcatactcaagttcaaacagctaataaatggcaaaatggggaccaaaactcaggtctttctaactctaagcactaccacatttagtatacattttaagtaccacactgctttagaatactgtacgccaccagtatagtggccacctgtaggtctgaaaaggagggtatgcacagagagcctcaactgtatcagtaaaatcatatttcttaaagtaggcagatgaggatttactaaattatagagaaatagacaaaagatataatccaataatgtatagaggagaacctaaagtagctgataagccgggcgcagtagctcatgcctgtaatcgcagcactttgggaggccaaggctggctgatcacttgagttcaggagttccagaccaccctggccaacatggtgaaaccttgtctctactaaaaacacaaaaattaactgggcatgctggtgcatgtctgtaatcccagctacttgggaggctgaggtacaggaatcgcttgaacccaggaggcagaggctgcagtgagccaaaatcacgccagtgcactccagcctgtgtgacagagtgggattctgtcttaaaaaaaaagaaaagggtggggcgcagtggctcaggcctgtaatcctagcacgtggaggctaaggtgggtggatcacctgaggtcaggagctcaggaccagcctggtcaacatggcgaaaccctgtctctactaaaaatacaaaaattagccgggcatggtcatgggtgcctgtaatcccagctactcaggaggctgaggcaggagaatcacttgaacccaggaggtggaggttgcagtgagctgagatcgtgccattgcactgggcaaccaagagtgatatataaataaagtagctgataaatatgaaaaacattcagcctcttgatcagttgaagaaatacaaaatttaagaggttttagggaataatacactgctgagaagatggtaagaagggcacgcacagctgagtacggtggttcacacttgtaatcccaacactttgggaggccaagatgggaggaatgcttgaacccaggagtttgagaccagcctggacaatatagtgagacctcatctctactaaaaatttaaaaaattagccaggcatggtggtgcgtgccagtagtcccacctacttgggaggctgaggccgtaggatcacttgaaaccaggagtttgagaccagcctggtcgacataacaacacttctacaacatctctacaaaaattttagaaagtatccaggcatggtggtgcccgcctgtagtcctagctactcaggaggctaaggcaggaggatcccttgagctcaagagtttgaggttacagtgagtgatgattgtgccactgtgcactccagcctaggtgacagaatgagaccctgtctctttaaaagatgaaaataaaatgtagccaaaatggttatttctaagtggaggcagccattgtcaacctgttttatgtctttgttacaggaaattcctgttaatgatggaatagagctattgcagatggttctgaactttgataccaaggatcccctcatcctgtcctgcgtccttactaatgtctctgcactctttccatttgtcacctacagaccagagttcctgccccaggtcttctctaaggtataaagcccatctcctttgtaaattttattttgacatttctaagttaatttttatttattttatttttttggagac

SEQ ID NO: 36269 - DNA, 2300 bp, Homo sapien
ttttcagccaaagtcttgcatagcactattcctgaaatcagaaaggatctcctgttagacataacaggaataatacagggacttctcatatcactcagccactccaaagcttttgtgaaattatactttacataaattcagaataatccccctctaccgaatgcctcagccagttaacttctctgtactccaaatgttttgtctctcatcttaatgcatgctatatgtgtgtgacagtattaataaagcaaaaaggctggatgcagtgactcacgcttgtaatcccagcactttgggagcccaaggcgggcagatcacctgaggtcgagagtttgacaccagcctgaccaccttggagaaaccctgtctctactaaaaacacaaaaaattagctgccgtggtggcgcatgcctgtgatcccagctacttgggaggctgaggtaggagaatcgcttgaacccaggaggtgtaggttgcggttagccgagatggcgccattgtactccagcctgggcaacgagagcaaaactccatctcaaaaaaaaaaaaaaaaaaaagtgaattaactagtgcacgtcactgctttagaaaagcaccatactactggctgacatttgagggacttaacattcagctttatttacaattgactctaaattctctgatatttggtaacttgaaaggttgaggaagcccaaatgtgttgcactaagatgaaactagtaaataggactacgctgtatgtaagcaagaaaagcaattggtaaatcttaggccaggcagggtggctcacgcctgtaatcctagcacttcaggaggccgaggctggggatcacctgaggtcaggagttcaagaccagcctggccaacatggcaaaaccctgtctctactaaaaacaaaaaattagccaggcgtggtggtgggcccctttaatcctagctactcaggaggctgaggcaggagaatcacttgaacccaggaggtggaggtttcagtgagccaagatcgtgccactgcactccagcctgggcaaagagcgggactccatctcaaaaaagaaaaaaaaaaaaaagaaaagaaaagcggctgggcacagtggctcacgcctgtaatcccagcagtttgggaggctgaggtgggtggatcacaaggtcaggagtttaagaccagcctggccaagatggtgaaacctcgtctctactaaaaaaaaaaaatacaaaaattagccgggcatggtggcaggtggctgtaatcccagctacttgggaggctgaggcggagaattgcttcaacctgggaggctaatgttgcagtgagccgagatctcgccactgccctccagcctgggtgacagaggagactccatctcaaacaaacaaaaaaagaaaagcagttggtaaatctttttgcttgtgccttgctatttgagtgctgtgctgtggtaatagttgtaaacttgaaggatggcacccttctctagacatagcccttaaggctgtcatgaggctattggatgtgaagcagtattttgtatattacattgtttccttattgggaagattctttatggtctcaattttaattatttagattctcatggaaaagattataaagggggaggaggggagaaactaattcatgtttatcaagtgcctactaatgggccaggcaatgtttttgatgttcacctgcgtattctcattcattactcaaaatggttttactacaaggctcatagaggtgaattcagaccgctcattgttagaggaggaggaggcatggtaggaaccttcacctacctcattgctttcagcacacatcatcttttctttgccccagctgagaggggttagattaccctgctccttcaatcatgaaattctcaggtgttctctaaggctccattgtctctctgtgtcttctgcgatctttcaatgctgataattgtgtgtgtgtgtgtgtgtgtgtatgtgtgtgtgtgtgttttaaagcttgttctgcagttggaactggagaaggaagcctctgttccgtcttctcaccttcattcgtgcagtgggaagccatgactctttttttggaaagtgttatcacccagatgtttcgaacactaaatagagaagtaagtaattatttcccatgctgactgcatgattattttgacctttttcttttcttttctctttctattttgggacgctatatctctctgttgctcaggctgaaatgcagtggcacaatcatagctctctgtaacctccaactcctgggctcaagcaatcctcctacctcaggctcc

SEQ ID NO: 36270 - DNA, 2300 bp, Homo sapien
gaagaggctctgtcaggtgttgtgtgcgctgggcaatcagctgtgtgcattgctggtgagctagtgtttgctttctggagagcttcaagcccatttgggaagagcatttagaaacttatgtttcaatgaggggttgcaaatgtcattgattttagcctgatggggcagtgccatacaagttattgcatgattctatagattaaattatcttaatagaatagtgtttgagtgatctaaatttcttttaacaataaaatagttataccaacgtcagatatccacgtctattattccataaagtcaacgttggtttcttgtgaattttggtacttacagaacctcaatctgctgagtgctttatgcttttacattctgttagcccacgaaacatggacttgaataaagaactcttttcccaatctaagggatgtattattggagcacaaaagaaaacttgagtctgattgacctggaaaacctgccattagagaaatatttaatactcagtcttataagttggaagataggacattggaacagacatttgcaattgatgttatatctttttgtggtggtttaaatggttagagaggatagtttcagagataagcaaccattgagggggccaggtgcaatggctcatgcctgtaatcccagcattttgggagggtgaggtgggcagatcacctgaggtcaagagtttgagactagcctggccaacatggtgaaaccctgtctctactaaaaatacaaaaattagccaggcgtggtggtgcatgcctgttatcccagctactcgagaggctgaggcaggagaattgcttgaaccctggaggtagaggttgcagtgagccgagatcgtgccactgctctccagcctgagcaacagagtgagactccatctaaaagaaaaaaaaaagaaaagaaactattgaagggattaggtaataggttgggacacagagatgtgaataggtaaggtctgaggaagtaatacagattttttttctttctgtaatttctgaaatgagtgttttttattttactgtttgaccacagaatgggttttaatgatgatgattgagtaggcaaagtaatgatgatgattgagtaggcaaagtaacctatattttagcccttgaagtgatgcctttctttagccaaaaggaaatacaaagtccttttgaaacaacattttttgagggtttaatttatctgtttttattacttccctgctttttcctctcctgcttttctcgatcaacaccgttaatatagtggtcttctcctacagggtgcagattctgatgtagaaacaccatcaaactttggaaaatacctggaatcttttcttgctttcacaacccatccaagtcaggtaaactttatacaggtaacttctcaaaagtttagttaggtgaaccaatgtcaagcactgtgtcctgaaatattattgtagatcatgtataaaatgtgactcttcaggccttggggaatgaccgtagtgtcatttcattaagagaattattggctcttcttcctgagccaaacagtgcacttgtctaggtcagcagcttttccctttaggtaatattctgattgtactcagtcacatgtgaggtgtgtcccaggtggtttagtactaaagttataaagatttttgaaacaaaagtctgattaattgtattataaaattaatttcactctgttcaaaattgtccttctaatatcactctgagattccagtatccttttttgcaaagaagagaaagtagtaaaattcagctcacattccaggtaatttccttgatccacagcctgtcttactaacatgtggtccatagtgggtggtcattactgataaattgcagtagagacagcttcaaagtattgtacagatttatttctatgaaaaaatgtagttgataactgctaagtaataatctgggttatatagaatccaaatcctttgacgttttcttttttttttctctttagtttctacgctcttcaactcagatgacttggggagccctcttcaggcatgaaatcctgtcccgtgatcctttgctattagcaataataccaaaatatcttcgtgcttccatgactaacttggtcaaggtatataatgggaatctaaacatgtggaatgtaggtgaatacacataataagactttgaggctgggtgcggtggctcacgcctataatcccagctctatggaaggctgaggcgggaggatcgcttgagcccaggagttggagaccagcctgtgcgacatggcaaaacctcgtctct

SEQ ID NO: 36271 - DNA, 2300 bp, Homo sapien
cctcatgagtagctgggactatagatgcacaccatcatgcctggctaatttttgtatttttttggttagggtattttttttattttattttattttttgtttttttggtagacactagttttgccatgttgcccaggctgttgttttaactcctgggctcagttgattcacccaccttggcctcccaaagtgctggtattgcaggtgtgtgccactgcacccagccttgggaagtaaaatgataagatttggggttttgtgaaaaagataaaatggccacacatgccagtatggtcttgttgttggatgttgagaatgtcattgtttgagaagtgattgtgttccctacctgtgactgttacatgagtatattcttaaaaaataattttcttagaattagaaaatgggagttcagttataaccactgattccttacctgttaccgaggacttcatggtccaaagttacttcttttctggtaggcgcaagcaaactgtcgagtaggagttgcagcactgaatactctagcaggctatattgactgggtgtctatgagtcacatcactgctgaaaactgtaaactcctggagatactgtgtttgctgttgaatgaacaggaacttcagttgggagccgctgagtgtcttctcattgcagtcagcagaaaagtaagttaccacttcaaactgacttatcctcagtctctgaagtaggctgtgtatgtgtttaattgcatgttgtggcagaaagtcatttaaaggtttgggtttttttccttggggccaacttactgcctgcttccaacccccttggacaggagtttgccaatattcaagggatcctttggcagaatgtggagatttatcaggctgcatggttcttgaaatagccatgatacttggcaatttacagttaacagataaaagtaaatgtttaagtttaaagctcacttaatgaatgtcaaggaatcttggatggtggctacagtaggtttatatctgtcttttttttttttttttttttttaattgaaacagtcttgctctgtcacccaggctggagtgcagtggcgtgatgttggctcactgcaacgtccgccttccgggttcaagcgattctcctgcctcagcttcccgagtagctaggactataggcacacgccaccatgcccgactgatttttgtattttttagtagagatgaggttttgccatgttagccaggctcttctcgaactcctgagctcaagtgatctgccctcctcagcctcctaaagtgctgggattacaggcgtgagccactgcgccaagcctatgtctgtcttggctaaccaatggaactgtgactcttttctccataggaatattatctacaaatgtaatttactttgctgtcatatcagcattattgcccaacacatttatttatttatttatttattttttgagatggagtctcgttctgttgtctaggctggagtgcagtggcgcaatctcagctcagtgcaacctctgcctcccgggttcaagcaattctcctgcctcagcctcctgagtatctgggattacaggcgtgtgccaccacacccagctaatttttgtattttttagtagagatggggtttcactatgttggccaggctggtctcgaacttttgacctcaagtgatccacctgctttgacctcccaaagtgctaggattacaggtgtgagccacggcacctggcctaatttttgtatttttagtagagacagggtttcaccatgttgaccaggctggtctcgaactcctgatctcagttgttccgcctgcctcgtcctcccaaagtgctgggattacaggcatgagccaccgcactcggcctgccgaacacatttaaaaatgtaagtttatgctttttcactaaactgatagttttgagaaaaaatatgtagtttatccagatttggttttaaagagttgggcttctttctagtgtttcactaaaccctggggtatataagaaattatgaagtcaatatatttgattatatacttacagaagatgtcggtactttgaagtatagtttatatgactatgtttccctaaaattgggtctagggcaagttggaagaccggaagcccttgatggtcttatttggagatgttgccatgcattatatactctccgccgcacagtgagtatctttacttttcagtgtgttttctaatttctttgtcatttttctatcttatttggatttatctgaagttcttttttttttttttattttgagatggatctcgctctgtcacccagg

SEQ ID NO: 36272 - DNA, 2300 bp, Homo sapien
gaactcctgacctcaggtgacccacctgccttggcctcccaaagtgctgggattacaggcgtgagccactgtgcccggcccactaaaaatatttttttaaattagccgggcatggtggcaggtgcctgtaatcccagctactcaggaggctgaagtggtaggagaatcacttgagctcgagaaatcaaggctgaagtgagccgagatctcaccactgcacgccagcctggacaaccagagtgagaccctactcaaaaagaaactccaacctaagctatatgtttaaagttgcaaaacctagatcaatattatgtggatctccaagcacagttgctttaaaaatatatatttaatataaaaataaaaatataaaatatataaaagttacacatatataacatttcctccaagtggtgttcactctattttatgtgtatatattatatatatattatgaataaagaactgataaacattccttccagcgtgatggttccagattttttccatgctacggccaacagtagccctactagtgttggaaaaaaatggacacaaaggaataagaaattatttgttagagacatccccctgacgtacataggggtgaaataacaatttctagggtttcttttaaaaaccttcgaggcagggagagaggataggcggtggaaaaagtaaatgcggtaaaatctttgattgctgaatttaggtgacaggaacatgcagaatcactgtcgtattctctccacttttgtgtctattttaaatattaataataaaaaccaaactaatggaacccaattgtttctgattccaaaccctgtggcagacatctacatattgtaacatttcctccaagtggtggtcactctcttttttgaagttaacatcactttaaaaatgtacagcacaagtattttctcctaaatggccatttctcacagcccacacacgttgttttatgggcaagtaagcttgaattgtattaacacccccaaactgcaacataagtcagtcccaagagcagagcattcgggtctcacgcaaactactttcaggaaaccaaagtgcccttgttaaaatgcaaagtaagtggtagaagttatctttgcgcaaaatagcctaaaaatattacactcaaaaacatgggagaagtaggggtgcgagaatttccccggaaaatgtccaagacacaaacgaaagttagcgagatgttaaagcatataagcataagggtaccagaggggctggagctcggtcagggccaggggagtgggccagcaggaaaacgtttagtgcaggagagaccataaagaacgaagctggtgttgggggcgggatctacacgtgcgcctcgggaaggcgaggggatgtcgggcttggggaatgaaaatgggcgagggtcatgttgcggacaagagtgcacagaagcgaggaaagggggaggagagggctgtgggaagctgcggcgagatgagaagcagcatagggaccggagtgtcccaggcaaaggacaggagcggcgagtagagaaggcggcgatttgggagaggcgcggagggccgcgaggggaaggtcccggggagttgggaaaggaggtccaggggccgcgtgggcgggagactaccccagttacaggcggcgccggagctgctggggctgggagagggtgtcgggaccggcccaggacgccaggaccccagctaccttgagggcttccagccggtagcgctgggtggagttggggtccatcatgaccgtcaccgctttcaccagctgctcgcacagcgcgtttacttgatccatcgccatgcctagcgccacgcgccgagagcgcacaccactgcagtcccgggaccacgaggcacgacagctccctcggcgagaccacccgttggtaccgggccgcggcgggcggcgggggtgggaagctggaggaggagcgttagcagcaactcgcgctgggaagaagccggcgctgcgcacgcgcccggcccgccactgcgcacgcgcccgcggaagtggcggctcccgtgtgcaggttgagcctaggtgggcggggcgggaggcggaagggccgcggtgcgcagccgcgtcaacggcccttcgcagcgggcgcgctgtcagacctcagtctggcggctgcattgctgggcgcgccgctctcgtctgatccctgctggggacggttgcccgggcaggatcctttacgatcccttctcggtttctccgtcgtcacagggaataaatctcgctcgaaactcactggaccgctcctagaaaggcgaaaagatatt

SEQ ID NO: 36273 - DNA, 2300 bp, Homo sapien
gtgctgggattacaggcgtgagccatcgcgctcggcctagcatggggatttttttttttcctagacagagtctccgtctgtcacccaggctgaagtgcagtggtgagatctcagctcactgcaacctccatctcccggtttcaagtgattcctctgcctcatccccattagctgggactacaggcgcgtgccaccccgcccggctaattttttgtatttttagtagagacggggtttcaccgtgttagccaggatggtctcgatctcctgacctcgtgatccgcccgcctcggcctcccaaagtgctgggattacaggcgtgtgccaccgcgccaggccggggatttttaaaagctctccaggtaattccaatatgcagcagtttgggagccaagacctaaataagacaatcgaaacaccagcaatccatgatttaaatacgagaaacacaggttatacagttgagtgagcacccaactgtattctaaaaaaagtttttcaaaaactaacattcaccttgaaaaaaaaaacgtcttacaactgcaaagcaggaaggtgagtggaaagaaaaataattaaaatcagagcagtcaaagcattaattccttataaattccaatcgaccacgcctaaaacaggcagaatgtgatactttaaacatttacaagttaaaactataacatgccagaagtccctctactttgaagtggcttttcagtagtactggaacagactgagccaacaaatagtattgtaacacaaaaaaacacaggctaagcaccatattagatccaaataccagaagtggagcaagaataggaagcagtgatttatgttcagcacacaatttactaagcacacaatcacaaaaacagacatgcagactttaacagataataaagctgttgaggttttccgtttatgtatttactggagaaagcaagagctttatttatttatttttgagacggagtttcgctctgtcgcccaggctggagtgcaaaggcgcgatctcggctcactgaacctccgcctcccgggttcaagcgattctcccacctcagcctcccgagtagctgggattacaggcgcgcaccgccacgcctgtataaaaatactaaaaatgcaaacataatttttgtatgtttagtagaaacggggtttcaccatgttggtgaggctggtctcgaactcctgacctcaggtgatccgcccgcctccgcctcccaaagtgctgggattacaggcgtgagccaccgcgcccggccaagagctttataaagatggaaaatgaagaagactttctgcccaagccatgcttttggataaggattacactactttgaaaccttatacatagcacttggccaattatcaaaactgcacaaaccttcactgattgcaattattccctttaaacatctcgagttaccccaatccgcacaaaacaagtttagtgcccaccaggtaataatacatccaggaaagtaattccaagagagaggtttaacaactacagggaaaaacatacttttttctacaagaaaaatcttagaagacagtaccagggccttatccctgttagcatgatttatatttcacgcaaccttggcccagtcactgctacattataaaaccaatagccaaggcaacatagaaagtctgaacacagtgacagcgaacggttctaaattttcttaccaaggtaacaaacacctggcaaaactgccagcagcggttgccgaaaatgctgggttcggtgcctactggaaggaaaatggaagggctcctgaatatcttttcgcctttctaggagcggtccagtgagtttcgagcgagatttattccctgtgacgacggagaaaccgagaagggatcgtaaaggatcctgcccgggcaaccgtccccagcagggatcagacgagagcggcgcgcccagcaatgcagccgccagactgaggtctgacagcgcgcccgctgcgaagggccgttgacgcggctgcgcaccgcggcccttccgcctcccgccccgcccacctaggctcaacctgcacacgggagccgccacttccgcgggcgcgtgcgcagtggcgggccgggcgcgtgcgcagcgccggcttcttcccagcgcgagttgctgctaacgctcctcctccagcttcccacccccgccgcccgccgcggcccggtaccaacgggtggtctcgccgagggagctgtcgtgcctcgtggtcccgggactgcagtggtgtgcgctctcggcgcgtggcgctaggcatggcgatggatcaagtaaacgc

SEQ ID NO: 36274 - DNA, 2300 bp, Homo sapien
ccttcctttccatcacaagtccaggcctttagaacgtctgaacagctggctttaagttggggttcctgcaaccccctctttggatttgattaatttgctgaagcgactcacagaactcaggagaacacttacttatgtttattataagggatattacgaaggatacagataggttgggcatggtggctcacgcctgtaatcctagcactttgggaggctgagacaggaggattgcttgagctcagaagtttgagaccagcctgggcaacatagtaagacctcgtctctaccaaaattaaaacaaaaacaaaaacaaaaaaatttagctagacatggtgttgtgcagctctagttccagctactcaggaagctgaggtgggagggtcgcttgagcccaggagattgtggttccagagagtcatgatcaaaccactgcatgcagcctgggcaacagtgagatcctgtcaaaaagaagatgaagatgaagagatatatagagcaaggcatgtgagaaggggtgcggagctttcatgccctccctgggtgagccaccctccaggaatctctactattacagctatttggaacctctccggaccctgtcctcttgggtttttagggaggctccgttatgtactcatgactgattaaaccattggctatgggtaatcaacttgacctgcagtatctctcttcctctcccctccccagaagttgagggggtggggccaaaagtcccaaccctctaattatgccgtggtctttttggtgacctgccctatcctgaagctattagttaacattagcatacaaaaagacaaaacttgggtgattccaaggatttttggagttgtatgccaggaaactgggatgaagaccgaatatatatttcacaatattataagtatccttttctggctgtgtgtatgagtatattgctctttcttttctttttttttttttttttgtgggtgggggacggagtttcactcttgttgcccaggctagggtgcaatggtgcaatctcggctcaccacaacctccatctcttggattcaagtgattctcctgcctcagcctcccgagtagctgggattacagtcatgtgccaccgtgctggctaattttatatttttagtagaaatggggtttctccatgttggtcaggctggtctcgaactcctgacctcaggtgatccacccacctctgcctcccaaagtgctgggattacaggtgtgaactgctgcgcccgatcttgctctttattttctttgaggcctatcctcttcctagttcaaataatgatttaaaaaaaaaaaaagtcaagtatttctctaattctctaatttgagagtgttttagaacaataattatattagtttttatgggtgtcatggtgaagaggtaccgatgttttcatttttatggtaaatataaagtcaataggaacaaagaactggacactacaaagcaggtccaagccaaaggaaagcaaatatctgtatattggccggatgtggtggctcacgccggtaatcccagcacttggggaggccgaggtgggtggatcacctgaggtcaggaattcgagatcagcctggccaacatggtgaaaccctgtctctactaaaaatacaaaaaaattcaccaggcgtggtggcaggcgcctgtaatcccagctacttgggaggctgaggcaggagaattgcttgaacccgggaggtggaggttgcagtgaggcgagatgccactattgcactccagcctgggagacaagagcgagacttcatctcgaaaaacaagaaaaaaaagaaaatatctgtatattgtcgtagaaaactaggtatagagccagaagagctgcttattaaagtttgaatagaagacatacgatgagattggtatgtataccctgaggaaggttgtctgcctgcccagacacatcaccacattctaggtgcttatcttcaacttgatcatttgaatattagtatatccgtaaatggttggttaaggcatgtgtgtgtatgtggtgatgaccagttcacatgttaaccaaactcaccgttgactgaagtataaaatccatatgccagtttgttaatttatggtgagaaatactatcctggggaagaccatatactctggttcactgatcagtgcagtgttgcatgtaaattaccctttttttgaagacaaaattagaagcagaagatttcttggtggatatatgaaaataaaaggaataggtgatcatagtaatacacaaatttgaggcatttctttattttttagagag

SEQ ID NO: 36275 - DNA, 2300 bp, Homo sapien
atttggaacctctccggaccctgtcctcttgggtttttagggaggctccgttatgtactcatgactgattaaaccattggctatgggtaatcaacttgacctgcagtatctctcttcctctcccctccccagaagttgagggggtggggccaaaagtcccaaccctctaattatgccgtggtctttttggtgacctgccctatcctgaagctattagttaacattagcatacaaaaagacaaaacttgggtgattccaaggatttttggagttgtatgccaggaaactgggatgaagaccgaatatatatttcacaatattataagtatccttttctggctgtgtgtatgagtatattgctctttcttttctttttttttttttttttgtgggtgggggacggagtttcactcttgttgcccaggctagggtgcaatggtgcaatctcggctcaccacaacctccatctcttggattcaagtgattctcctgcctcagcctcccgagtagctgggattacagtcatgtgccaccgtgctggctaattttatatttttagtagaaatggggtttctccatgttggtcaggctggtctcgaactcctgacctcaggtgatccacccacctctgcctcccaaagtgctgggattacaggtgtgaactgctgcgcccgatcttgctctttattttctttgaggcctatcctcttcctagttcaaataatgatttaaaaaaaaaaaaagtcaagtatttctctaattctctaatttgagagtgttttagaacaataattatattagtttttatgggtgtcatggtgaagaggtaccgatgttttcatttttatggtaaatataaagtcaataggaacaaagaactggacactacaaagcaggtccaagccaaaggaaagcaaatatctgtatattggccggatgtggtggctcacgccggtaatcccagcacttggggaggccgaggtgggtggatcacctgaggtcaggaattcgagatcagcctggccaacatggtgaaaccctgtctctactaaaaatacaaaaaaattcaccaggcgtggtggcaggcgcctgtaatcccagctacttgggaggctgaggcaggagaattgcttgaacccgggaggtggaggttgcagtgaggcgagatgccactattgcactccagcctgggagacaagagcgagacttcatctcgaaaaacaagaaaaaaaagaaaatatctgtatattgtcgtagaaaactaggtatagagccagaagagctgcttattaaagtttgaatagaagacatacgatgagattggtatgtataccctgaggaaggttgtctgcctgcccagacacatcaccacattctaggtgcttatcttcaacttgatcatttgaatattagtatatccgtaaatggttggttaaggcatgtgtgtgtatgtggtgatgaccagttcacatgttaaccaaactcaccgttgactgaagtataaaatccatatgccagtttgttaatttatggtgagaaatactatcctggggaagaccatatactctggttcactgatcagtgcagtgttgcatgtaaattaccctttttttgaagacaaaattagaagcagaagatttcttggtggatatatgaaaataaaaggaataggtgatcatagtaatacacaaatttgaggcatttctttattttttagagagttccttgtcatatagacgtgttcatagtctgaatgctttctgccttggtagttctggcattgtgctaaaaatgtttgcctccgtgattcttccttttccatgcttctattattgaccatctgcctgccgattgaccctttcagttactattgtctagtctctgttaagccacatgtctcttgattacgtgtattattgttcattatggcagggtgggagtggagcagacaatctcaaggttgcctctgtttattgcctgcatgaatgatccttatacttcttaggtaccgggaagccagtgttgaagtgatggagataatgtctcgttttgctgtgattgaacgtgccagcattgatgaggcttacgtagatctgaccagtgctgtacaagagagactacaaaagctacaaggtcagcctatctcggcagacttgttgccaagcacttacattgaagggttgccccaaggccctacaacggcagaagagactgttcagaaaggtacttccatagcatcatactgcttctgcttcctgcctttggaacctgctttgcttggtcatgctgattctccttgg

SEQ ID NO: 36276 - DNA, 2300 bp, Homo sapien
agtcaataggaacaaagaactggacactacaaagcaggtccaagccaaaggaaagcaaatatctgtatattggccggatgtggtggctcacgccggtaatcccagcacttggggaggccgaggtgggtggatcacctgaggtcaggaattcgagatcagcctggccaacatggtgaaaccctgtctctactaaaaatacaaaaaaattcaccaggcgtggtggcaggcgcctgtaatcccagctacttgggaggctgaggcaggagaattgcttgaacccgggaggtggaggttgcagtgaggcgagatgccactattgcactccagcctgggagacaagagcgagacttcatctcgaaaaacaagaaaaaaaagaaaatatctgtatattgtcgtagaaaactaggtatagagccagaagagctgcttattaaagtttgaatagaagacatacgatgagattggtatgtataccctgaggaaggttgtctgcctgcccagacacatcaccacattctaggtgcttatcttcaacttgatcatttgaatattagtatatccgtaaatggttggttaaggcatgtgtgtgtatgtggtgatgaccagttcacatgttaaccaaactcaccgttgactgaagtataaaatccatatgccagtttgttaatttatggtgagaaatactatcctggggaagaccatatactctggttcactgatcagtgcagtgttgcatgtaaattaccctttttttgaagacaaaattagaagcagaagatttcttggtggatatatgaaaataaaaggaataggtgatcatagtaatacacaaatttgaggcatttctttattttttagagagttccttgtcatatagacgtgttcatagtctgaatgctttctgccttggtagttctggcattgtgctaaaaatgtttgcctccgtgattcttccttttccatgcttctattattgaccatctgcctgccgattgaccctttcagttactattgtctagtctctgttaagccacatgtctcttgattacgtgtattattgttcattatggcagggtgggagtggagcagacaatctcaaggttgcctctgtttattgcctgcatgaatgatccttatacttcttaggtaccgggaagccagtgttgaagtgatggagataatgtctcgttttgctgtgattgaacgtgccagcattgatgaggcttacgtagatctgaccagtgctgtacaagagagactacaaaagctacaaggtcagcctatctcggcagacttgttgccaagcacttacattgaagggttgccccaaggccctacaacggcagaagagactgttcagaaaggtacttccatagcatcatactgcttctgcttcctgcctttggaacctgctttgcttggtcatgctgattctccttggaataattgaaaggaaacttaaactacagcctgaatgaatcacaaggactcacatggaaggatatacaaattttcttatctttccaggtatatggctgttgagaagctgtgaaatctgtatgaaagtaaatttctctttagatataactagggcaggttagtgttatcaatagaaggcagagacctggcgcggtgattcacgcttctaatcccagcactttgggaggccgaggtgggtggatcatgaggtcaggagttcaagaccaacctggccagcatggtgaaaccccatctctactaaaaatacaaaaattagctgggcatggtggcgcgtgcctgtaatcccagctacttgggaggctgaggcaggagatttgcttgaaccaggacccaggaggtggagattgaggtgagccgagatctcgccactgcactccagcctaggctacagagggagactccgtctcaaaaaacaaaaaaatcaatagaaggctgactgagcactttgtcattggtagcttaatttatattattataacttagtgtcttggtttcttcatatataagaagggtgagctttttaaaggggggcctcaggtatagggagttgagtgattcaaaatttctaatcacttcttagcacattattacatatgggctgcacaaggcccctctcattgtattttgctacttttaccctttatagtgattttcccactccctctgtgccgcacctaccctcttgtacccacagatacatttgatatatcttagatgtctgtctttccttccttccttctttccttccttcctcccttcctttcttttctttctttccctttctttctttctttcttttt

SEQ ID NO: 36277 - DNA, 2300 bp, Homo sapien
tagtagtgaaggacataggatgggggtagagtgtggagactttttgaaatagtatagatgaatgccctgaggggactgtgaacaagctctgcccctcttaggaaatcaatggggaatcaactaaattaaataaaaaatggggtcaagattaagaggcagggtcacccagggaatggtttaggtcctggcaactctgaaggggttggaagggctggcaggaggcactgagggccctgggccctgggccaggtggtgaattacagcgactcacggacagcagaagagatctgtgagagcagctccaagatgatcaccttcatcgacctggcaggccaccataagtacctacacaccaccatctttggcctcacatcatactgccccgactgcgccctgctcctcgtcagtgccaacactgggattggtacgaggcattagggcagggacagggctgaaggggggtgctgactctcctaccctgggcctcaaatcttggagacagaccaatgctcctcttcttccctctcctccctcctgcattctcactcttctctcctgctgcttgctgtccttatgaggcagctggcaccacaagggaacatctggggctggccctggccctgaaagtgcccttcttcatcgtggtcagcaagatcgacctatgtgccaagaccacagtggagaggacagtacgccagctggagcgggtcctcaagcagcctggctgccacaaggtccccatgctggtcacctctgaggatgatgccgtcactgctgcccagcagtttgctcagtcacccaagtaagcccaccttactctaaagccctgatccactaggaaggctgccacagagcccagggcccagaagcatgatatcctacttctccagggccagaccagttctggcttagttctgcgggtgtttcagcttgggattgtggaggggcatcttgctaaagggcttgaccctcctcccgagccaacctggagcactgctgatgcctgggaccatggcgatgaagtgctataccaggcatttgctgtttcccttgggctcggatgggctttttgtgtgacattgctcgactggctcacaagaaggcccagagttcctgagccatttgcagacaggagagaggggcccccagccagaacaaagctcacctttccatgtatggggctctggcctctgcctcctgtttggactgtcttcatctgtccattccatgcctccctctacagtgtcacccccatcttcacattgtccagtgtgtctggagagagtctggacctcctcaaagtctttctgaatattctgccgccactcaccaacagcaaagagcaggaggaactcatgcagcagctgacggagttccaggtagttgactgcccaaacatctaataggctgggaaacagggaggggctgcttcagaccaaacccagagtctgtttagagattttggacccaccagccctacttggcaggccattgatagcgttttctttggcttcaggtggatgaaatctacacagtaccagaggtggggactgttgttggaggaacactttccaggtaaattgtcttgcttgctaccctccccactcagccctcacctatatactcaaagacatcctggcccaaaggaggagaccctggaattgaacggaacccatttaaaggacatgcttatttgcagattaggctttcactatcagaagagctggagaacggtagtctgttggctttggagggaagaaacagtattgctgcctattggggaatctccaggcccctgagagagaagtgtgggtcttgagctccaggaagaaaactagagtgtattcaactgacttcatctcacacagggaaatgagagacgtcacttaagactcttctttctttctttctttcttttttttgagacagagtctcgctctgttgcccaggctggattgcagtggagcgatcttggctcactgcaacctctgcctcctgggttccagcaattctcctgcctcagccttgagtagctggaattacaggcgcctaccaccatgcccggctaatttttgtatttttagtagagatggggtcgtcaccatattggccaggctggtcttgaattcctgacctcaagtgatccacctgcctcagcctccccaagtgctaggattacaggtgtgagccaacgcggctggcctaagactctgcaaagcagagaatgaaacccaaggggataacttgctccttcagtgattaggtgttcggtgttgttaaaccagcaagtgtctctctgt

SEQ ID NO: 36278 - DNA, 2300 bp, Homo sapien
tgcttctgtgctgtgctacccactggagctagaagagactgtggggtggattcaggatttcacctccactgaggttagggggcaagaggtaaaggccatagcgagtctgtccgcttcattacattttctgagtttttctgttcctctcagccccagctttggagctcttctcctctctcacctagatcttctcggtcatcaggcttgtagtgaccattgctgagctcaccctttggctctgatccagaacctcttgcagcctcttactctagatgacatcagctgaaaggggcaggcagggaggaaatggtgtttcctagaccagtgacaaagaaaggttttaacagcctgggcacagaggagacatagacttctgggaaaagcaggtttgaggccctggaggtggggaggaagggatgatcttgcatctaggaagaacgtgctgccagtgatcaaagaatggattgattcagtgttctgttcctggcttaaatgggtgactccttgtgtccttataggccttcccttcatagaggctatgctgggggtgaatagaggatcttgtctgccactgacctttgacaggcacttgcctaaccaagtgccagtggggcttcctgctttctcaagttagctacctggacccagtgggaattgaggggaagtagggattgggtctgtacagtgtatggtaactgctcactgtttcttttcaggctgaagatggaaacattgaatataaagtgagtcctaggctggggaaaagcaggggctggggtaggttgtccttgccagtgtgggataatttcttttttctttctttcttttttttttttgagatgaagttttgctcttgttgcctaggctggagtgcagtggcgcaatctcagattctcctgcctcagcctcccaagtagctgggattacaggcatgcgccaccatgcctggctaattttgtatttttagtagagatgaggtttctccatgttggtcaggctggtctcgaactgctgacctctggtgatccaccagcatgggataagttctctgagagccttccaacttcataattatagcagtttaaggatatggttcaggttaagggctctgtacctcgttctgttggagggggatcaggtatgagtttaagtggaaagagaaagtcctggtccttgcagcagaacaggtggggaccatgtaggtttgggaggaacacctctgatttcaccttatgataccccacttgccctaagttgaagctggtgaatccatcccagtaccgctttgagcacctggtgacacaaatgaagtggcggctccaggagggacgtggtgaggccgtctaccagattggggtagaggacaatgggctgctggtggggctggctgaggaggaaatgcgagcttcgctcaagaccctgcaccggatggcagagaagtatgcttccccttccccaccagttctcctttacctgacttggggggacccatgcatacccagttacctagggcctgaggggccaaggtgggactttccttctcttgacaaagggctgaagtggggagggttagtgttttggtcccctcctcactggacctaggctgttttgctccttgaattaagatatgtatatttgttttaaagggaactgtgaatgaggaatagattggagggtggtaggaagtgcactaaggtattgggagctctgtgggaggtgcaggaagtctgtaggtccagagcgagcctggaataggagaaggacaggtgagatatggcagctgtggccttgctgtgacagggttggggcagacataaccgttcttcgagagcgagaagtggattatgatagcgacatgccccggaagatcaccgaggtgctagtacgaaaggtccctgacaaccaacaggtgagcacacacccatccctgtctctcatgtccacactgtggaagggccctgtggtggcaggctgtctcctggcctgggatcctgggggcttccagttcatcacttgctccctagggagcgtcactgcccttgacccagtcttcagttagaggggtgagagattggagttcttatctctggcaattcatccacagttcctagacctccgtgtggccgtcctggggaatgtggactctgggaagtcaactctgcttggagtcctgacccagggagagctggacaatgggcggggccgggctcggctcaaccttttccgccacctgcatgagattcagtctggccgaacctccagcatcagcttcgagatcctgggctttaacagcaagggag

SEQ ID NO: 36279 - DNA, 2300 bp, Homo sapien
atgttcactacacacacacacacacacacacacacacacacacagcctaagccagtggttatcaaactttggcatgtatcgaatcacccggattgctggcccccaacgcctggccaattttatttttttattatttatttatttattttttttgagacggagtctctgttacccaggctggagtgctgtagggctatctcagctcactgcaacctcggcctcccgggttctcaagcgattcttctgctgcagcctcccgagtagctggcattacaggtgcccgccaccacgcccagataatttttgtatttttagtagagatggggtttcaccatgttggccaggctggtctcaaactcctgacctcaggtgatccacccgcctcggcctcccaaagtgctgggattgcaggcgtgagcctccgtgcccagcctagaatttctgattctttcttactagtgaggatgggcctgagaatttgcatttcttataagttcccgtgtgatactaatgctgctggtcccaggacctcactttgggaaccattggtctgggccctagactgtcattcttgtaccacattttttgaagccacccatccccagaaaaatgattaaaaggtttttattgatggggaaaaaaaataatctccttaacacaccatgaagtggagattatgagtgaagacctgttagggcctgggagccagacagccttgaagggatggaatgataggaagggaagaggaaaactaaaatatccagagaggcgggtagaaaaatgcagactggccaaacaggcaaatcccatatccctttgtacctgggaggggaagcctcaggtaacagggtgcttctgtgctgtgctacccactggagctagaagagactgtggggtggattcaggatttcacctccactgaggttagggggcaagaggtaaaggccatagcgagtctgtccgcttcattacattttctgagtttttctgttcctctcagccccagctttggagctcttctcctctctcacctagatcttctcggtcatcaggcttgtagtgaccattgctgagctcaccctttggctctgatccagaacctcttgcagcctcttactctagatgacatcagctgaaaggggcaggcagggaggaaatggtgtttcctagaccagtgacaaagaaaggttttaacagcctgggcacagaggagacatagacttctgggaaaagcaggtttgaggccctggaggtggggaggaagggatgatcttgcatctaggaagaacgtgctgccagtgatcaaagaatggattgattcagtgttctgttcctggcttaaatgggtgactccttgtgtccttataggccttcccttcatagaggctatgctgggggtgaatagaggatcttgtctgccactgacctttgacaggcacttgcctaaccaagtgccagtggggcttcctgctttctcaagttagctacctggacccagtgggaattgaggggaagtagggattgggtctgtacagtgtatggtaactgctcactgtttcttttcaggctgaagatggaaacattgaatataaagtgagtcctaggctggggaaaagcaggggctggggtaggttgtccttgccagtgtgggataatttcttttttctttctttcttttttttttttgagatgaagttttgctcttgttgcctaggctggagtgcagtggcgcaatctcagattctcctgcctcagcctcccaagtagctgggattacaggcatgcgccaccatgcctggctaattttgtatttttagtagagatgaggtttctccatgttggtcaggctggtctcgaactgctgacctctggtgatccaccagcatgggataagttctctgagagccttccaacttcataattatagcagtttaaggatatggttcaggttaagggctctgtacctcgttctgttggagggggatcaggtatgagtttaagtggaaagagaaagtcctggtccttgcagcagaacaggtggggaccatgtaggtttgggaggaacacctctgatttcaccttatgataccccacttgccctaagttgaagctggtgaatccatcccagtaccgctttgagcacctggtgacacaaatgaagtggcggctccaggagggacgtggtgaggccgtctaccagattggggtagaggacaatgggctgctggtggggctggctgaggaggaaatgcgagcttcgctcaagaccctgcaccggatggcagagaagtatgcttccc

SEQ ID NO: 36280 - DNA, 2300 bp, Homo sapien
ctcctgggagttgtagggcggcgacgtgtcatttaagtgaattcccaggcctggggactctatatcccgtggtgccccgcggctgtttctgacgcgacccggaggccagggaggtggggggcgtagcttgtgcagagccccaccccactctgctcaggccggccggacacggcagtggcagtaagggcggcggcgacggcggcggcggtcgggggaggggccgggcggggggctggcggcagcggcggatggactcgcgggtatcggagctgttcggcggctgctgccggcccggagggggcccggccgtgggcggaaccctcaaggctaggggggccggcagcagcagcggctgcggggggccaaagggaaagaagaagaacggaaggaacagagggggcaaagccaacaaccccccgtatttgccccccgaggtgagcacctgagaagtggtagggcgggaagaagccactctttccggcccaggactctagggaggcgggacccagataattaatctccccttccggtgtcgagaccccagggaggaggggcacgggaggagaacacctctttcaggtcccgggaccccagggaggaagggcagagactggactctcaggtgacaggacctcagggaggaagagtggagagggaggactcccccttctgatctagattaccccaggagagaagtagagaaaggggatcccaggaagagcaccccgaccaactgcgtgtgccgccatagggcaagagagactgcatcctgggacgagaggcagacagtaaccaccacttcttctaaacttgttccacagggagaaggggagtacccgggaaaagagcaatatgttccacacggacacacacacagtactcgggaaaagagcagtatgttcactacacacacacacacacacacacacacacacacacagcctaagccagtggttatcaaactttggcatgtatcgaatcacccggattgctggcccccaacgcctggccaattttatttttttattatttatttatttattttttttgagacggagtctctgttacccaggctggagtgctgtagggctatctcagctcactgcaacctcggcctcccgggttctcaagcgattcttctgctgcagcctcccgagtagctggcattacaggtgcccgccaccacgcccagataatttttgtatttttagtagagatggggtttcaccatgttggccaggctggtctcaaactcctgacctcaggtgatccacccgcctcggcctcccaaagtgctgggattgcaggcgtgagcctccgtgcccagcctagaatttctgattctttcttactagtgaggatgggcctgagaatttgcatttcttataagttcccgtgtgatactaatgctgctggtcccaggacctcactttgggaaccattggtctgggccctagactgtcattcttgtaccacattttttgaagccacccatccccagaaaaatgattaaaaggtttttattgatggggaaaaaaaataatctccttaacacaccatgaagtggagattatgagtgaagacctgttagggcctgggagccagacagccttgaagggatggaatgataggaagggaagaggaaaactaaaatatccagagaggcgggtagaaaaatgcagactggccaaacaggcaaatcccatatccctttgtacctgggaggggaagcctcaggtaacagggtgcttctgtgctgtgctacccactggagctagaagagactgtggggtggattcaggatttcacctccactgaggttagggggcaagaggtaaaggccatagcgagtctgtccgcttcattacattttctgagtttttctgttcctctcagccccagctttggagctcttctcctctctcacctagatcttctcggtcatcaggcttgtagtgaccattgctgagctcaccctttggctctgatccagaacctcttgcagcctcttactctagatgacatcagctgaaaggggcaggcagggaggaaatggtgtttcctagaccagtgacaaagaaaggttttaacagcctgggcacagaggagacatagacttctgggaaaagcaggtttgaggccctggaggtggggaggaagggatgatcttgcatctaggaagaacgtgctgccagtgatcaaagaatggattgattcagtgttctgttcctggcttaaatgggtgactccttgtgtccttataggccttcccttcatagaggctatgctgggggtgaata

SEQ ID NO: 36281 - DNA, 2300 bp, Homo sapien
gctcagcaatggtcactacaagcctgatgaccgagaagatctaggtgagagaggagaagagctccaaagctggggctgagaggaacagaaaaactcagaaaatgtaatgaagcggacagactcgctatggcctttacctcttgccccctaacctcagtggaggtgaaatcctgaatccaccccacagtctcttctagctccagtgggtagcacagcacagaagcaccctgttacctgaggcttcccctcccaggtacaaagggatatgggatttgcctgtttggccagtctgcatttttctacccgcctctctggatattttagttttcctcttcccttcctatcattccatcccttcaaggctgtctggctcccaggccctaacaggtcttcactcataatctccacttcatggtgtgttaaggagattattttttttccccatcaataaaaaccttttaatcatttttctggggatgggtggcttcaaaaaatgtggtacaagaatgacagtctagggcccagaccaatggttcccaaagtgaggtcctgggaccagcagcattagtatcacacgggaacttataagaaatgcaaattctcaggcccatcctcactagtaagaaagaatcagaaattctaggctgggcacggaggctcacgcctgcaatcccagcactttgggaggccgaggcgggtggatcacctgaggtcaggagtttgagaccagcctggccaacatggtgaaaccccatctctactaaaaatacaaaaattatctgggcgtggtggcgggcacctgtaatgccagctactcgggaggctgcagcagaagaatcgcttgagaacccgggaggccgaggttgcagtgagctgagatagccctacagcactccagcctgggtaacagagactccgtctcaaaaaaaataaataaataaataataaaaaaataaaattggccaggcgttgggggccagcaatccgggtgattcgatacatgccaaagtttgataaccactggcttaggctgtgtgtgtgtgtgtgtgtgtgtgtgtgtgtgtgtagtgaacatactgctcttttcccgagtactgtgtgtgtgtccgtgtggaacatattgctcttttcccgggtactccccttctccctgtggaacaagtttagaagaagtggtggttactgtctgcctctcgtcccaggatgcagtctctcttgccctatggcggcacacgcagttggtcggggtgctcttcctgggatcccctttctctacttctctcctggggtaatctagatcagaagggggagtcctccctctccactcttcctccctgaggtcctgtcacctgagagtccagtctctgcccttcctccctggggtcccgggacctgaaagaggtgttctcctcccgtgcccctcctccctggggtctcgacaccggaaggggagattaattatctgggtcccgcctccctagagtcctgggccggaaagagtggcttcttcccgccctaccacttctcaggtgctcacctcggggggcaaatacggggggttgttggctttgccccctctgttccttccgttcttcttctttccctttggccccccgcagccgctgctgctgccggcccccctagccttgagggttccgcccacggccgggccccctccgggccggcagcagccgccgaacagctccgatacccgcgagtccatccgccgctgccgccagccccccgcccggcccctcccccgaccgccgccgccgtcgccgccgcccttactgccactgccgtgtccggccggcctgagcagagtggggtggggctctgcacaagctacgccccccacctccctggcctccgggtcgcgtcagaaacagccgcggggcaccacgggatatagagtccccaggcctgggaattcacttaaatgacacgtcgccgccctacaactcccaggaggcatcgcggcgcaagtggccgcgggagtcgtcggaggcgtggggaaggagcgcgccttggcgcgcaaaggcttaagggagctgtagtctgacttccagtcctcgcgctatgttctttttctaggacttggggggaatttagagcctcgaggcctggggtggggacgcgaggacaccagcgtagaagagcttacatcagaatcgagctttgtgggcgctccgggatttggccctttagcgcggatcctagacaacaggttttggacctcgagagctgcagaactgaggctactggtgccgccagcctgctggctccgcctctgcctcagt

SEQ ID NO: 36282 - DNA, 2300 bp, Homo sapien
cttgagatctctcactgagttccctagtctctgtctctaagcagcagtttccctagtaggcctgtgcccctggctagcattgacctctacggcataacctttccttcagtggcacaggactaagaaaagtcacatgtgctttcaaccactgaagacccacataattggcctatggtcagctaggcccttttgcagattttggtctctctgctctcactgctttgggaaattatgctatgtggacagcatgatcagtaaacctgcctccctccttgtggccctgggaggaagccatggactctaccaagtctgaacccctgaagggatcaccagaggtaagtcattattgctgcttctagttttccaaggacaactgaggtctggagagaagagttgcttaatttctttttctttctttttttttttttttttttttttgagacgaagtctcgttctgtcacccaggctggagtgcagtggcatgatctcagttcactataacctctacctcccgagttcaagcgattctcctgcctcagtctcccgagcagctgggaccacagatgtgcaccatcatgctgggctaattttttttttttttttttagttggagtctcgctctgttgcccaggctggagtgcaatggcgtgatctcgggtcactgcaacctccgcctcccgggttcaagcgattctcctgcctcagcctcgcgagcagccgggattacaggcatgcgccaccacgcccagctaatttttgtatttttagtagagacggggtttcgctgtgttggccaggctggtctcgaacacctgacttcaggtgatccgcacactccttggcctcccaaagtgctgtgatttacaggcgtgaggcaccgcacccggctgagttgtttaatttcttgaccgtgtatgagcacctcgcagttcgagaagaggggagaagtggacacactgtgagtggtctgagtcatgagacagccatgcggctgtgaattgagccctagcgtcctgactcgcagctcagcaacataactgcttttccaccctgcctttctgtgttctgtgcactggcttatgtcgctgaatgtatgtactctgtagagtgcaacagcactaaagagctggagattgcttcacaagagagtcaaaagccaaaaatcccctgtggccctaggccaagtttctattcccggccactgccccgccctcgtggtggttggtgtaacccgagccctagccccgcccgaagtaggggccaggcccctcctacagtcttggccgtttaaaaccaaactcagttcttcccgattggttctgcttcaaaacaaaggggaggaggaatactcgctttgggtatgcttgcagccttcggggaggaagctggtttacgggttcgggtctcgtgtcggggccaccgcggtgcctccggttattaaaaccagcccctggacggtgccagcctggtaataaagcagtgactactatgtaaaggtagcataatcatcccaacaataacagccgtaatttggctaatcaccatccgcctccgccctggcgttcgccctgactcaccccagcggcacgcgggccataggggaagaaactgaggcagaggcggagccagcaggctggcggcaccagtagcctcagttctgcagctctcgaggtccaaaacctgttgtctaggatccgcgctaaagggccaaatcccggagcgcccacaaagctcgattctgatgtaagctcttctacgctggtgtcctcgcgtccccaccccaggcctcgaggctctaaattccccccaagtcctagaaaaagaacatagcgcgaggactggaagtcagactacagctcccttaagcctttgcgcgccaaggcgcgctccttccccacgcctccgacgactcccgcggccacttgcgccgcgatgcctcctgggagttgtagggcggcgacgtgtcatttaagtgaattcccaggcctggggactctatatcccgtggtgccccgcggctgtttctgacgcgacccggaggccagggaggtggggggcgtagcttgtgcagagccccaccccactctgctcaggccggccggacacggcagtggcagtaagggcggcggcgacggcggcggcggtcgggggaggggccgggcggggggctggcggcagcggcggatggactcgcgggtatcggagctgttcggcggctgctgccggcccggagggggcccggccgtgggcggaaccctcaaggctaggggggccggcagcagcagcggctgcggggggcc

SEQ ID NO: 36283 - DNA, 2300 bp, Homo sapien
ccctctgtcacccaggctggagggcagtggtgcgatcacagctcactgtagcctcaacctcccaggctcaagcaatcctcccacctaagcctcccaaagtgctgggagtacaggcatgagccaccttgcccggccatttgtctatttttctttatcctcctgtgggtactctttagtcttctccatagcttctgtctctctggtcatcccctaaacattagtgtcttcaatatcctagcccattctcattctacaccctccctgggtgatcttattcactaacatgctgatggctcttaaatacatacctttattgcaaatggcattcctaaatatctctattcattatcctatggagatgtcaaattcaatctgtgaaaagctgaactcatcttttctcctactcacctcccaccccaacaaacctggtcttatttcctattttagtgtttcctccatcctttttttttttctttttttctttttttttttttttttgagtcatggtcttgctctgctgcccaggctgaagtgcagtggcatgatcatagctcactgtaagtgtcgaactcctggactcaagcaatcctctgcttcagcctccagaatagccaggacgacagttgtgcaccaccacacctggctaactttaaaaaaaaatttttaattttgcagaaacagggtccccaatcttgtcctggctggtattgaactcctggcctcggcaccctgcttccctctgtcattgaatggtacaatttcccatacaattgctgaagtcagaaacctgcttgttttcttgtcagtctctttcttttttttctttttttcttttttttgagatggagtctcactctgtcacctaggctggagtatagtggtgcgatctcagctcactgcaacctccgcctcccggcttcaagcgattctcctgcctcagcctcctgagtagctgggattacaggtgcatgccaccatgtctggctaaattttgtatttttagtagagacagcgtttcaccatgttggccaggctggtctcaaactcctgacctcgtgatccacctgccttggactcccaaagtgctaggattacaggcgtgagccaccgtgcctggcctcttctcagtctatttctattcctcctcctccttgtaaatcaatccccaagttatgttcactggacctcctaaatatctcgagtttacccaattatctccaccccactgtgactacgctaggttaggctgctttcatcaagtactcgggtaattgcactacctctaactggtatccctgcctcctctcttatcctctctgtaatccaatctctatcctgcagccagggtagagattaaatttataagatgtaaatttaatcatgccactctcctacttaaacctttcaaggcttccccatctgcctacaggatcaagtccaaactctcacgtggcttatacggtcctgccatgatctggctcctgttattcactacagccttaactctttataatatgaactcttttcattccttgtacagagtatgctcttgtctcaaggtctccaggagcactaggccctcctctttaccttgttgacttatcctacaggtcacagcttcacacatttcttctgggaccactccttcccagcccctaccctctgtgggtcagccacccttgtttttcacttccacaccccgtgtacacttttctgtataattcatcacattgtattgtatctacaggcagtgaaccccttgagcacggggcccgcgcctggcttgttctccgctgtctccagcacctaggacagggcctggcacgaagtaggtgcacagtgagtagtgaatgctggagtgaatagatgcaagagggctggtgtcttttagaaagcagcgctcagtggctgagaactcctgggttccctgctgggcaagggttaggcgtacatttgccagggtgttaaaggaggaacgcagggttcaaatcccagctccacttaacctcccccacactgcggcgacgccgcgccttttttccgacccaactgagccggaagtggaggcgcgggcttcccatgatgccccgcgagacctttattctaaccgcaaggagtagcggaggggaggtcgtgatggcggcgccggaggcggaggttctgtcctcagccgcagtccctggtaaggcgtggggccaagagtttggggagccttggggacttgtttcttccctaccgccgcgccatccattcgtttatccgctggtcctctccctagcccgtcttccctgtcttccggg

SEQ ID NO: 36284 - DNA, 2300 bp, Homo sapien
cacaactctaagggggtgcgcgtgacagagtcgtgattgattgagcaagcagcgggtacgtgacggggggctgcatgcaccagtaattagatcggaacaaaacaggatagggattttcacagtgcttttctatacaatgtctgtaatctatagataaccgattaggtcaggggtcgatctttaactaccaggcccggggcgcggtgctgggctgtctgcccgtggatttcatttctgccttttagtttttacttctttgtaggcagaaattggcataagacaatatgaggggtggtctcctcccttactgccagccagaattttgactgtttttctgtttaatgctattatagaagagagattgagccgtatctcccgctcagggaaaggaaaggctgagaggtctgcctaaagggagtgggggtggttgtgaacaagagagccataaattgttttgagataacacattaagccaaatcaactccctcaaatactaattttatttatttatttagttagttagttgtattttttgagacaggctcgctctgttgcccaggctgcagtgcggtagcatgatcttggctcactgcaatctctgcctcccaggttcaagccattctcctgccccagcctcccgagtagctgggattacagctgtgggccaccaagcccggctgttttgtatttttagtagagacagggtttcaccatgttggtcaggctgatctcataacaatgccttcctaaacaatgcctaagcctgggcgtggtggttcacacctgtaatcccagcactttgggaggctcaggtgagtggatcacttgagctcggagttcaacaccagcctggccaacatggcaaaaccccgtctctactaaaaatacaaaaaatattgggtgtggtggcacacacctgtagtcccagctacctggggggctgaggtgggaagatcacttgagcccaggaggttgaggctgcagtgagctgagatcacacaccactacactccagcctgggtgacaaagtgagaccctgtctcaacccccgaaaaccaacaatgcccagacaatcaaaaaagtaattatctgggttatttacacacttatttatcagctggggcccaggtcattctgatttcctgagtgctcttcaaaggaatccagaaatgaaaatatcaactagcaacattaacgataaagcccatctcctgtggcaacaagcttgctgaggaacctgtttgtttgtccttggctggggactcaagaagtgaatgtggagaagtgatctagcccagggagtgaagctccagttgcagtgaggttctggcctttcatctcttgctaccatttggatctaaaaacaacagttggtggtagttggtagttgatgagaaaggtggtagttgatgagaaagtgtagtctataaaagtccccctttttgtatctctctcctcaccctcctttcccaaggtgttaccctataccttgcccccattgcctagattttcatttgtcacttagaatatttctatggaaagggtagataaagaagacagctggtgaagatggaagagaatggatggacctcattctgtaagacctggcttggggtggggtgcgggtggaggtagtcgggttgacagaatcttaattagagccaggaggaatctcaaattcttcacagatcattctgaggtcaagaagtgacatgactggggtgaaatagtacagttagtgtcagtgttggggttttgtattgttttctttccagaccccaggtccatatacagtaaagactctaaatgtcgactatgtgaaagggctcagggaaggccaaatatctatggaaaaaggctgggtttggacttacaaccccaactgtagcctaactgtaggggaagccatactgtggccgtggcaactgaagacatcccgtcccaaactctggaaaggatgagggagggggctgatgcctaggcctccgtggggaggaggtctgggcggtaggcggtggggtgggtggaacctagcgtccagctaggcggaagggcggagcttcaggtctccatggaggcggcttctcctagcaactcgacgggcgttgagcggagccgctgacctgatggacgccgacagcctcctgctgtctctggagctggcgtccggcagtgggcagggcctcagcccggaccgtcgggcctcgctgctcacgtctcttatgctggttaagcgcgactaccgctatgatcgggttctcttctggggccgcatccttggcctcgtcgccgattactac

SEQ ID NO: 36285 - DNA, 2300 bp, Homo sapien
aacaatgcttatctctggattttagatgacatttattttctttttactttatttattgtttcatttttctacaatgatcacatgttacctgtcatagttgttttttaaaataaaatttgtttatgataagttaagataagataatgagaagagggttggcactcgaatgctttagctcactgtgtccaaagcaagccctgggtggggctctgttgctgcccttgtctctactggattcctggaagttggaaatgggtgaagaaacagaggatgtagtacaaacacaaaaggtcatctatacatctataagctcaaggtcatctatgcagaacaaacttggaagctatagggagagtcaaagctttcttgatcctggctgggacacctagacctacacctcactaagaccctctgcttcactcctaatccatgtgtcagtctctaccaccttgattgacttttcttttaagtttccccttcaccgggtttacctttgctaaatgagatgttttaacgtaacccaatgctgcatttctcctgttctccctgtctatggtgatgccactcacattttccatacagcagctgctctgcatcctcctattagggtgacggtcccaactggatgatgggctcctctcctactcatcagaaaacatgctatgtcatttaataagcctgattttcccatcttgaatcagagaaggataggaagaactgagttgtgaatgattttcctttcctgtggagctccagaggaacatcctatacgtctcacaaatctgaaagaggaaaaactggcagttgtattttctctttggtaccataagcttccttacaacacaagtgagtccaacttgtgaaaagagtcatctccataactgctctattaactagcttatgtttattgagcccttttgttttgttttgttttgttttgttttgtttttgagacggagtttcactcttgtcgcccaggctggagtgcaatggtgtgatcttggctcactgcaacctccgcctcctgggttcaagcgattctcctgcctcagcctcccaagtgtctgggattacaggtgcccgccaccacacccacctaatttttgtatttttagtagatagggtttcaccatgttggtcaggctggtcttgaactcctgacctcaggtaatccacccgcctcagcctcccaaagtgctgggattacaggcatgagccaccacacccggccgatcacttatgttttatcacatctaatcttcagggtctagtcctcccctaggccctataaaatagattctactcattcattcaacaagtatatattgtactcttattatgtgtcaggaactattctaagtgctggagatgtgcgagtcaacagaaaacaatgttcctgacttcatggagcttacagtctggtgagaagacacatacaaaacaaacataaaactgaaattgtcccaagcactaagatggagaggcatctggtgctgagaatgggcagtcaagcaaaactgtggaaataaggtttgaggtgagctctaagaaataagcagaagctaactagacagctaaagagcagacaaaggaaatagcttgtatcaaggccctggggctagagagaggtctaagtatatgcaaatcaaagatcagtgtggcagtggtcagggaagaagggggtatcaattctatcccaggtctgcctgatatccgatactccagagccagagttcctaaccatttcagcctctcccgtagaggtctagccccagtcacagaagctaaaagtccacagctcacgtgcagtgaagagaaagctttaaagacataggtggggtgttgcgtgcgattttcctaaggaagccttccaggaaacgaatgcaaccttgaagacttgtaggcattggcagacaggagctagaagacctcccctagatccttaacacgaaatataggcttgacgcagaagcctctcttcgtatcccaaagcggacaggtgagagaaatgatgtgacaggagcaagcgaactacaaccccgccccgccgttcctgccccaccactgcggcggcgggcgctacgttccggaagcggaaatggacgagaggtcagggtaggtttttgaagatggcggccctcaaggctctggtgtccggctgtgggcggcttctccgtgggctactagcgggcccggcagcgaccagctggtctcggcttccagctcgcgggttcagggaaggtgagtcatgcgtcccagcaacctcctgaaattaagaagagcggcagagactgcttccg

SEQ ID NO: 36286 - DNA, 2300 bp, Homo sapien
ggctgaagaaggccgagttgagaagggatgcaagggagggggccagaatgagcccttagggctcagagcctccatcctgccccaagatgtctacagcttgtgctcctggggtgctagaggcgcacaaggaggaaagttagtggcttcccttccatatcccgttcatcagcctagagcatggagcccaggtgaggaggcctgcctgggagggggccctgagccaggaaataaacatttactaactgtacaaagaccttgtccctgctgctggggagcctgccaagtggtggagacaggactagtgcacgaatgatggaaagggagggttggggtgggtgggagccagcccttttcctcataagggccttaggacaccataccgatggaactgggggtactggggaggtaacctagcacctccaccaaaccacagcaacatgtgctgaggatggggctgactaggtaagctccctggagcgttttggttaaattgagggaaattgctgcattcccattctcagtccatgcctccacagaggctatgccagctgtaggccagaccctggcaagatctgggtggataatcagactgactggtcccactcttcccacaggcctcagagccccaactttgttccctggggcagcctggaaatagccaggtcagaaaccagctaggaatttttccaagctgcttcctatatgcaagaatgggatggggcctttgggagcacttagggaagatgtggagagttggaggaaaagggggcttggaggtaagggaggggactgggggaaggataggggagaagctgtgagcctggagaagtagccaagggatcctgagggaatgggggagctgagacgaaacccccatttctattcagaagatgagctatgagtctgggcttgggctgatagaagccttggcccctggcctggtgggagctctgggcagctggcctacagacgttccttagtgctggcgggtaggtttgaatcatcacgcaggccctggcctccacccgcccccaccagccccctggcctcagttccctggcaacatctggggttgggggggcagcaggaacaagggcctctgtctgcccagctgcctccccctttgggttttgccagactccacagtgcatacgtgggctccaacaggtcctcttccctcccagtcactgactaaccccggaaccacacagcttcccgttctcagctccacaaacttggtgccaaattcttctcccctgggaagcatccctggacacttcccaaaggaccccagtcactccagcctgttggctgccgctcactttgatgtctgcaggccagatgagggctccagatggcacattgtcagagggacacactgtggcccctgtgcccagccctgggctctctgtacatgaagcaactccagtcccaaatatgtagctgtttgggaggtcagaaatagggggtccaggagcaaactccccccaccccctttccaaagcccattccctctttagccagagccggggtgtgcagacggcagtcactagggggcgctcggccaccacagggaagctgggtgaatggagcgagcagcgtcttcgagagtgaggacgtgtgtgtctgtgtgggtgagtgagtgtgtgcgtgtggggttgagggcgttggagcggggagaaggccaggggtcactccaggattccaatagatctgtgtgtccctctccccacccgtccctgtccggctctccgccttcccctgcccccttcaatattcctagcaaagagggaacggctctcaggccctgtccgcacgtaacctcactttcctgctccctcctcgccaatgccccgcgggcgcgtgtctctggacagagtttccgggggcggatgggtaattttcaggctgtgaaccttggtgggggtcgagcttccccttcattgcggcgggctgcgggccaggcttcactgagcgtccgcagagcccgggcccgagccgcgtgtggaagggctgaggctcgcctgtccccgccccccggggcgggccgggggcggggtcccggcggggcggagccatgcgccccccccttttttttttaaaagtcggctggtagcggggaggatcgcggaggcttggggcagccgggtagctcggaggtcgtggcgctgggggctagcaccagcgctctgtcgggaggcgcagcggttaggtggaccggtcagcggactcaccggccagggcgctcggtgctggaatttgatattcattgatccgggttttatccctcttcttttttc

SEQ ID NO: 36287 - DNA, 2300 bp, Homo sapien
gccctcctctgtcccaattgtgatgaaggggcagttcaaaacttcttgattagtcatcttctcccctatcgacttggctttaaaaaatgaccttttcagacttctagtctcgttcactctttttgatgatgctttgccgtaacccttcgtgggtagagaaggattctgtgcccattggtggtctggataaaagaaatagagacctcacaggaagcagtggactggcctgtttccccactgttctttctgttttcacacctgtggccttctccccaccttcttcccaatcaacctattgtgtacatagcccccctcattgtcctttattcttctggaaagcagaccttggagggaggagtgagggggaggctcagctgtggtctctggggggtgggggttgggagctggggtggaagtccacgaagcatacacttaagatgctttggtgaagttctaaacttcatattacccaggctgaaaaaagagcacttgttcctagggctggaaatggaagccaaaacaccacctttttcagcctgtttcagcatctttagagatcagcccaacccacttacacagttgagcagagttggaggcctagagaggggagggactggcccaaggtcataccaactcatggccagagcctgggcctcctcactggccaggtgttatttcttccctctgggtagggaacctatttcagggacaggattgctatgtggtagtggtggtggggtgcgataggcgtggcaggctgggccacaatttggagtagtcatgccagagtcctgcatttatttattctcaagggccccgcctctgtggcccagaattaccccttcatgctccagtgcaccccaggcttcgtggccagcctgggaaactgtctctaccctggtctcccttcagatcagcttctagaaatgtttcgtggctacagtggcagcactgttttttccatgatgcaagcagtttgccctcttgggcggggttatcagtggctggcagggctggcacagcgtgtccgcccactgccacctgtgggttccaggagggcccagcccctgtgctgatgcccaccaccttctcagctcatgtctggggaagaggactggcagggggaaaggtgcctcctcctgaaaggtgcctcctctgtttttgcctaatataggcttgggaacactttgatgtcagctaattctgactcctttacttactagctgtgcggccttggggcaacttacttagcctctttgagcctcctgttccccatctgtaaaatggaatctcaatagtgtctaatagtaccatgtggagaaacttgtgtgaaatgatagctgtggactactgtacacagtactcaggatgtagtaagtgctcaataaacagctgttggtatggttgacgttatggtagtggttgtggggaggacgtaggaaactggagactagcttggcaaagctggctcttcctccttttagggaaagcttagagcatccccatggggtatacccatactcagactgtcctctggcatcgaggttggcccaggattcagttcagctgtcacagtgaggtggcgggatcagatgtggcaggccatgtcccttggaacttgagtacatcgtgtgatctctggaatgaaaacaggccttcaccagtgttgatggtggaaagcttagggaagtgcttcaaacacagtaggagggacttacgttagattttggaaggacttgcctgattcggaagctccaaagagtggcattacagagctgggtggagagaggggctagccatcttttgtgtcgcccaccgggctcatgtgtcatcgcctctcatgcagtggtgaagttcatggatgtctatcagcgcagctactgccatccaatcgagaccctggtggacatcttccaggagtaccctgatgagatcgagtacatcttcaagccatcctgtgtgcccctgatgcgatgcgggggctgctgcaatgacgagggcctggagtgtgtgcccactgaggagtccaacatcaccatgcaggtgggcatctttgggaagtggggcaagggggggatagggaggggggtaacactttgggaacaggtggtcccaggtcgtttcctggctagatttgccttgtctggctcctgcccctgagttgcacaggggaggtatggtggggtcttgccttctgtggagaagatgcttcattcccagcccaggttcccagcaagccccaaccatctccttctccctgatggttgcccatgggctcaggaggggacagatggatgcct

SEQ ID NO: 36288 - DNA, 2300 bp, Homo sapien
tggtgaaactatgcagggagagtgggacaaagcacaaggccatggtttaaacaaagctgactgcactgctcgagcagtgcttttcaggatgactgtttatagacaattggtgagttattaatactaatggctgtcgtgcattgttccttccttaccaccagacgaagacagcagttttagatgcattcttttcctttgccccatttaatgtattaattatgctttgcggacgggcgcggtggctcatgcctgtaatcccaacactttgggaggctgaggcgggtggatcacaaggtcagaagatcgagaccagcctggccaacatggtgaaaccccgtctctactaaaaatacaaaaaaaaaaattagccaggtatggcagcgcatgcctgtaatcccactccttgggaggctgaggcaggagaatcgcttgaatccgggaggcggagattgcagtgagccaagatcgcgccactgcacaccagcctggcaacaaagcgagattccatctcgaaaaaaaaaaaaaagtatgctttgctttacacctctactctcagacctaatcttttgtgtgcttgctggaattctaccttgccaatcatgtgaaaaggctttggggtggctagacaggtacgttccatacaatttttgcaaaaagacaaccaagttttcttcaacaatgaggcagaaattccctgttgcttcctcacaaggtcttcttgggtcttctctgaaaacagccatgcataccttttcttccagatgccctggaagatgcccaccggcttgctgaactcaccagacagcattatgggtgtttcctgcaatccttttttaacttgatgggccttttgaggacaggtcccaagagcatggctctaaactaccacagcagaatcactaggaaactttattaaaagtgcagattcctgggcagctcctatcgcctttctgctccagaatacccaagagtggggcccaggagtcagcctttttcacaagctacccagttgattcttctgtgcactcaattttgagaacctctggcctaaagcatggcaggtatttgggaaatatttgcagaatgaactgttggtgaatgagtttcgagaagtgcagtgcaaacagaagcgccatctgtggtggagttgctcaggattcttcctggctatagaactgggcaatgttgcctctgagccactcactggaccttgcctgggcaccacactttgtccccatgcggctcaggctggtgttccttgtgactcctcaagctgaagctaaggctgggagtgatgaagtgccccactttgccccaggtaactcctgcaggtgggtacccagagtaggtggccaggggatcatcaaactctttccccttcaaactgcaaactgtattctctgccttctatgcccagctgggctagggtaaccttctgtggcctagtcataggttcagtttcagtgcaaaacacacgcctacccctcaatgctcattgactcctattctgggtatagattactccatttctgggtacagtctgatccttgatcctggatacaaactggctcttaatcctaggtatagactgatccctaatcctaggtacagtcctggattagggatccatattccttgtcctgggtacagattggttcctaagcttggatacagactgacctcctacttctcggtataaacttaacgctggtcctgggtacagactgacccttagtcctacctagtcaaagtctaatccctttaacccagaaaacaggctgacacataaccctggtcagagcctgaccctaaacccagatctcagacccttaattctaaccacagactggcccaaccctgcagagattgtccatgaccctgaccacagactgacctaaatgaggctggtctaggagtgcatgcgggaattggaaatagatgtcctgcccatggaggccagagagctgtgtccacaaaaggacagggtgtgaccagccagagttgccggagttttggcaacttgtgtcttccataatagagctggggcattgatggaaatggagggtgctagaaccttgtgactttggccaggcaccaatcatctgcctccttctgtgcctgcctggctgcccctaccctggggctccctcctagcccccacctcacctactggctcactgagacagagccaaacatgaaagggaaggtgacggcctggccatagggcccaggaaaatgcaggtatcattaacagcctggagcactgtggcctgtccactctcaaccctctgctgcccacc

SEQ ID NO: 36289 - DNA, 2300 bp, Homo sapien
ggctccatctctgctgagatgcctccctctcaccgccagcgatgaaggaactctctctaggtttctctgttggacatacagctatttacactacagcgttgatgtcttccaccctcccaccactagtagcttgctttgttttagttttatattttgtcttttcttggagatgtgggctcacagaagcagggctatgtctctctctctcagactgggagtccctgaaagcagggctgtgttccactctcagactggggttccctcaggacaggctgcaccccccgcctcagattaggggctccccaaaggagagaatatgtttctctctcaaattaggggtctctaaggtatggcactatgtgccctttggcctcaggcctacccaagggcagggcctcaaaatctcttatttgttgtgtctctgctgccatcacccatgtctctccttcctgccaccccccagccccacatcccaggatggctttacacccctctggtcagggctgtgtctattaaagccaccaagagtgcattttgtcctgctcctccctggccagcagaagtggctgacaggaccacattaggacttggtgggccataagcattttttgttgtcatggacccctttttccattaaaaaagtaaaaagttacattttacagttgtgttgggataaaggtaaatatattcacattatatatgaaaacatttctgttgacttagaagatcatttcttccctctgattttaaaacaactcagaatactttgtgggctcctaggagtaccatgggctggggctgagcctggtgtgtctggtggagaagccgccctgatggctagggctccagctgggcctggctgcaggagtccgcattgagcctcagcattgctggcggggatgcctttcccatcctttagctttgttgttgttttgttttgttttgttttgagacagagtctcactctgtcgtccaggctggagtgcagtggagtgatctcaggaggctcgctgcaacctctgccccctgggttcaagcgattctcctgcctcagcctcctgagtagctaggattacaggcgtgcaccaccatgcccgggtaattttttgtatttttagtagagacgggttttcaccatgttggccaggctggtctcgaactcctgacctcaggcgatccacccgcctcaggctcccaaagtgctgggattaccatcctttagcttttataagcctcatactgtccccgtgagttgggcaaggccagaattctcatcccacgccagccattgacactaccactgctgtggatatggccatggccatggctgggacggggacctcctcagctgctcctttgcccatatcaggcgctgtgttaggcacatggccaccttaatcttattgaaccctcacaccagcctctggggcaggcactgtgcttatttcccatttcacagataaggaaatcgaggctcagagggaagaaatgatgggctgaaggccacctagccagtcggtgagagggtggagacagaggacacaggggccccggcttcaggaagtctaggtctttccaccctagagacagtgaagggccaggcaagaggtaggtgggggtcggtggaagaaattggttgtgatgtctcaggacacagtagcaggaaggtgccttagagagcttgcatggaaggaacgggccttcctgccctgcccccattcccctggtttccagcccggagggttttcagggctaatggaggggaagggcacagacttcactcctctgtggagagagacacagggattcctgaccaagctgccatggatccttccctcctccaggtctgctaactccaggccctccctgtccagccacgttgtctggaggccacctggcagtctcatctgggttgggaggcgtggggtctcagagcgggaggagagaacctcgtggtggggggagctagcagtgagggagtgggctgtggggagtctgggtcccacccccgggactctgtcagtggcagggtaggggtacccagagccatggcaggaaccaccccctgcccgcccccgactagaggctcagcttccctgcgtgcacctagctcaggaagccttcctttctagtctctacagctgtttccctcttttcccatctcattcttccctcttcatttctggcctatcttttaacatctccatccctttgatgcctcatccatctcctcttcaccgtcttgtctttgcctgttcccttttctgcttctctgctcctcttaaggctgggttttcctc

SEQ ID NO: 36290 - DNA, 2300 bp, Homo sapien
gggtgtagccagctgggctcctgagtctggtggggacgtggagaacctttatgtctagctcagggattgtaaatacaccaattggcactctgtatctagctcaaggtttgtaaacacaccaatcagcactgtgaatgcaccaatcgacactgtatctagctactctggtggggacttggagaacctttgtgtcaacactctgtatctagctaatctagtggggacatggtgaacctttgtgtctagctcggattgtaaacgcaccaatcagcaccctgtcaaaacagaccactgggctctaccaatcagcaggatgtgggtggggccagataagagaataaaagcaggctgccccagcccgcagtggcaacccgctgggatccctttccacgctgtggaagctttgttcttttgctctttgcaataaatcttgctactgctcactctgtaggtccacgctgcctttatgagctgtaacactcaccgcgaaggtctgcagcttcactcctgaagccagcgagactacgagcccaccgggaggaacagacaactccagacgcgccgccctaagaactgtaacactcaccgcgaaggtctgcagcttcacccctaagccagcgagaccacgaacccaccagaaggaagaaactctgaacacatctgaacatcagaaggaacaaactctggacacgctgtctttaagaactgtaacactcaccgcgagggtccgcggcttcattcttgaagtcagtgagaccaagaacccaccaattccggacacaggaggatcgcttgagcccaggaattcaagaccagcctgggcaacccagcaacactccatctctacagaagttgtaaaattagctgggcgtgatggggcgcatctgtagtcctagctacttatcctagccttggcgagaggatcacttgagcccaggaggttaaggctgcagtgagccatgattgcaccactgcactccagccggggtaacaaagtcagaccgtgtctctaaaaataaataaataaataaaaataaaataaatttgacaaccaagtttaaatggtgttctcattattcccattttacagatgcagtcactggggcccccaagaagttaagtgatctgcctaagatcacatgcctttgtttatatgtgttggaatttttcaattctctctggaaatccacatcctccacccccaacccagactccaacacaactgcttccaccacggcccacctgcgtaccccacacatatccctgaagtgcagacttcctcccatccttccccaggaagattccctggtctgtggggtagcgagtgttggggtggtctctccttccctcccatgcttctagattcctctgtagggtcccggttttgtttttggtgtggcagcaagctcactgcctttttgagtactgtatgtcagtgagtttgcatgcacacacctggaggagggatgtgtgggcatgagaggtatctgggcaagtgggcttacttgcccacctggggcacatgtgggtacagtgcagtggagcatacattgcctagattgtaaccgtgtgtgtgcctagacacaggcaaatgagcccatgtgggtgttcatgaagggcctgccccctgcatgtttgggggtctgtagaatgagtccccatttctctccccttcccaaataactgccaccatcttcagttcagactcctgggccccaggtaaggggctggtgaaaaccgcctgtgactggggacagagacacctgagtcttaagccccacccaggctgctagtgcccttgagcaggcatcaccccacccaggcagcgggagtgtcctcacccaatgggatagggtgacatgggggaggaggtttgaagcggggagaaggcagcgaggctttcagctccctagatgggaggctcattaccctagcactcagtaggttgtagggaagggggactgagccaggacttggcactgactacaaagggtaggggcagcccccagcactcccgccgcggcaggccaggggaggggctgtgacgtttggtggcctcatgcagctgagaggaagtagctaattgccaacctgatgactggcggctgaggagtggggtgatgatgccactggcagaagcaggcgccctggcccaaggaggaggcccttcagcaacggagtgggcctgcattctgcggagggtgagactgaggtggctgcagtcaaaggagaagggggcaggggtttgttgaggctgtgaccgtgggaaagcgcttctccagggcttccctcagcttcaa

SEQ ID NO: 36291 - DNA, 2300 bp, Homo sapien
tcatggaatgagccgttggtgtggggccaaaaaaggccttggattttcactgtattacaaccaggatactgatggacccttgtaaccacaaccctgagtcatgaagactcacatgttctgtaacctctgattaaaagcccggaaagcgtgtaatatccactagtgattcctatccaaaatatctctttttaaggtttcagatattaatgtctggaaaactagtatgaaatggttcattcttggatggtgacataaacatgacatgttactggcctctttacagttttctcaaagcccaccttcaaattccaaggagctgccagctccgggatttgaattcactctatccatggaaacaaagctgagggaaatgtccccagactttcagccagttcaaacacaataataaaaaaaggtttacctcatacatgcctccaacatatgaggcatgttataggcagattatattttaatcctcaacagccccgctgggtgaatgctgtactcccattacacagaaaactgaggctcagaggggtcaaacaactggggccagtttaagttagtacgtgacaaagagctctcagctacctccacctgcacattccacagaccagtccccttcagttcactcccacagggaggttcaaaacaccaccgaccctattcagacatccctttgcaaggccctgtcacctgtcttgcccaatgcccacctagccaggagagccaggatgcacagtgaggaaggtggaatgaggtgccaacgtagcccatccagggaaggaagacagccccccccccccggccacccacttgccagtggcccaggtggcaggccagccacttgccaatccccttcctgatcagggattcaggaagtgaagagagtgcccctggaagtcaggagacacctccaagatgaaggccctgcctgccatagcctgacacagcctccctgtactccctgggttgtcccaggacgcagactctgtgcttaccataccacacctttgtcagtggtgtgggcagggcccagcagagtcctggacaccccagggagtaggagctgtgcaggtaacataggagggggtgaaagggaaatgaactcccttgggagttccccatcccagaggaaataaaagtcaaagcactcctttgttttttcttcccaagcccttataaggggctttatggggcttgcctaggtttgaggtgcagcagaggcaggcgggtgagggcctccaggctgagagatcctggggcaaaagtgaaactatatggtcatgaacacgggcatgttctgaactctgtgaaaccctagcccaggacctggctgactgtacaatccgtcacccggcacaccgtaacagaagaccctactacgcgcagaggacagtactattggggtggcaactgaaaagggtcctggctggaggcggggtttgctggaggggtaacagagcgtgcgcggagtggagagggtacggaggctcaccgcccagcatccccaaccccggcgctcagaagagcagcgcgctccggagctcggcgcgcgcgatcaaagccggcgccgcacgcgcacgcgcgcccgcagccgctcccccgcccgcgccgctccggctcccgcgcgcgcgcacttgaggcctcccttgtgcgtctcctccattcgctacgtgcagaatggtccgtcggcagcagctgcagcgctgggtgggagggggaggaggaggggagggggaggcggcgcccaggtctcggggaggggccgcggcggccctggagatagaggggtgggggcgaaggggtgggcccccgcagcggggaggacagagggagagtccgggtgggctcgatgctcagccttccccctcccccgctcccgcttctttctgcgaggccattacggccatctcccggcctgagcctcctggaaccaagccgaccaagaggggtttcctccgtgttgtctcgtccccaaaacccagaatccagacccaagaaagaaccactcctgctgacccctcctcccgctacccgtcccaaccgcattcccaagctttcgtggaggtgacccaacagcaagcacttccccactccgcctttcatggggtggggtccctaagaggtactgcagactaactcctcttttcatctcttaccccacctggaggaagaggcatggccaggatggacaccagagcacatttcccagcatttccaaggggaaagggcagcatctcagcatgcagactccaacatggccacagaaaggtcgagtggcgcagaggagcaggctg

SEQ ID NO: 36292 - DNA, 2300 bp, Homo sapien
cggcccgcccccacatttccctgccgcggcgcccgcgacatgccgcgccgcacgttgctgcctccaggccccgccgcgacctggcccaccgccagcgggtcagctgctccggacggcgcgggaggctgccggccagagtccccgccacgccgccggccggcgacgcaaaggagccgacgacactccccctggggcccggcaggggctctgtcctcgggcccccttttttcccggttattggaatgatttcccgaagcaggaaggccagaagttagccttcaggccccgttgtatttaaaatgggctgccctgggacttcactgaccaaaggagggggctgggcccctaacttgggtgacagcaatgaccttgggagggatggaattatacgtgacaggagagggaccagttcccatcccagagctccttgcacctctccaattccctcatgccagtccacacctccctaacctcaaaaggcctgttcccaccaccccagggcacctgctttttctgcagagccaccctagtccactttgggtcttgctctgacctggggcccaggagagggtctcctaagtgggtgggtacacacaggtttgctgtggtccagaaggaggctgaccagagtttgagagtttgagcccagttaggtcacagccccctacctcctcccctcccctctcctccccctgtccccgccctgccccattgctttcagagtaaattaactaattacctccaattaaagcacctggctctctgtatcctcctaggccttcaatcactgcttctgggagtcctcttcatccaggcagggtctggaagggggcctgaccagtaagttggaagtcagtgaatcaatgaagtggggcggggaagacaggatggaggaagcccacagtgccatttactgcttgggagtggtccaggcagccaggacctctgacttggccagcttgcagactgaggttgggtctggggacttgggccctaggggggcctgtgaaggctgggagcaggagctgcctttggaggttaagtccctggtgaagggcctgtgcagatgtgtgcagatgtcaaggccctgagggtgaccctagaagcccctcagcaggagaagcaacttgagggtcaggtcctagaagctagcagttcttggcacctgctgcctccctcacccagcaggcagggagagactccaaatgcctgtaggcccaaccagtccctcctgtctttaaccccagctggctcctcctgctgctcaggaagtgaaaacccctccattcttttctccgggcccccttggtggcccccaggcacaggcccaacactagctctgcccagcactgtcctggcccaccccacgtgtaggacgtgatggggaggatacctggtggcaggaggcagactgatggattgttgacctgggtctcacctctggacgagctggccattcctggggactgggcagggtcacgccaggctgtgactcaggcccctgccccaccatgccagggacctgggcttgggccatcctctgtgtatgtggggtggggtggagcagaggtttgtcaattggaggcttctctttggggacacctctcacagccccagggagccagactatgactagaaggatcagggtttccatggctgctcctccccacccaccaccccaatagaggctgacaggaaggactcccaagcagggcacagcagccatatgagttagtgggtgtatgagccatccaggacaggggtagggctcagcacacaggaagggccactcctggggtgtcctgagcccctatctgccagctcggcttgtctccctaggcccatggaaagctggctcaaaactccccacctccaggaaggcgtcaccatgcctcgcttgtttgtggccagcccagcgctgctctcagctcccacttttcacttgtttctctgcctcttgtcccctttcccagatccaccaagcgtctatgggcagactgttttttcctgcacttcctagtggccagcagagggcgccgccaaaagactgaggccaccacggagggaacaggagaatcggctttttggggtctagccactgtgcagagcccaggcgcgtgggtcggtgtcgggtgtgtgtgtacgtctgtgtgtgtaatgaaactggacgccttccttcccggcgatcttgacttaacctgtcagcagagggcttgaggttagaccacaggttgaacctaggtggctgctggagaggtaagcccaggtggctcttggcaggaagaggaggatgagtgagt

SEQ ID NO: 36293 - DNA, 2300 bp, Homo sapien
ggcctcccaaagtgctgggattacaggcgtgagccaccgtgcccggccatgaggtttaaatgagatagtaatgtaagacacttagcctgctgtgtgacacattgtaaccatttgataagtgttcataaataaagaaacagaaagaggccaaatgacccttaaagctgcttgacacccagggctctcctgtgaaatgagctttggtatagcagagcaaggctgcagagtgcggttggaacactcttggactgaacctggatccagttctgtttctgcccttgactaattgtgggactctacacaagtcacttaatctgcctgtatatcaattttctaatctttaaaatgatatatgacatcatgatgatgatagctaataggtaatgagtgccaggcactgtgctaagtgctttgcatggcttatctaattgaatcctcataactaccttgggggcagatactattagtatccctgtgttacagatggtaaaccaaagctcaacagtttggttacttgtccagggtcatctcaccagtaaaagtaaagctagtctcatttggtagtctgtgattctctgtgtgtcagatgttagtagttgcatacattagctgccttcttttgcatttgatttttctgatcataattacattttggctgatgcttcatgggttgtcttaaggaaaacatttgggagtaagtttgggatttgaggctaaattgtagttaataagcatttaaaggccaggtgtggtgggtggctcacacccataatcccagcactttgcggggctgaggcgggaggattgcatgaactcaggagttcaaggccagcctgggcaacatagtgagaccatcatctctacaaaaaaaaaaaaaaaaaaaaaaaaaacacaaaaaattagccaggcgtcctggtgcatgtctgtggtcctgactacttgggaggctgaggtgggaggatcacctgagcttggggagttcgggactgcagtgagctgcagttgcaccactacattccagcatgggtgacagagcaagacttgtctcaaggaaagaaaaaaaagtatggagtgtctaggtattcctggggaggagtggattcccctgccccaccctaacattcttattaaataaaatcttatctgaggtggtttgaacttgtgcatagcaaagctgtgtgtaaatactacagtgtagaggcttttctcggcagacctcttgaatgggcacctctgctgccaaacgtttgggtggaaaaacaggtgtgttttgcagctggctacaggcctttctgaagcatgctctgaagtgatgttcaggtgtttcagggcactggcagcctccatatttgttagtgctagggagcaacagggttgagattctgaaaactggagtcacaagtcttgggttggtgtttgctcttttagctaactcttcaagttggtttcccaaagcccactttcagctgtagtatggtgtaggtcagttttccatgttacagtgtttgggagactgacccaaataaagactttggtctttgacttggcaagagcagcctttggctttgctttgctggccttgagctgtacaggtgttctggcctttacatttgggggaaaggtgatgtagtgatagacaacttgggtggctgcttagataatttactttcttttagggagttaaagtgctggtttcagaaggcatatgaatatcaaaaagggcaatagtgtgcagtttttcctctatggaggactcgagaagaagtccctggctgggtttataaccaagggctcatattttcctcctgcctgtggaagtgatataataaggaaggcattctccgtgctgttgtatttttttatagcagaagctgttgtgggccattctccctctccaaccccagagttagaatgtgaatcagcaaaatcggagctacagctctgtctaatcatctgtgtatcctttaaccactaagatttatattttgtgactaatgatcttgtgctggaagtgccatctcccacacaagtccccaaagaaaactggctttaagggctctgacttagaaaccaatttttccccctctcgtttttcctgcaggatctatcttgggatcccatggctttctttactgggctctggggccccttcacctgtgtaagcagagtgctgagccatcactgtttcaggtaacttttcccattaagttcttaaaactgtgtctttgtgtaagcttcctatcagggctgggtattacggtgactagaacaggagtaaaaactcagggaggtgggcatgg

SEQ ID NO: 36294 - DNA, 2300 bp, Homo sapien
acaacccagacaaaccatgagcctataaaatagaaggctaaaccataacctgcttttcgagaccccccctacagccctaagaactatccaagtaacctgacagtaggaaaatccaccttaggtgtgcccaggcatgataatcccaaagacataaatggagcaaaataggttttaaagaattcttgcaacactgaagactaggagctaagaagagtctaaataaccatgctcagtgcccaaccacctgaaaagtggactccagggaaattttgttgttgttatccaccccgccccaagggaaacattttatctttaatattcaggagcaataataaaatattttggccactgttcttcaaggattccacaaggcacttaattctcatgtcaggctttctgaaatgcttgccctggaaagtgtcacttgatggctcacacactccttgaggattaggtgctgaccctaattaggcacaggcagaaatagttcaggaatccacatgctcagattcataactatactttttgtaaaaaataaaaacatataaaaaatgccttctggctggacaaggtggctcacgcctgtaatcccagcactttgagaggctgagttgcgtagatcgattgaggtcaggggctggagaccagcctgggcaacatggtgaaaccctatctctactaaaaatacaaaaattagccaggagtggtggctcgcgcctgcagtcccagctactcgggaggctgaggcataagaattgctagatcccaggagaagctgcagtgagctgagatcgcactgctgcacccagatctccccagcctgggcaagagagactgtctcaaaaaaaaaaaaaaaaaaaaaaaaaaaggccttctagtgatcctcagaaatccaaaaaccagacaactatggcttccacttccatttttcagatatccattataatactatttgacctcaaagtgaattttattgttccacacaagcaacagattacaccaatttcacaactcccagaatccaaacctacaaagacccttcccaccaagcactttaccaaaaacgggcttcatctccatcttcctttctttcacagttgaaaaactgcccttcctaattaagccaaccaacttcttacctcaataaaatccttgtttttcagtagcacgtacagtatttccagtgatgaacagtgaactgtctttcgtctcacacagtaacctccgtgaagaagatccaccttgttctttactgtatattcctggcatgctaactgcatcctcagacaattttaagtgactgaaaactcaggcaaagaaaggcaagagggcaaatagaagggcacaggagacaacgcttttcaaatttttctcactgcgacctacagaaacacactgtagaacacctcctagtacactcacacgtgtgtgtacacctgaagtgtcaagaaacaataccctaagtgcaacaccctctgatattttctatttcaagtggccgtgatctactaaactgatttccaactcaccaataggattcagtttgaaaaacactgcaataaatcaaaccttacagttgcattccacaagctactaatgaactcttgaaaatccagcatacagcagagacgctgaccaactacaagatccaaaccccccaggtgggcagtgtccttctgttcagcagtggcagttccccaccaccaccagccctgagagttaattatctcccaaactcccagagtttcccaagtagcctgaggtgtctgtcatatgcccttttaacctctttataaattcagtcccgtccgtctcttacggtggcaaagttcatttatcgtcggctgtggaaagcaatacttcctttttgtcccctccaggaaccagaaattaaatgaccaggttggtgcccgttgtgcctttatgatctatttgtgtgggtgatatatagaaagagtctcagtctctcccttcatctttccagtcttaatcactggtagatgcagtctctggtgaaataagaaaccagggaaccccctggcctgggggagggcgcactcatcagcgttgacagagtgaaagcaaaaactcaatcctcacaccacagaggcgtctggctaactcatctccagacctaagttgggaaaggggaggggagcgcggaaagcggagaagccggaggagacgctccggagtgaccagcgacggctgaacgcagcccgccctccccaagtcgacgccgcaacccggggaaagcaggtgagcgccggccacggacttgggggtcgcagaagcagccc

SEQ ID NO: 36295 - DNA, 2300 bp, Homo sapien
ccagctactcgggaggctgaggcataagaattgctagatcccaggagaagctgcagtgagctgagatcgcactgctgcacccagatctccccagcctgggcaagagagactgtctcaaaaaaaaaaaaaaaaaaaaaaaaaaaggccttctagtgatcctcagaaatccaaaaaccagacaactatggcttccacttccatttttcagatatccattataatactatttgacctcaaagtgaattttattgttccacacaagcaacagattacaccaatttcacaactcccagaatccaaacctacaaagacccttcccaccaagcactttaccaaaaacgggcttcatctccatcttcctttctttcacagttgaaaaactgcccttcctaattaagccaaccaacttcttacctcaataaaatccttgtttttcagtagcacgtacagtatttccagtgatgaacagtgaactgtctttcgtctcacacagtaacctccgtgaagaagatccaccttgttctttactgtatattcctggcatgctaactgcatcctcagacaattttaagtgactgaaaactcaggcaaagaaaggcaagagggcaaatagaagggcacaggagacaacgcttttcaaatttttctcactgcgacctacagaaacacactgtagaacacctcctagtacactcacacgtgtgtgtacacctgaagtgtcaagaaacaataccctaagtgcaacaccctctgatattttctatttcaagtggccgtgatctactaaactgatttccaactcaccaataggattcagtttgaaaaacactgcaataaatcaaaccttacagttgcattccacaagctactaatgaactcttgaaaatccagcatacagcagagacgctgaccaactacaagatccaaaccccccaggtgggcagtgtccttctgttcagcagtggcagttccccaccaccaccagccctgagagttaattatctcccaaactcccagagtttcccaagtagcctgaggtgtctgtcatatgcccttttaacctctttataaattcagtcccgtccgtctcttacggtggcaaagttcatttatcgtcggctgtggaaagcaatacttcctttttgtcccctccaggaaccagaaattaaatgaccaggttggtgcccgttgtgcctttatgatctatttgtgtgggtgatatatagaaagagtctcagtctctcccttcatctttccagtcttaatcactggtagatgcagtctctggtgaaataagaaaccagggaaccccctggcctgggggagggcgcactcatcagcgttgacagagtgaaagcaaaaactcaatcctcacaccacagaggcgtctggctaactcatctccagacctaagttgggaaaggggaggggagcgcggaaagcggagaagccggaggagacgctccggagtgaccagcgacggctgaacgcagcccgccctccccaagtcgacgccgcaacccggggaaagcaggtgagcgccggccacggacttgggggtcgcagaagcagcccacggagagcggaagggaggaggatccgggtaaggggcctcccctccccgtcgggacccccctccccgtcgggacccccccctccccgtcgggacccctcccactgacgctctgcctcccactctggcctctcctcactcaccccggggagtgggcctcccctactgcagagaaaggaagaggagaaggagggaatgaggacttaacgcccacccctgccccccaccataccgctctcgccgcccgggaaaatcccgccgcgggccccaccagccaagcgccgccttcgccccacgcggcctcttcctagcgcctgcgcgccaggcccagcccggcggacgcgatctgagagtgcgcgcgcaccttgcgtgcgccggcgtgcggggcgggacctgcggggctccgccccctccccctccctccccccgctccccctcccccatacactgccgcggccgccgcaggagcccggagctcgagccgcccagcgactccccctccccctcccccagccccgccccgccccaacccggggctccgagccggagccgagtctgcgcctgggggtgagtacgcgacccctacccagccctcgctcttttcttcgaagatcccaccaccacccaaagaaaaaacctggactcagctgcgcgtcccctcccttcaacctcctgcgggacccagaggtgcccgggcccgcgggacccaggggtggcgcgcgctgcc

SEQ ID NO: 36296 - DNA, 2300 bp, Homo sapien
aggtggaggcatgggagagttatgggtcagaagttcagagatgataacccattattgatcaattaccaggaaggatgccaagctctttacttctgttaccttgtttgattcccatgataaaacttgtaaggaggtggtagtaaccacactttttttctttttcttttctttctttttttttttttttttgagacagtcttgctctgtcacccaggctggagtgaagtgccacaatctcggctcactgcaacctccgcctcccaggtttaagccattctcctgcctcagcctcctgagtagctgggattacaggtgtgtgccaccatgcccggctaatttttgtatttttagtagcgatggggtttcaccatgttggccaggctggtctcgaactcctgacctcaagtgatctgtccgcctcagtctcccaaagtgctggaattataggcataaacactttttaatgaaaactgaggttcagacaggttaagtaacttgtcaaggtcacacagctgaagaatagtagagctagaatttgaacgcaggtctctaagactctgctatacttggagagaacttgaatgatgtccaagggggttcttagttacccactgcctgccttctgccttgccatgtccccatccacccacaggccaagactgcactgagtgagccaacagcaggccccagcatgtgccacctggggcatgccaaggcctggaccctctggtgccctggaggacaatcacgctgccagcacacccccacttgaagcctggctgacactcccactccccacctcaccctggcctgggaggcaggatgggcccctcttcagcaggtgttgggcacagcctcattgctccccggctgctgcagactggtaatgggtaggcaagccccagccccccagggcggtggagtgctcaggcttgccccgagcggccagacctctgcccaggggacccaggcagggggcagcacagcgccccaagggcagccagcccctctgacctctcctccccacttcccaagcgtcctttccttttctggggaacaaggtgccaagctttgggactgtccgccttaggcggtcaagacagccaggagggacaaagcggcgccccctccccacaacagggcctttgccccactctcggtttcgcgtctgaatcttttccccaccgcaccctccaacgcaggcccgggcggctcatgaatgaactgcactgtgtggggcgcaaggagaggacacgctcccggggccggccgcctctccagcccgccgaccagtcagtccccagagccgggggcagcggccggcctcgtgccagcacctgcgaaccctgcccttgcccgagcccgagcccttaccccggaccggcttcgggtgtactcgcccccgggagcagcagaaaaaataaaaggcacagaaggcatcggacttggcgaccccggggtccaaaactcgggggcgggggcggctagttccccaaacggcggcggacaggcggggcgcagctggcacccccgagggtcgcgcaggggacgcgcacctgcaccgggcaggtgggagaagagtggcactcgggggccgggggcgggggtcccaccctttgggatctccccggggctggggagagccggcggcgcgtatctggacctccggcaggggttggaggactcacatttggctcgggatggtgcggggttgggggcagcgcgcgccacccctgggtcccgcgggcccgggcacctctgggtcccgcaggaggttgaagggaggggacgcgcagctgagtccaggttttttctttgggtggtggtgggatcttcgaagaaaagagcgagggctgggtaggggtcgcgtactcacccccaggcgcagactcggctccggctcggagccccgggttggggcggggcggggctgggggagggggagggggagtcgctgggcggctcgagctccgggctcctgcggcggccgcggcagtgtatgggggagggggagcggggggagggagggggagggggcggagccccgcaggtcccgccccgcacgccggcgcacgcaaggtgcgcgcgcactctcagatcgcgtccgccgggctgggcctggcgcgcaggcgctaggaagaggccgcgtggggcgaaggcggcgcttggctggtggggcccgcggcgggattttcccgggcggcgagagcggtatggtggggggcaggggtgggcgttaagtcctcattccctccttctcctcttcctttctctgcagtaggggaggcccactccccggg

SEQ ID NO: 36297 - DNA, 2300 bp, Homo sapien
taggtttgagtcctaggtccctcattttattagcagtgtgaccttgggaaagttacttaacctctgaggccctgtgcccccaccctaaaatgtcagtgacactcaattcaggatcgtcgaggattaaatgaaatcatgtaatatattattcttgaaactgagggcactggacaaatggtacccaatacaattactaaattagtgtgtttttaaaggcagcttggactggaaaaggaagaggcataacacaccagcacacactcctttagtcttcctaatccaggctttgcagagactccctgggaccaagtgaaacacataaacaactccatcctcccctccatctgagggcttctgcctcttgccctgtggttgaagtgttaggaagaggcaggagaaaccctctgagtccccctgggggctaagggatgctgctcccgaagttgcagtcactgtttctagttttgttgttctctttggttttcctttttcttccctgaggacctcctcccctgctccacagcccgcccccgaggcagagcttcagtgttgtcagcagaagggtcccccagggaccccccagtaaaatgggtggggcagtgctgcatctgttgaggccacacttctccgctatcctgggatcctccccagggccccactctgctctgtccccaagcactttgagaacccaggcactcaggctggctgtcccttttctcctcctgcccaccccatccactctgagcatcaatgcagccggccagttgcaggcaaccaggcagcaccctggctgcccaggcaggctaagaggcccccacccactcccccctcctttgccagtggaaaagcttgccgtagggcatagctttcccagccttccctgcttcagaggcaggagcatggcactctgggagttgtagtgctcataacactcaggcgatccctgtgcaaataactggagagaggactatggtatggggaagagaaatgagaataagcaggagtggctggggccaggcaggtaactcaaacccagaagtcctactatttacttgacttcctactctgacccatcgtcgaacctaagccagttatattgagttcaaaactctaaccaaatgaaatcatgccattttttctaataggcatagaaagaaaagatcaggatgaggcagctggctcctgacccattctcccctgacgtggagacccctcatcttacccttgagtcctcaggcctaagacccctccctgtcttcccaggctcagctccgccccctgccctaagacagagagaatgagagtgtgggggtggcggcggcaggggggatttagatagatgttagaaaatcacagataccttccagcttaatgaaaccagcctccccagtccaggcctggcatctagactgagttccccagacccagggtggggtcatagccagagagccagtgaaggtaaatccatgtgactcaactctcccctccctaggcccttatctccagaggccagagcttccatccacccaggcagcctggtgatctgtcctcactgccccctccccacgcccaccctactgggccatgaaggggatgggggcaagcccagctgactgctccaccctctgcccaggaggaccatgcggcagtagcagccatgctgccctttctgctggccacactgggcaccacagccctcaacaacagcaaccccaaggactactgctacagcgcccgcatccgcagcactgtcctgcagggcctgccctttgggggcgtccccaccgtgctggctctcgacttcatgtgcttccttgtaagtgcctgctgccaccccttaccttggcatccatgccctgtacacacctggcaaacacttccagctctaaccactctcccacctgccccggtttcccaggcttaagcaggaggagtccccatcatccagcccaagcctcgcctttgaccattcacccaagccagggtcatccccttctaagacaagattttggaccctctgcttctgccccctagtccagcaggtggacagacagcctctgcacttgccaactgccccctcttccctcaggcactgctgttcttattctctatcctccggaaggtggcctgggactatgggcggctggccttggtgacagatgcagacaggtaagggtctgggaccctccctctagctctccacacacacatcttgttccacactcctcaggaataggaaggagccagccctctctcattcccctttgctggggggatgagaagggactagccccaatgtg

SEQ ID NO: 36298 - DNA, 2300 bp, Homo sapien
atgactagatgcaatttttttcaacctaaaggtcacagccctggacaggaatcagaccatagccctggcttccctacctgcatgcagtatgtccctacacatcctggtttgttagcccagcctgcagtcacacagtgctcaggccttctgctcccacttccccactcagataagcatgaggaggaactccaaagctttattcttggggaactctcagttttgtagactaagaaaaaggcagcttgaattggagatgtgggtttttttgtctttttttttgagatggagtctcgctctgtcgcccagtctggagtgcagtggcgcgatcttggctcactgcaacctccacctcccgggttcgagcaattcttctgcctcagcctcctgagtagctgggactacaggcacgtgccaccatgcccagctaatttttgtatttttagtagagacagggtttcaccatgttggccaggctggtttcgaactcctgacctcaggtgatcctcccgcttcggccccccaaagtgctgggattacagatgtgagccaccacgtccagccagagatgtgtttcttgaaggtgatggggtcatggatgaaagtcaggggcaggtgggtggggtccctgcacaagatgatacatgaactgtgtttcagggaagcctaccccaactgcacagttctcgaagcccgcccgtgttacaacgtggctcgcctaatgttcctcgatgcagagaggtaagggactgggggcagaggagggtgacaccaagggccccctgccattgtggaggacatcttggctaccacacaggctccccttctagattttttcctagggcatttgattttaattcaactcgttggtgtgcctgttaattcagctctggaaagagcaaggcctggaggttagagtttgttgtgaggggaaggggggcccatggtccccactgcatctgaggacatgcccttctttggctacagtatgagaaatttaggtcagcctgcaggaagaacttctggccctctagggatgggtggggagaccttgggatgtggccacatctgaaacatgtatcctaaacaagaacaagacagctcctgtccttggggagtgagctagatgacccccaagctgagccagccccagccccagatgtaggtgaccaggcatctgggtcccacaggaagaaggccgagcggggaaagctgtacttcacaaacctccagagcaaggagaacgtgcctaccatgatcaaccccaagccctgtggccacctctgctgctgtgtggtgcgaggctgtgagcaggtatgacgcgggctggctgttgagtcgggagaagttggacaggtcctgggcaggcaaggctggggccctgccctcagtgagtccccacctgtccctggaatccttgaagcctcagttcccactgttgggtttgtctaatgtccctacagtgaccaggttttcaaacctcaaattagaaaatgtcagccaaaaggacaatgttgtgctgtacccactgactctggggacttgagcaagttgcttactgctcagtgcctcagtttcctcatggggttaacgtacccaccttatgagagtgttgtgagggtaaagtgagtaatacatataaagaagcttagaggtgctgggtgcggtggcatatgcctgtaatcccagcactttgtgaggctgaagcaggtggatcacttgagccaggagtttgagaccagcctgggaaacatggcaaaacctgatctctacaaaaaatacaaaaattagccaggcatggtactgcacacatgtattcccagccacttgggaggctgaggtgggagggtcactttagcctgggagcttgaggctccagtgagctgagattccaccactacactccagcctgggcatcagagcgagacgctgtttccaaaaaaaaaaaaatgcttagaggagcagtgcctggcttgtaggaagccccaagtcagcgtgggctggatgctgcaggccccagcctggctttccaactagaggccctgtccctaaccctcccacaaaggtggaggccattgagtactacacaaagctggagcagaagctgaaggaagactacaagcgggagaaggagaaggtgaatgagaagcctcttggcatggcctttgtcaccttccacaatgagactatcaccgccatgtgagtccccaactcggccctcggccctgagcagccctccagggctccctgacccctgtgctcatggccttctgccagcagtgtggcctccaggtgggcctgtg

SEQ ID NO: 36299 - DNA, 2300 bp, Homo sapien
gggccagtgacagtggaggtgaaagttgaggccttggtcctggcctcagcctgcatatgtatgtcagatctgcagttgtgaaacatgagctcccaggtagagtccccaaagtcttggggccaagggagtgcctgctggtggttggacaaatattggcatggctttgaaaggagcaccttggttgtgtgaaggcttctcggtgctcccgaagcctgttttccgtatggatgggcaggcacaccaccgccatttgcctggcaagcccccttgtctgcaaagcatggcctggacagacctcagcccccacctctggttagccgagaccctctcattcctcatctgcccagcatgccttccctttcctgcagggcctgaagttcaaagccaggttccagcatttccaaatgtgaaactccagataatgcccaagcagcacactgagcaagagtcctgaggacagccctcccccagggtgggaggctgtaatagagaggaacacccgtgcctgcctgcaccctacccctggcacctcgtcacagagttcatgtccaggcagatcacattagaggcatccaagaggtgcaatagtggaatcaggagtgggcaggggagaccacaggatccccaaagaccacttcctcctttcacagctgggggcagcagaagatacggataagagctaaagttatggccgggcacggtggcttatgcctataatcctagcgctttgggaggccgaagcgagtgatcacctgaggtcaggagttcgagaccagcctgcccaacatggcgaaaccccgtctctactaaaaatacaaaaattagctgggcatggtggtgggcacctgtaatcccagctacttgagaggctgaggcaggagaatcgcttgaacccggggggcagaggttgcagtgagctgagattgcaccacttcactccagcctgggcaaaagagcgagactccatctcaaaaaaaaaaaaaaaaaaaaaaatctgaagttattagtttaaatcctggctcgaccgcttaacagctgtgtgaccctgggcaagttgcatcatacctctagacctcactttcctcatctataaaatgggaatagcaatgtcatggcctctggctgttttaaggattaaataagtaggaagttcttagcccagtgtttggcacataataacaaaccataattaatattctcgtagatgaggagattgagtcccagaaaggagaaagggggagggctcgcccaaggtcagctcctgtttcagagcttggaacaaggttctctgatcccattgggtgctctcacacctgttctgtgcctgattagcaccaggcagggctgaggggcactgggatgaccttgacagtccctgtcctcagccatcatacactccagagaagactgcactctggagcagagttcttagctcaaagcattcccactttccagtgcagaggcaggacatgtggtcagaccagtggcctaaccttgccagactggggctaggcaaggagagtgttgcaggtggaatcgtgtcccccaaaaaggcatgttgaagtcctggcccccagtacttcagaatgtgacctcatttggaaacagggtggttgcagatgtaattcgttcaattaagatgaggtcatactgaaatgcatgggaccctagccccatatgactggtgtccttataagaagaagagacacagaggagggtgccatgtgaagacagcaacacaggaaaaatgccatgtcagtgagaaaggggcttttgggaatgagaaggctttctggatgtaaaggtcaggttggtgtgtcagggacaaccccttcctggaaaccttgggctgaaaaaaagggactgggacctaccctgatgggatgaccgtgatacagtgaggacagccaggctggtggaggctgtgcaaggcaggggtgctgggtcatctgtccctaaagcgggtagccctcagctgggtaaggggctgggttactgagaaggagaaaagggaaggcagctgttaaaccggctgctgacctaggaatcccactgcaatgagagagttctggggggagggtctcttctccccctcccaccagaaccttcaactgtcaagcaccgagctagccaccagcatgctgtactccccaggtaggcactcatggggccttgccccactcctgtacctcctgcaggctagagcctccccccaggggaggagctgtgtcccgcatcagactgggtgccccttgagggtacagagagtgactcttccatcagactggatgccccttgag

SEQ ID NO: 36300 - DNA, 2300 bp, Homo sapien
gctcccgctgctgcttcgattgctgctgtcctgcctgctgctgcctgctgcccgcctggcccgccaatacctcctgcccctgctgcgccgattggcccgccgcctgggctcccaggacatgcgagaggctttgctgggctgtctgctgttcattctcagccagcgacactcgccagacgctggggaggcctcaagagtggaccgcctggagaggagggagaggttaggcccccaaaagtgaggccacaagtcctggcagcagctgtatccacaaaatgctttcttttggagtaggataatcctggcaccagcactgaccgaagcctgcccagtggacagaagatatagtgagggttgtgcatgagagggatctgccacagacatgcctctccactcccaacagaaatgtctttctggaagaatgccttgcatctagcacaaaactgattattgcccctctgtcctccagcagttcctcccaaagaccactcctaatcacctctggcctcaggcgggaggggaactaacacccacccacccctgccctccctgcaaatgggaacatcaaggttcccagtgcttaactgagggacaagtgacaatttagcagagaggcaagatttgaatccagactgtcttccagactcaggacctaccttaaaataatatctgagttgcttatggaggcagacctgcctgcaaagcccagcactcagcaagtgctcaataaatatttgatttgaattctttccatggctttgaaagtctaatcacccagactgctgctctgcaaaacagtttaacctggcctggcagttggtgggggtgggggagaggagagatggacaattgtacaagggtttattttgctacctattccatcgtggtttcagtcctcacagcctggaagttgtttccccctgctaagtttcggtcagtatgtcacactgtgacccagaaatggcttgagtccatctaggaggaagtttgcctggctagctcacagtagggaggaaaatatcctccagcgagtttgaggacttctcagctagtggtggtgggaagaggggtgatacgtttgctaagagactgggtgggaggccacccagggaggcagtgcagaaatgcatccccttgagggtcatcccaccctagaagagactagggttgggtgagttgccttaagaactgacttcatcatttcctcctccctagtgggaggcccctcaggggtcaaataagagcctcagaagagtcaacatgcttaaggaaacacagttagaaagtgcagtctgggcagggcgcggtggctcacgcctgtaatctcagcactttgggaggcagaggcaggaggatcacctgaggtcgggagaccagcctgaccaacatggagaaaccccgtctctactaaaaatacaaaattagccgggcgtggtggcgtatgcctgtaatcccagctcctacggaggctgaggcaggagaatcgcttgaatccgggaggcggaggttgcagtgagccgagatcgcgccattgctctccagcctggacaacaagagcgaaactccgtcttaaaaaaaaaaaaaaaaagagttagacacatttgcatcccagcctccggataatttgcttattgttcccaggcaataatcctctctctctgggtgactcttgggctctatctaggttcagacgaggacagtgaggagtacaggatccaattgggattccagtcccctccccacacccgtcagaaggcttggttgggaaagaagtgagccccaagctatccgccccacccccagccctgcggggctttctgcctgccacacgccgtccctgctcactaccccatcggtttccttcgggagtcttcaaagccagtgcacgtgctcccaggtctcagggaggcgacccagggggaggggcagagagaagggggtccgagcccttgggcccctaaccccgtccctttccggagcctcgggtgcccaaaggcgccggccgccagtcccaggcccgaagggcccctcccactgagtcggctctggtctccccgcccctgagccgcgaggactggacgcagctggctgcggagctctgggcgggcgctggggtcgcctgttgcagcctctcttccgcccggcggcccacaccggtcaggcccggcgcgggctgcgctctccagctgtggctatggccccagccccgagatgaggagggagagaactaggggcccgcaggcctgggaatttccgtcccccaccaagtccggatgctcactccaaagtctcagcaggtg

SEQ ID NO: 36301 - DNA, 2300 bp, Homo sapien
gtctgggccaagccacggtcccatatagggtggtgaataaggtgtagagtagaggtgcagcaggaccaacccttcccaccccaccccttcgacagggacctgagggagctcagggagggagagaagccagaagaccaggcagagactgaagagagctggcaaggcctggctagaaaaactccaggcaaggcctgtgtaagttggggctcccaggctgtccagcagggggccctggcacccagcaacctctgcttgggaggtggctacagaggggtgtgggtgttggctaggggcccagcaggatggatgccagacggacttctctccaacaataacagccctggctgttgccatccaccgagctggcagggccccagtttgggtggggagaggaaccagcctttcccagtctggcctgagaccctcaccacttccctccagttttcttccacctccagccccctctgtacacaactgcagccactggccaccagccttgccatgcctggcagatcttctgaccactagccctgccacccccacagacccagagaccaggaaaggagggtggggagcgaggaagggggccaaggcagagggcagaggagggctaggagaggaagagagagagactggacaaacatgagggcaggaattagggggttgtggacagacatgaagccactctcaagtcatggggctgtgcctggaaaaataccacctaaacccatcttcctgccctctggttagggctggcggggatgtgggggatgggggtggggtgggggagggttgggaaggaatatgtgtgtcatctctgtggggcatggaaacagaaggctggggacacccattctggagtagcttggggagagccactgaccctaattagaaaagccacctctctccttagggccctgtctgtttctctggggacagggtaggactaccttatccctatgatgtgaggtactgccagttgttaatcagtgtctgtggcttctctaggggacaagcccttcgggtcagtgggcatggggtgggcagcgtgggttggattttctcctcaggacctttccagccttaggatcatcctctagcactgagtactgctggaagggcagggagtgccccccaccccaccccatttattgcccgaccaaagagagggcctccctccccctcccttggagggacttgctggaccacccctcagcacgcccacaccttcctccttagctagtgaaagacatactcagcaaggcttccgcctgtcaggatggctgggacaataggattcactgaggatataaggctgttcctagctttttctcttcccattcccacctgtgcctcagttttccaaagtgctggatttagaaagggtgaattatgagggagctggagggctttgccccacccccctccgcgcgcacacgcaagcacaggcagaggcacataccccctccaagtcaaagttgtgagtggggtggtgtttgcgcgtctgtggctgggactggatgtgtcagggatgggaaaacccatcatgctggtcacagaaaatgcgcggtggggacagaagcagttttgaaggaaaagaagaggagggggactgaaagaaagaagggggcgctgaaagggagggcgctgggaggaaaaaggtgcagtgtggaggaagcgcggcgtgggcagggcttgggaagggataacggaatatctgaggtggagtgggccgtggagcgtcggggccggtctgagcagcgggtgtgtaaatggaacagtcccgagatgaattttatgggagtctgcgcaggtccttaatgtgtggctgtaccctccagccccatgtaccccacacgatggacagacagccttggtgtggcagggcccaaagaggtcctatctaccgcaataacacgaccaggcggccctgggggcgcaggggctcggggtgggagcggcggagcgcgcggagtcgccgcggggtggcaggggtgggccgggggcggggccgcgggcgtcggggaggtggcagtgggcgcagggcggggcgagctcagcggagggcgggtttgaatgtgccccggcgggagagggaagctgcagcgagagcgcgcggatctcagcgcgggagcagtgcttctgcggcaggtgctgcccggggccggggactggggactggggactgccggggcggaagacgccgctgcccgcctgccacggagggcagggagggcgggcctgacggctccgcagcccggagaagggacgccgggtggggccccagtgcggagcgtgcg

SEQ ID NO: 36302 - DNA, 2300 bp, Homo sapien
ccaggctgtccagcagggggccctggcacccagcaacctctgcttgggaggtggctacagaggggtgtgggtgttggctaggggcccagcaggatggatgccagacggacttctctccaacaataacagccctggctgttgccatccaccgagctggcagggccccagtttgggtggggagaggaaccagcctttcccagtctggcctgagaccctcaccacttccctccagttttcttccacctccagccccctctgtacacaactgcagccactggccaccagccttgccatgcctggcagatcttctgaccactagccctgccacccccacagacccagagaccaggaaaggagggtggggagcgaggaagggggccaaggcagagggcagaggagggctaggagaggaagagagagagactggacaaacatgagggcaggaattagggggttgtggacagacatgaagccactctcaagtcatggggctgtgcctggaaaaataccacctaaacccatcttcctgccctctggttagggctggcggggatgtgggggatgggggtggggtgggggagggttgggaaggaatatgtgtgtcatctctgtggggcatggaaacagaaggctggggacacccattctggagtagcttggggagagccactgaccctaattagaaaagccacctctctccttagggccctgtctgtttctctggggacagggtaggactaccttatccctatgatgtgaggtactgccagttgttaatcagtgtctgtggcttctctaggggacaagcccttcgggtcagtgggcatggggtgggcagcgtgggttggattttctcctcaggacctttccagccttaggatcatcctctagcactgagtactgctggaagggcagggagtgccccccaccccaccccatttattgcccgaccaaagagagggcctccctccccctcccttggagggacttgctggaccacccctcagcacgcccacaccttcctccttagctagtgaaagacatactcagcaaggcttccgcctgtcaggatggctgggacaataggattcactgaggatataaggctgttcctagctttttctcttcccattcccacctgtgcctcagttttccaaagtgctggatttagaaagggtgaattatgagggagctggagggctttgccccacccccctccgcgcgcacacgcaagcacaggcagaggcacataccccctccaagtcaaagttgtgagtggggtggtgtttgcgcgtctgtggctgggactggatgtgtcagggatgggaaaacccatcatgctggtcacagaaaatgcgcggtggggacagaagcagttttgaaggaaaagaagaggagggggactgaaagaaagaagggggcgctgaaagggagggcgctgggaggaaaaaggtgcagtgtggaggaagcgcggcgtgggcagggcttgggaagggataacggaatatctgaggtggagtgggccgtggagcgtcggggccggtctgagcagcgggtgtgtaaatggaacagtcccgagatgaattttatgggagtctgcgcaggtccttaatgtgtggctgtaccctccagccccatgtaccccacacgatggacagacagccttggtgtggcagggcccaaagaggtcctatctaccgcaataacacgaccaggcggccctgggggcgcaggggctcggggtgggagcggcggagcgcgcggagtcgccgcggggtggcaggggtgggccgggggcggggccgcgggcgtcggggaggtggcagtgggcgcagggcggggcgagctcagcggagggcgggtttgaatgtgccccggcgggagagggaagctgcagcgagagcgcgcggatctcagcgcgggagcagtgcttctgcggcaggtgctgcccggggccggggactggggactggggactgccggggcggaagacgccgctgcccgcctgccacggagggcagggagggcgggcctgacggctccgcagcccggagaagggacgccgggtggggccccagtgcggagcgtgcggagccgcgcagcacgtggcgcgcacgggccagggagcctgaggaccctgcggggaccgggacccaagctgggcggggcggcctggctcccgggcctaaaacaggctgcggtcacgttgacctccgcaaggggcaggcgagtggacgggtgatccccatcgatctggtcggtatcagggaggggccgtgccgctgactgcgctggcggag

SEQ ID NO: 36303 - DNA, 2300 bp, Homo sapien
gtgctgggattacaggtatgagccactgtgcccagcagagaaagtggaatttctatgctggtgtaacatttgagattttcccatttagaaagtcttcaggaagccgtcgagtcttgacacagaaaggatccagctcaggggaagcccatccacaggagtgattcctgctttggatttaggtcctaggggtgagatcacatccctgctccatttctggagcagaaagggagctagtgcagcaaggactctgagtagacgggccttgggagtcactgaagccacttccctgttgacagaatgtgcacactgactttcatccgctcacaggagagtgagagtttgtgaatgctctctgtgaactggggagcagatttttaatgagctctgcttagaaggagaggacacgttaagggatcacgctcccactggtttgcggttttggtcaggaatagagcacccaacgccccttcttatagacttctcccagccataggctttttgcagaccataatgaaagggagaaaggatatccaatcgggatggtgatggcaggcatggcgaagtggacagggacaaagaagaggaaagcaagggacaccctttgttctttggtattcaacacatgaacaaaacttgttaacgaatcgtagactgggtaacaacagggctggtgagggaggacgatgtgggtggctgtggggaaactcttcccaagcatcccaggggtgggccaggaaggggagcagatggacatctacagggcacagagcagggagtggctattctctcctggaggggttgtgggtccagcaggctttcggatgaggccttggaaaggcaaggacagcttgccaactggagggcaggcaaaacggctgagccaggccagacacggcagctcactggccaggggcatggcctaggggctctggtgccaaggctgaaggggaacaacttggccagccgctctgtggccggcatcgtcacgcggcctccaagagctccggctgccctgcactggttcccagagactccctccttcccaggtccaaatggctgcaggagcgaagtgggcggaaaaaaagcgaaccagcttgagaaagggcttgacgtgcctgcgtagggagggcgcatgtccccgtgctccgtgtacgtggcggccgcaggggctagaggggggtcccccccgcaggtactccactctcagtctgcaaaagtgtacgcccgcagagccgccccaggtgcctgggtgttgtgtgattgacgcggggaaggaggggtcagccgatccctccccaaccctccatcccatccctgaggattgggctggtacccgcgtctctcggacaggtcagagcgggtcgccgggtggggtcgctgcaaaaaccctgccccggccgcagccggagaggcggagcctcgcggggagggggcgggaccgccgagacaggcctggaaactgctggaaatgccgcagtgccgccgccgcgccttccgccgcatgtcggcaaagagtccccgccagccccggccggcgccctccccctacgctgagctgcccctcagcgcgaaccctccgcccttcctctactcctgcgagagtcgggatctggggctacccaaggttgggtcccgaatgccagtccctctgtcgggacgcgagatgtgtagggcagatgctaggaagaagattgggtctgggagcggtggtccgcgtggttagctgcctccgctctttttcggtgtcccccccagtcccgcccttgggtgtggggacgcctgccccacaagtgtttagggaggtcagtgggttcctcgcccgtagagacaccgtttatgccaaatgagcactcctcatccccgctcttgatggagtcatgtcctagacgtgaaactatggggctgtgatcacaagcaaatgtgtgggcggatccgttgcttgggttcttccccgccccctctttttttcggaccatgacgtcaaggtgggctggtggcggcaggtgcggggttgacaatcatactcctttaaggcggagggatctacaggagggcggctgtactgtgcttcgccttatatagggcgacttggggcacgcagtagctctctcgagtcactccggcgcagtgttgggactgtctgggtatcggaaagcaagcctacgttgctcactattacgtataatccttttcttttcaaggtaaggctgagatctccgctaggcttctttccctttagtgctgtattcgtgttgtttttgtttttttctgtcctttagggagccttagtctagatgtcg

SEQ ID NO: 36304 - DNA, 2300 bp, Homo sapien
gttttttgagtcctcctcggttttctctagtgtgtttggggggtggggctttctctcggcgcctgctggccgtagcgaggtgggctgtggggttggggcagtgggcggctggcagctgcacgtggtggccgcgcggcccgggacgctgccatttttgcccctccacttccggacgcggctacggggcgtcggagggggaccgcagggtggcgggggtgcccgctcgggtgactcagcacggccttgtgggactggctttgtcacctctcttatcggacgcgttgttaaagccttcttgggtgctttgtttctgtgagggagggttgacggtgtgggaagagagctttcggtctccagcacccgatactccctccttccagatctttcttgcagtcccggtggaggaggggcggggaggggagcaggttctggaagattcatgggctccttcctccgcccttcctcgagagctgagattgttctggaagcttctggattctggcgccccgccccagtgcccggatgctggggcgagggagggtgcactgcggcgccccctcctcgcgtggtcctggccgacgcatgtccggcagtgacgagtgtcggcctggtggctacggccaccatctttcttgggtttggtcctgttctgtaattttgtgctgtgaaagggtcgtggtggagcttttggcttaagaattctttgtccggatttaattgctcctccggtgggtatcgtatggatcccaggttattcctccctgccctatggggcaggagtgtcccgcccttggactggtcttaggaactgacacctcagggggagcagtttaaagttagtgccatttttatcttaaactagtcactttgatctcccccaaataaagaactgtaggtagtgattttcacatttaaatttgtgtaaggattacttgggatctctagatacctgggttggaccaacattatgatttttctgccatactaccagatgatgctgaggctgctggtcaccattctttaagtaggtgggttctgtgacatttggttgaagaatatttagcttattttctttttccttctgaattttcaggcctcccacttagtgtgtagtctgagatctttaagagaatgcatttttagtcttgggaagggatagtactccggttaaaccagtctgaactcactgtctaaggtcctaacaaatgatatgacctttaggatttttaaacatggggccttagtgttcttttgtaattaatgagatttttattttagatgcctgaggaagtgcaccatggagaggaggaggtggagacttttgcctttcaggcagaaattgcccaactcatgtccctcatcatcaataccttctattccaacaaggagattttccttcgggagttgatctctaatgcttctgatgtaggtgctctggtttccacatttggcatggtttttttttttgatactctagaaggaggggaaaggagtggtttggcctttgttggggactactattgaagggggtaaacttgcagctattccaaaaagatgggttttactctggccatcttgaacttggaagggactatgtccagaataagtgggctcatggaactaactggttctaaagcctcaagatagggggcaatcagatttgaggctgagagaggtaaaccaagattttctttgaagatacgggctttaagaaagcaaaagtggctgagcgtgttggctcacacctgtaatgccaaggcaggaggatcacttgagcctaggatttcgagggcagcctgggcaaccgcgagaccttgtctctgcaaaaaattaaatattagttgggcacggtggcatgtgcctgtagtcccagctacttgggaagctggggttgggaggatggctcgaacctgggaggtcaaggctgcagtgagctgtcatccttgccactgcactgtagcttgggcaacagagcaagagtctgtcttggaaagagcaaaagtaagttgctgtttgtatttccaggccttggacaagattcgctatgagagcctgacagacccttcgaagttggacagtggtaaagagctgaaaattgacatcatccccaaccctcaggaacgtaccctgactttggtagacacaggcattggcatgaccaaagctgatctcataaataatttgggaaccattgccaagtctggtactaaagcattcatggaggctcttcaggtattgcagttctgtaggcattcatacttatctgtgttctttggttttttgcttctttaaaacttgtg

SEQ ID NO: 36305 - DNA, 2300 bp, Homo sapien
cttctttaaaacttgtgattgactttaaacttgttggcaggctggtgcagacatctccatgattgggcagtttggtgttggcttttattctgcctacttggtggcagagaaagtggttgtgatcacaaagcacaacgatgatgaacagtatgcttgggagtcttctgctggaggttccttcactgtgcgtgctgaccatggtaagttagcttttctgttacaaggtagttgggttaggattttctgggctcacaccagtagcagaaattttgggcatcctgtctgtaaagcagttcttcacagcagttctgctgatacttactaattgctggtctcaactgcatatactttttaccctgttacacgcttgtaattgactcttctaggtgagcccattggcaggggtaccaaagtgatcctccatcttaaagaagatcagacagagtacctagaagagaggcgggtcaaagaagtagtgaagaagcattctcagttcataggctatcccatcaccctttatgtgagtatggacttttaaatcttttacacttaacgtgcaggatgtttcctgttctggagaatctcattgtccctggcttttgctttccctggtagtgttttgtactccaaggctaacttctgtttttgttacttagttggagaaggaacgagagaaggaaattagtgatgatgaggcagaggaagagaaaggtgagaaagaagaggaagataaagatgatgaagaaaaacccaagatcgaagatgtgggttcagatgaggaggatgacagcggtaaggataagaagaagaaaactaagaagatcaaagagaaatacattgatcaggaagaactaaacaagaccaagcctatttggaccagaaaccctgatgacatcacccaagaggagtatggagaattctacaagagcctcactaatgactgggaagaccacttggcagtcaaggtgtgagaagcctttgcatgttggctcaacatgcacatatggagaggaatgagttaggtggaagagtgttgggtaatagacacacggaacttgtccaactgataacagaaatgtgatagccatgtgatttcacttactgattaccctgtcatagtgaagtgccatcatttctaatgacctcactttctcttcttatggaaatctgggtaatgtctattggcagccttacacatccagggttctgatcagaggggactgttttctacatacagctagtacccatctagatcgtggagggcattaaggctcagttttctcaggagctgcttgttgtgtgtgctctatcccttaggcttagggaggatcattgttccacttttagataatttggtgttggggctaaaaggtcctcttttgaaatgtaccacttatttttggtttctttcagcacttttctgtagaaggtcagttggaattcagggcattgctatttattcctcgtcgggctccctttgacctttttgagaacaagaagaaaaagaacaacatcaaactctatgtccgccgtgtgttcatcatggacagctgtgatgagttgataccagagtatctcagtgagtatctccttggcctaatttagttgggtgaagtcttgggaggttttaggcattctgctaggatattctaaggtaacagttttctgcaatacatagtaggtgtaagggttcaggaggctattagagccttctgtttgaatctggggaccaggtctggtctagctgttttttactgagctttctcaccctggttgatggcagattttatccgtggtgtggttgactctgaggatctgcccctgaacatctcccgagaaatgctccagcagagcaaaatcttgaaagtcattcgcaaaaacattgttaagaagtgccttgagctcttctctgagctggcagaagacaaggagaattacaagaaattctatgaggcattctctaaaaatctcaaggtaaaaaggcaaataatgcttattccctttaccactttcttagtaataacaataaattattccattcacattgaaagtgaagttattgtagttaagctggattgtttttcctcttcccacccttcaagcttggaatccacgaagactccactaaccgccgccgcctgtctgagctgctgcgctatcatacctcccagtctggagatgagatgacatctctgtcagagtatgtttctcgcatgaaggagacacagaagtccatctattacatcactggtgcgttgactctgattgaagcctttttggaggagtggggagcacaatta

SEQ ID NO: 36306 - DNA, 2300 bp, Homo sapien
gaggaccctgaaacaccgttgtttaaagacttcacacagaaggctctgaactgagccactggggaagggaagtttcagtaacatgacactaaaatggcagagacgttaaaaaaagtttttcccttctagagctgttttgcgcgcatgcatgtctgtgtgcattggggctttttagacaggcctgccctgtgactttgtggtagaggcagagagaaggaaattgtcccctgagcacggtagggccttgctgggtggggtcagaggccagtagttccaggcctttctctgtgtccagcacagacccttgtccttgctgtggaaatgatgagggatggagggacaagaggaagaatgagaggacacacgccctggagccctcaccactgccctgggggttgccatctggaggagcctggggataagggtaacccagggaggctgggcacgagggagctgactccacgtttttccccccgttcctcaccttcgagggccctgctaggtcacccctatgctggcatgaagagcatggggcaataaaccagcacagtctctgaccacttggagcgtctcatccagtgagagagacagccgttaaaagcataaacatccaaataaagatgcctttccaagttgcagtgggtgctatgaagggaaaagaatagtgggaaggaaaaggatggagtcggtagagggtcatactttgggtggtccgggaaccctcgcctgaggagtatcatctcaactgggatgtaaggatgagtaaagggatgggggcagagcattagggggaaagcctgtgaattagaggaactgagagcaagccagtggggcttcacagcgggcgagtgagtgggcgaggaacgcgggcgaggccatgtagagcctcgaagatcatgggaagtgggacagaattactacccagccaacaaagcaaggagacaccttcatcctgtcagaaaacggggaaactaacacagaggagcggcttgggatgcagagcctcaatgtcctgtccacaagatggcaatggtcaccatgacctctgggacgcttatgaagggcgatgacgaagcacaggggacacgccgggcgggcgcctcttcagggctggggctccccgcgcccaggggcagcccaggtccccggaacccaagccgcgtctgcctccgggccgcgcgggggcgctgtggtccggcggcggcccggggcgctgcgtggtcgcggcaggggcggagggggccgcggggagggaggcgggaagagcgcggcacttccgctggccgctggctcgctggccgctcctggaggcggcggcgggagcgcagggggcgcgcggcccggggactcgcattccccggttccccctccaccccacgcggcctggaccatggacgccaggtgggggctagggcagcagcgagctcacgtgaccgagcccccgggccacgtgactgccgcgcctcagcacgggggccgggtggggtcccggctgctcggccgtcggccagcatatcgctgcccggagccagcggggatgggagctgcggcttggttttgtgctccttggggagcttcgggcggaggggctggggaccctgacgtcccggatcgtggaggggagtgtgggggaaggggcgcttcctctgacctgagcagccggctagcgttggagggaacagaggagacctgtgtggccagaggggcggatccgcccccggggagggaggaagctctgcctggccagcgccggcgcaccccctccccgagagagagagagagagagaggctctttgtccgggccggagctgcagcggagggggcggggaggagactccgggcactactccagtgtggtcccctctggagggcggaggggatgaggagctgcgccctaatccttatgtccgctttccttacagatggtgggcagtggtggtgctggctgcgttcccctccctaggggcaggtggggagactcccgaagcccctccggagtcatggacccagctatggttcttccgatttgtggtgaatgctgctggctatgccagctttatggtacctggctacctcctggtgcagtacttcaggcggaagaactacctggagaccggtgtgtgaagaaagggcggggaagtgagctaggtcgggaaagagggtatttggccagcagtccaaacgggatatgacttggagagggcgggaggtcggtaggccggacagcagggcaggctggctgctctggggaagatgaagtgctatggagaagatttggggcttgactttgtgtgctttct

SEQ ID NO: 36307 - DNA, 2300 bp, Homo sapien
tcagtgtaaaaaagaaacctaaatgttctgcgagtacccagcagcccccccaccccatcccccaacaacaacaaacaactccaggtccatgggctggatcacctctaagggtccctcctaactcggatattctggcattatcttagaaaaggaaggcttgtctaagtcctcagggctctgccaagcccagaggggccactattttgaggattcgtgtgaagatttgttccctgatggtcttcaactgtcatttggtggggagggagtggcccaacaggtttccctgggtcccctttcccaagtcaccttttcccatgtcctctgatcttgcttctctccattctccttctcagtcccttgtccttttgccctttgatgacctgaagatctcagggaaactgctgctgtgtaccgactgaagccaggcagggtctgggatcctcagggctccacctctccatctggaagccggagccataactgctgcagtttgggcccaggctatgtgctcttctggtgccctagggactgctgtggccagagcctggggccagccagtacagtcctgagccgaggaggagggactgcaagtggaagagagccagtctggaaggaagagctttccaggtggacagggcttcttggaagacccccaaagccccaggtatcctgggtgaagcctgtttgcctctcttgaaaatggcaggtgctcttgttttacccatgttgggtcagcctgaaactgccaaccagtaggaagcatggactctcctgagtgagaagagactgaaataggagcaagcagaaccctgagaggtgtcccatcttattgctgttgaggaccctgaaacaccgttgtttaaagacttcacacagaaggctctgaactgagccactggggaagggaagtttcagtaacatgacactaaaatggcagagacgttaaaaaaagtttttcccttctagagctgttttgcgcgcatgcatgtctgtgtgcattggggctttttagacaggcctgccctgtgactttgtggtagaggcagagagaaggaaattgtcccctgagcacggtagggccttgctgggtggggtcagaggccagtagttccaggcctttctctgtgtccagcacagacccttgtccttgctgtggaaatgatgagggatggagggacaagaggaagaatgagaggacacacgccctggagccctcaccactgccctgggggttgccatctggaggagcctggggataagggtaacccagggaggctgggcacgagggagctgactccacgtttttccccccgttcctcaccttcgagggccctgctaggtcacccctatgctggcatgaagagcatggggcaataaaccagcacagtctctgaccacttggagcgtctcatccagtgagagagacagccgttaaaagcataaacatccaaataaagatgcctttccaagttgcagtgggtgctatgaagggaaaagaatagtgggaaggaaaaggatggagtcggtagagggtcatactttgggtggtccgggaaccctcgcctgaggagtatcatctcaactgggatgtaaggatgagtaaagggatgggggcagagcattagggggaaagcctgtgaattagaggaactgagagcaagccagtggggcttcacagcgggcgagtgagtgggcgaggaacgcgggcgaggccatgtagagcctcgaagatcatgggaagtgggacagaattactacccagccaacaaagcaaggagacaccttcatcctgtcagaaaacggggaaactaacacagaggagcggcttgggatgcagagcctcaatgtcctgtccacaagatggcaatggtcaccatgacctctgggacgcttatgaagggcgatgacgaagcacaggggacacgccgggcgggcgcctcttcagggctggggctccccgcgcccaggggcagcccaggtccccggaacccaagccgcgtctgcctccgggccgcgcgggggcgctgtggtccggcggcggcccggggcgctgcgtggtcgcggcaggggcggagggggccgcggggagggaggcgggaagagcgcggcacttccgctggccgctggctcgctggccgctcctggaggcggcggcgggagcgcagggggcgcgcggcccggggactcgcattccccggttccccctccaccccacgcggcctggaccatggacgccaggtgggggctagggcagcagcgagctcacgtgaccgagcccccgggccacgtgactgccgcgc

SEQ ID NO: 36308 - DNA, 2300 bp, Homo sapien
acattaaaatggggatgatagtgtcagatttcgtgtggatttttttgtttttgtttttgtttttagactgagtctcactctgttgcccaggctggagtgcagtggtgtgatctcagctcactgcaacctccaccctcaagtgattctcctgcctcagcctcccaagtagctgggattaattacaggcatgtgccaccaggcccagctactttttgtatttttagtagagatgaggtttcgccatgttggccaggccagtcttgaactcctgacctcaaatgatccacccacctcagcctctcaaagtttataggcgtgattacaggcgtgagccaccgcgctcggccaaattttgaacccagttggtctgggtctggagtttattactatacttttgctgcagcctttgaggaccggagaggaacatgtcaggggaggagactgagaacatctgaaatcatgctgactcaagggaaggagatgcttcaatttcccaggcctttcccctcgtggctcctcactgggcttcatgctcattacgtctttcccactctggtcctacatggggttgaagaacagtgggccatcttctcccctcagccctcccccaactcttctgcctccaatcgccccccacagactaggtccttctcctctccctatctctcttcccttcccattctcagttcaaatggaagcttccttgcctctcaccccactgagtagctggccccactgtgtgcccccacaacaccctgttctcacttctgtcttatcccaaccactctgagctgtaattgccaaggagcttttttaggaccatgggatttttttgttggtcatggggggtggttattggttattactgtgatagtcagttttgcttccagtagaaagaacaacgtcagacattacaggagaccttccatacatgtttgtcaagtaggtgaatgatggatgaataaaatgaggttgcaggggaagggctgtgggaaagctggcctcccccctgcaaaacgttgctgtctacactcatccaccttcctttctccaatgctggagatggaaaagctacatgttcccttgcggataaccctctaagggcattgctggcgttaggctgatagcacttggaatagtggggaggaatgagggaataaatcatggagcatgggcttagggctcacttgtagtagggtgctcccacggccttcctaggcccagggacagtgaaagaggaaagatgttttgggactaagattggggctgtgttggggacctgagcagagtgcaacccagcatgtctggggcctccccaacctgaccccacttccttgactgctggggttgaccagaaactgtaactacccaaggccagggtttcaccctttgaggaagaagaaactccacaaccactttactttttagacaacagtttccctgagaagacgctctttccaaaaaaacattttcatgcccaattccatgtgatgtgggacgttgacacaggagactgtcttccaggacccaggagaactgctcctttaaagataatgggagtcccctttccctacccgtacccctgggcactgatagggaaagatgagaaagcaagagaaattgagataaatgggcaggggataggaagcagtgcttccccatcccatcgcctacatgccctcccccaaagatgccagcttgtacggacaattaatagatatttcttttaaaacaaatgaatgatccgggaccggtggctcacagcctgtaatcccagcactttggtagtccgaggcaggcagatcgcttgaacccaggagttcgagaccagcctgggcaacgtagcgagacccccgtctctacttgtagtcccagctactcgaaaggctgaggcaggagaatcgcttgaacccaggaggcggaggttgcagtgagcagagatcaaccactgcactccagcctgggcaacagagcaagacttcgtctcaaaaaaataaaaaataaaaataaaacaaatgaattaagaaatagaagtgaaagaaggaaacagtacatgcgtggaactaatgaatggagtgaaggaggaagggggaaagagtgaatgaatgaatgaatgaatgagtgaatgaatcaacgaaggagtgagtcaaggcccgggaaccacagactccaagcctacgcagagcccgggaagggggattccggaggggcggggcctctttccggaagcgcccgccgggggcggggagggggcggggccatccgcgtgaggcgaccctgttggtccggaggggcggggc

SEQ ID NO: 36309 - DNA, 2300 bp, Homo sapien
tgtcaagaggaagattatggtgcctaaatggggagcacgaaaggatcctctgtgggtttggaaaggccaaggttaggggctctgctctctgtgggggaaggggttgaaactggaacaagaggggctggagttagctgtgaggccagcttcccaaaaagcatgggcaggagatgctggaatgaaccaccaagtgagattctgcctctgccaagggagtgaaccagacccccgcctcttctggacagccgccttcctctgggcagggagaatggacccatcaacctggagaggaccatgcaggctggatagctctaagcaataggtggacagagagccaccttcacctcacctggaaagggaagagtagtaaaatgaaggcagggccaggagtgggactagaggggtgggagcagtggctctcctgtccccaacaaggggaaggaacatcctgggcagatcagtgtgtttgtaccctatcccccaaaatcagacatcgaggctttgccccaaactaacttcctacccacaaatattccccatagattttgagtgggaaagatctgaattctaggactagctctgtgagtgctagcaggtgaccttgagtaagccattcactctccctctgccttggttccctgtgagtaattggggagaacagttactgtatgtcaaagactctaatgacacatagtaggattccacagtgactgtgtatgcacaagattgatcatgcatggcttttattatattcttcataatggttgtttttcatgttcttttctccccattagactttgtgctccttgcaggaaggaaactgtgtttcatttctgtactgggcacacaataggtacccaacacctgtttactgaatggagacatccagaaatgaatgaatgaataaatgtcagggtccttcctgctgtgccaggggatacagggaaaagcagtgtggggtggatggcctgaaaggataggctgcctgcagtggctcagcctggcttgcttcctacacctacaagtcagagccttagaaattgtccagtcaacttcctcactgcacagatgaagaaattaaggctcagagacaggaaggcacttgcccaaggtcacataactccttaatgacagatacagaattcagaattagaactcaggtttcctgccctccagcctagggtattgcacacacttcactgcttctctggagctgttcttttagggaagaaagatggttcagtgaaggccggttccaatgccctcccctctgccctctgttagtcctttcccacatctagcttcaatctcttccctttccccctattccattcctctggaagtctagcttctgccttaacccttcaccacgaaactgggagtaaggatcttccctagggttccaagaatcaatttcctctccccactcctctgccctgggaacttgggggaaccagagatgtgtgtgtgtgtgggggggtgctgttggttgaacctcgggcaccgagtccacggagaacagatggagaggggttgcggcacagattctcccaggataggagcgcgggagggaggtgcagtgagcagggctgggagcggggaagaggtgtggggagtccctgttgctttaccccttcggggggtggttattaggtaggcttgggaaggcggagtttggggggctgggggcggggctcggctgcgctggcaggaaagggggggcgcgctggctccagctcggctcagacaaaaggcggcggcgggagcgggcgggaggcggagcggcgccgcgagggcctcaaggtgacacccgcccccggccccggccccccccggcccggccccccagcctgcctcccaccctcagcccccagccccttactcccggtgccctttccgggccccctcccccggcggggggtggggagcagcgagggccccgccccctcccgtcctctccccagggcccgcgcaggatgcccccggcccctggcagccccccgggaggtcctgagctcgacgcgccccctctacgccatgtccccccctggctcggccgcgggagagagcgccgccggcggcggcggcggcggtggcggccccggggtctcggaggagctcacggcggcggcggcagcggcggcggcggacgagggccccgcccgagaggaggtgagagtctagggcgccccttccccgggcgcggccgcagcctggccccccatcccccatcgcacgcgtcccccgctggttccgccgcagcgcggccggcgccccgcaccccgagccggccgctgcag

SEQ ID NO: 36310 - DNA, 2300 bp, Homo sapien
tggaaagggaagagtagtaaaatgaaggcagggccaggagtgggactagaggggtgggagcagtggctctcctgtccccaacaaggggaaggaacatcctgggcagatcagtgtgtttgtaccctatcccccaaaatcagacatcgaggctttgccccaaactaacttcctacccacaaatattccccatagattttgagtgggaaagatctgaattctaggactagctctgtgagtgctagcaggtgaccttgagtaagccattcactctccctctgccttggttccctgtgagtaattggggagaacagttactgtatgtcaaagactctaatgacacatagtaggattccacagtgactgtgtatgcacaagattgatcatgcatggcttttattatattcttcataatggttgtttttcatgttcttttctccccattagactttgtgctccttgcaggaaggaaactgtgtttcatttctgtactgggcacacaataggtacccaacacctgtttactgaatggagacatccagaaatgaatgaatgaataaatgtcagggtccttcctgctgtgccaggggatacagggaaaagcagtgtggggtggatggcctgaaaggataggctgcctgcagtggctcagcctggcttgcttcctacacctacaagtcagagccttagaaattgtccagtcaacttcctcactgcacagatgaagaaattaaggctcagagacaggaaggcacttgcccaaggtcacataactccttaatgacagatacagaattcagaattagaactcaggtttcctgccctccagcctagggtattgcacacacttcactgcttctctggagctgttcttttagggaagaaagatggttcagtgaaggccggttccaatgccctcccctctgccctctgttagtcctttcccacatctagcttcaatctcttccctttccccctattccattcctctggaagtctagcttctgccttaacccttcaccacgaaactgggagtaaggatcttccctagggttccaagaatcaatttcctctccccactcctctgccctgggaacttgggggaaccagagatgtgtgtgtgtgtgggggggtgctgttggttgaacctcgggcaccgagtccacggagaacagatggagaggggttgcggcacagattctcccaggataggagcgcgggagggaggtgcagtgagcagggctgggagcggggaagaggtgtggggagtccctgttgctttaccccttcggggggtggttattaggtaggcttgggaaggcggagtttggggggctgggggcggggctcggctgcgctggcaggaaagggggggcgcgctggctccagctcggctcagacaaaaggcggcggcgggagcgggcgggaggcggagcggcgccgcgagggcctcaaggtgacacccgcccccggccccggccccccccggcccggccccccagcctgcctcccaccctcagcccccagccccttactcccggtgccctttccgggccccctcccccggcggggggtggggagcagcgagggccccgccccctcccgtcctctccccagggcccgcgcaggatgcccccggcccctggcagccccccgggaggtcctgagctcgacgcgccccctctacgccatgtccccccctggctcggccgcgggagagagcgccgccggcggcggcggcggcggtggcggccccggggtctcggaggagctcacggcggcggcggcagcggcggcggcggacgagggccccgcccgagaggaggtgagagtctagggcgccccttccccgggcgcggccgcagcctggccccccatcccccatcgcacgcgtcccccgctggttccgccgcagcgcggccggcgccccgcaccccgagccggccgctgcagccgcagtccgcgccgccgcccccacccggcggccggagctgtccgcggtgccggggaaggggccgcgccgggggcggggctcaggggtcccgggcagggggaggggcctaggggcggagcctcgcggatcctgggcttatgagagtgggggctatgctctaccggggtggggacggtggcggggatcctgtctcacagaggaggatgctaccttgaaggccaggaagggcggcttgtacgggctacagaacgaggagggtaccatggggaagtggtggtggtacctgatctgggaccctaaggaggtcagatgtgtacggggggtcccgcctgtggtcattgggagtgtg

SEQ ID NO: 36311 - DNA, 2300 bp, Homo sapien
cccgggcagggggaggggcctaggggcggagcctcgcggatcctgggcttatgagagtgggggctatgctctaccggggtggggacggtggcggggatcctgtctcacagaggaggatgctaccttgaaggccaggaagggcggcttgtacgggctacagaacgaggagggtaccatggggaagtggtggtggtacctgatctgggaccctaaggaggtcagatgtgtacggggggtcccgcctgtggtcattgggagtgtgtgtgtgtgtgtgtgggggggggtgtgcacctctctctcacgaggctcctgctgcttcctcatatccctagttggggtccctagtactcagtcctctgaacctgaagacaaagagacggaggaaagtaccaggagcacccccactccagcctcccatgcacacttgtgcacacgcatgcaccctgtactagggcagaggcacacaagcggggatgggcctgcaggtaaagcccctttcagaggtacccacatggggacaagcacataaccaggtaggcacacgaaggggcccgtatgttcatacctcctaaggacaaggctccccgaaaggcacatgtaccctaatctccttgtccacatgtactgtgtgctatttcctagctcgcctaactatccatacttctagatccagggaccgatgcctattactgtacccttcttttccactcttttcctctctttcctggctggcctctaggtcaggcctgaggaattgagggggtaagtcaggatcccagcaggaggttgtgtgtgtgtgtgtgtgtgtgtgtgtggtgggggatgggttcctaaagctagacagcacagaggaggggtgggaaaacagaggccactacaagaaattaaactcaacactcaattaggatgtggctgctgggggccagcaccatggtaggcacctaggatgcaaagagaatgaagcatgggccctcaggagtacccagtgtagtggggagccagacatgtaaacaactcctgggccaaccctgggacagaatgtgccaggagctttaacagacaggctccaggagagtaccaaaaataattttctcttgataaattgctgggcttcaaacgttgtcctcgctaccccagtcccacatcccctatgcctgtcctctcctcagccacatgcctctgcccttctggatacctcctcctggactgcctgccgctcagggaccccagccccctccctcccatcctaggacaaagggaaggatgtcagggtgcaggagggagactcacaggggaaccagggtccagaacatggggaatgagactgggcctggggttctctggaggcccttatccaaaggacgtgttaggctaattgtgagggttagggaggtggatgggtcagaggggagtagctcctctagaacctaggactgaaaaaaatctggaagtgagggccccacttgttaagtggggaagtgatgtcagtgggtccctcccccttttctagaggacctggaaggggtctgggctggggaccttccttcgctgatgcctgtctgtctgtcctcccctgtcttccctgtccacatcttctgtttcattgccatttttgtgtttgtcttcggatgctctctgggtaccatcctatccatctgtgtttgctgcctgggcctctatctctggctctgatccttctctgcctcttggggtgtctctctctgcactctcctgtactggcattccggtcccctttcctgtcctctggcttgctctgtgtcacttctgtttctacctctggcccctggctcccatcttggtctcaccttttctctccatatccctgtttctctctgcctgttatctctggtgctggcctctgcccctccatccccgtatccatctctgtgctgggtcctgcctgctctcacttcccactcatcttggcccctctccctgcccacctgagcagcagcgtcccatccagccctctttcaccaagtccctctgccgtgagtcccactggaagtgcctcctgctctcgctgctcatgtacggctgcctgggggcagtggcctggtgccacgtcaccacagtgacgcgcctcaccttcagcagcgcctaccagggcaacagcctcatgtaccatgacagcccctgctccaacggctatgtctacatccccctggccttcctgctcatgttgtacgccgtctacctggtggagtgttggcactgccaagcccgccatgagctgcagcaccgtgttgatgtgagcagtgtgcgggaacgtgtgggcc

SEQ ID NO: 36312 - DNA, 2300 bp, Homo sapien
ggctactgggaagatacagaaccatcctgtgaaaatcatttcagcactggagaccttctttgctattacttctttcattaacaatgacctctaatttaaattgggccctgctggtttgttgatgaattgagcaactgagaacgtggcgggcactaaactgacagttccttccttcatggagcctgcttcatgtggaggaaacaggaaataaagcaaaagaagagggtcaggcttggtggctcatgcctataatcctggcattttaggaggctgaggttggagaatcgcttgaggccagaagtgcaagaccagcctgcgcaaacagcaagaccctgtctacaaaaaaaaaaaaaagtaatctttatgcctcagcctcccaggtagctgagactacccacaccttggtcccagctacttgggaggctgaggtgggaaaatcactttgcccaggaattcaaggccgcagtgagctatgattgcaccactgcactccaggcaacagagtgagaccctgtcttaaaaaaaagaagggagaaagtgtcagatggtgatgaggtctgggggggaaatagagaatggggatcaggagtgtggatggtgatattccctcaccaagaggtgacatgtgagcagggagctgggaggtgagggtgtgacccgtgtggaaatcagggaaaagcattccagcctgagggaacagccaatgcagaggccgtgaggtggccagtgccactgagcagtgagctgggataggggcaggtgaggaggctggagagcggggtcagacaaacaatatgcttattaaaacaagttgtacagcacctgcctcaagcctgagctgaagctgaaaattggcacttcaaagcaggaggaagcagagatggaggaaagccctccttccctaccagaatgagtccacctcagacagccagactttggacctctgcctttgttcctagatctctgttgctagatgaaggaaagggcctcaggggatccatcttcaaatcaagggctccctggctaccaaattctgtctagtaaaaattattcgagcagcgtgggcccgcctggcatcattttctgcagtttctcattctaattaaggcactgatgatttgctggtaaggcactgctgagggcttgaagggacccaatcccgggtgcctggcccctcactgcttgcaaagcagcatcctggccactggggcagtagcctgtttagcagtgctcaccacaggcccaggttcaagctcctccgcgagcgccaagatgagttttggcacccctgatttattgatgagttaacagagcttcgagatgttcatccagggtaaccaactagtagtcctcggcagagctgaagtcaaagctaccctttgaaagccccgccaccctggctgcctctcccttcctgaaggccaatttctttttttttactagccgtccctctggtctgtccctctcgccctccaggagatctggggccccaaccacatcttgtcgcgccagggctggaagagagtttggcacagggcatggactgtgtgaaggagcgctgtgttggcctggaaccttcctgcgtctggtaccagaccttcagctgggggaaaggtggaaggtgccctccctcccgcagggcctaaggtcaacaggaggcctcacgggagttccagtgacttctacaggtgccttggagaaggtgcgtccaccctcctcttcttccacagacgcttttcctggaccagctccctatccattgccacacaaaagctaccaagagagcacaagcactccagaccagcagccctgcccgacccccgcctcccgcagaaagcccacccgttcctagacacgtcccacggaagcacagggcatagcgcaaggccacagtcccactacccgcaaagcggccgcttccacggaaccgtcccgaggccgggcctggccaccctgcgcgcgagtaagccgcgtgcctggcgcgcagcggcagcggcagcggaggaagcagcggcgcgctcgtcctcccggcccggcccgctcctagcaacgcggggcgtccccaacgacaaagacctgcgccggcgcgcgggactctgcgtgaggcgagcgccggggctcccggagcgggtgaggcgacctccgggagtggggacacccagccccggtctcccttatcggggccccctctggccggctgggcccgggagcccctctagcgtcctctgcccacaccggcccgaagcccacgggcggccattgcctgggttgcgttttccgtggcggggaagcgccggtcc

SEQ ID NO: 36313 - DNA, 2300 bp, Homo sapien
ctagccactattctagaacctggggatagctcagtgaacattgaccgtgtttcaatgcatcagttagaggtgtggggctgactgcatgttggtctttccatttcctccccacccctccagaccccattgaccccagagcagctccgggcagtggagaacactgtgcaggaggccgtggggcaggatgaggctgtgtacatggaggaggtgcccctggcgctcactgcccaggtccctggcctgcgctctctggatgaggtgagttggggaagcccttttgctggagatcgggggcctccttcaggcatacctggaggctttatccttctcctttggcagttaacgggcctgtcccctcttgacctcaggtttacccagaccctgtgcgggtggtatcagtgggggtgcccgtggcccatgcattggacccagcctcccaagccgcactgcagacctctgtggagctatgctgtgggacgtgagtcactcctttgtgctgcctggcccaggggccccggatccttgcccttcccttggtctttggagccatcagcccttaatgggagatgcacgctggcttctcccttctctactgtcatgccccgactttctgttcactccttcctcccacaggcacctgttacgtactggggctgtaggggacctggttatcatcggggaccgccagctttccaagggcactacccgcctgctggccgtcactggggagcaggcccagcaggtcagcatgccagtaggcctgggacttctgggttgagtgggtgcatgggacacacgcaggtgacatgctcaggctcaggggtgcccagcagcagagccagtgttcatacttggacaccaatgtggccatatcagctattggcagctggcatgtgttttgattatttggtgctggtgccttgattggtcctgattgttaaatcttatttgtccctgaccagtaatgagttgagaggccttgtcctggggagatgaatgtaatcctgaccctcctgtcccctccctgcaggcccgagagctaggccagagcctggcccaggaagtgaaagcggccactgagcggctgagtctggggagccgggatgtggcggaggcactgaggctgtccaaggacataggacgactcattgaagtgagggccacgcctaccaccccaccctctcctagccctattacctcccctattcctccctggactccttcagactctccctagcactccaattgggttgggctccagctggcccagatatttgtctgcagggtgggtgtcttccctggccctgctggtccctacctcagagactatggctcagggaagggcaggggtgatgtactgcttctggccataggctgtggaaactgctgtgatgccccagtggcagcggcgggagctgctggccacagtgaagatgctgcagcggcgtgccaacactgccatccgtaagctgcaaatgggacaggtgagaggaggtttggctgcacccatgtgcccagagacactccagcagatacactgagaagtctcaagggctggggcatgggggtgagtcagaggctgtgcaaggacggggtggtggcagcttccttctcctgccagctgagaaccatcacccaggccattcccccacttctgtctctttcaaactgtgtttctcccccaactcccaagtctggctcagaacccccggaagcctactgacttgattagtgccattcagccctgattgcacctccactgtggatccccctttctcccgcccactcctggtccatctgtgctctgaccttcctcctttcaccttcagcgacctatttgtaggggcctgaagctatgatgaaagggaagtggtgagggaagtgaggaaggacacatgtgggacccaaaaaggaggccaccctaggcagagtccctgccacctctgcctagagctaatgacttttggggtgggtgggggaagcaggggattgctcagctggggcttagttcagaagttggggctaattggaaacctgcctctcagcctgacccctctgcttgtccttcctgccccataggctgcaaagaaaactcaggagctgctggagcggcactcgaaggggcctctgattgtggacacagtctctgctgagtctctctcagtgagtgctagccaagccgggctgccccagggtctggggagggcaaagtcctgaccaggagacagctaggggtctgggaagcgatgggctcaccatctgtctttcgtggtccaggtgctggtgaaggtggtacggca

SEQ ID NO: 36314 - DNA, 2300 bp, Homo sapien
agcttacactctccctccctgcccacccccacaaaagatgggagaggcaagaacaggtagtggagagcacctggagtccaacaggcccggctgagatctcagatctgctccttgagagctgggtagccttgtgtcactgagttcctctgagcctcagcttcttcttctttaaagcaagcatgctaatacctcctggaatgggctgttttggggattcgaggccatgttgttcaagtactcacccagttctgatagtagaaattcagtaaatggtcacagatatgttcacttgtagcaccaaatatgagccccgtgagggcagggcctggcttgtgctcatctgtgaggcttctcagcccaggactggactggcaaggccattctggatgtggttggctttagggctgagggcagatgctctagaggcgataaagagcacccacctgggccaggtcaggcagggccactggctgactcttctgcttcccagggctgcagggcacccccttacttgggccgagtaggggtggcagacgaggggcgcacagacacagcgtaccgcgtggtggctgaccacatccgcacactcagtgtctgcatctctgatggcatcttccctgggatgtcaggtcccccgtgagtctggaagggctacagagaggacaggggctgctgggggtctcaggtggaggagggagggaacaggagaggtgggtctggttgagccagtaggaggaatggggagagggagagctttgaggtgggagcacacactggacctcgtccttcccactccccatattgctgaccatgagccgctggggattcatgtctgggctctgaacccctttaggctggttcttcgtcggatcctgcgtcgagctgtgcgtttctccatggagatcttaaaggcaccacctggcttcctaggcagcctggtacctgtagtggtggagacactggtaaggacagagcttctttttcactctgggcctccctgggcactttggggagcctaccactgagcctagacagtgcccccagcctgggtgcccagaggtccccaccctaaatatcgagcccagcatcctatcagcaagctaagaaagctgtccttgcttacaagaagcaggagaacttgaggaggctccttttccaaactgctcagcccttgacctcaggacccccttctgccaccctacagggaaaccagttccccatttgagtccctctcccagcccctcaatgtgtctgagcctccagggcaggtgtcctcagggaggcccagggtggggaggtgggggtgggttggttgcctttcacacctcctcagccctctccacctcccccagggagatgcttatccagaactgcaaaggaactcagcccaggtactggattccagtgggagagaaaggggttgatgggagagttgtggagagagaccctccttccaaggagacccagctccacttcttctctgcctggttcagatcgccaacctggtgtcagaggacgaggcagccttcctggcctccctggagcggggtaggcggatcattgatcggactctgaggaccctggggccttcagatatgttccctggtaagcaggatacctagcccatgcacaaggggctcgctgagactcaccaaggtgggcagaggagggagctctgggccagccccatgcctcatatccacccctgacctcttcccaatgttcctttctccctggactctccttccatacccagacccctctgcagcaggaataccaccctgcctctccccatgtccacagtgcccagctagccctgcctcctgctttcctaggttggcttcgtgcatagactgagcttccctcctcccttgaaatgatgtgtgcccagggagtaccctggactacccccagctctggccttgaggcatgaagcctgaatgtgacccctctcctgaggctacccagtatggagcgggtatttgtgtttggcatctggtggcttctgcgtggttagaagggccctggaccttatttttctccccttctttgtctaatccctcccctcctcaacattctttgtctttctttctcaaagctgaagtggcctggtccttgtcactgtgtggagacctgggactccccttggacatggtagagctgatgctggaggagaaaggggtccagctagactccgctggactggagcggttggcccaagaggaggcccaggtacaagctgtggcaccccatgctgggttctgttaggacacctcttccccagccctgagctcctgggg

SEQ ID NO: 36315 - DNA, 2300 bp, Homo sapien
ggcttaaccaacaaccatgtatctgccccctgagtctgtgagctagcgtttaggctgggcttagctggctcattctttggtcttgtgtgagctcattcatccatctgtggtgagctgagaggccgcagctcctctggggcttggctggctgtcagtttgggggcagtaggggtgactggaccatgtgtctgtcatcacctagctggctagtctgggcttgtccacatcacagctcagcaaggttccaagacagagagcagacacataggctcagaacagtgttgtttccactgtattctatgggccaaagcaagtcacaaagccagcagagattcaggggatggagaaatggattctgtcccttgatgggaaacagctgtaaagtcccattttaaagtggcatatgcctaggaaagggccatttttgtgaacagtctcacagagaagaaggcagaatccagtcttgtgggcctcaaagtccaaagtggggccttgattctcagagtggtgagaagagttctcagggctgggcacggtggctcactcctgtaatcccagcacttggggaggcagaggggggcggatcgcttgaggtcaggagttggagaccagcctggccaacatggcaaaatcctgtctctactaaaaaaatagaaaaatcagccaggcatggtggcacacacctgtagtcccagccacttgggaggctgaggcaggagaatctcttgaacccaggaggtggaggttgcagtaagctgagatcgtgctactgcactctaacctgggcaacagagtgagagttcatctcaaaaaaaataaataaataaaagtgtacatcagatcatgccacactccccactgagaacccttcttttttttttttgagacagagtcttgcttgctctgttgtccaggctggagtgcagtggcatgatctcggctcactgcaacctctgcctccggggctcaagcaattctcgtgcctcagcctccagagtagctgggattacaggcacccgccaacacacctgactaatttttgtatttttagtacagatggggtttcaccaggattggccaggctggtctcaaactcctgacctcaggtgatccacccgcctcagcctcccaaagtgttgagattacaggtgtgagccaccgcgcccagcctgatgtacacttttaaaaggctactcctgttgctgtgtggaggatgagctggagggagatgagagcagaaacttaggaatcagttgggaggctattatcggtccaggcaaggaccacagggcatgcttcggataatagcagtggaagtagagacaagtagattgatttgagagatgtcatggaggtaggagcaaaaggaaccactgatggatcatgacgggtaggggaaaaagaattcaaagatggctcccaggctattgacttgagcaacacagtgaatggcatgactgttagacgaagaagcttggggaagagagaggtttggtggtaagtgaatcaagctccctgctttggagcatttccgtgtatgtagcttacactctccctccctgcccacccccacaaaagatgggagaggcaagaacaggtagtggagagcacctggagtccaacaggcccggctgagatctcagatctgctccttgagagctgggtagccttgtgtcactgagttcctctgagcctcagcttcttcttctttaaagcaagcatgctaatacctcctggaatgggctgttttggggattcgaggccatgttgttcaagtactcacccagttctgatagtagaaattcagtaaatggtcacagatatgttcacttgtagcaccaaatatgagccccgtgagggcagggcctggcttgtgctcatctgtgaggcttctcagcccaggactggactggcaaggccattctggatgtggttggctttagggctgagggcagatgctctagaggcgataaagagcacccacctgggccaggtcaggcagggccactggctgactcttctgcttcccagggctgcagggcacccccttacttgggccgagtaggggtggcagacgaggggcgcacagacacagcgtaccgcgtggtggctgaccacatccgcacactcagtgtctgcatctctgatggcatcttccctgggatgtcaggtcccccgtgagtctggaagggctacagagaggacaggggctgctgggggtctcaggtggaggagggagggaacaggagaggtgggtctggttgagccagtaggaggaatggggagagggagagctttga

SEQ ID NO: 36316 - DNA, 2300 bp, Homo sapien
cggccgctctcatcggagccccctgcagccaaggcctcggccgtgagggccgcctttctgaacttctttcgggaccgccatggccaccggctggtgccctccgcttccgtgcggccccgcggcgaccccagtttgctttttgtcaatgcgggcatgaaccaggtgagggccgaaccatactgatagggagcggagttcgtgagttttctggtgagaaagacgctgcaggattgggcaaaagaagcgagaggcggagttcgtagcttttggggaaagagggcggtgcttggttgggtaaagtgatgggggtacggcgctcagagtatagggagggcttggggagggcttgagctgggaacttctggattgggattgagtattaggtccagaaatggctggagtggaatcccgagggagaagtctgatttcatttattcgttatttaaataaagataacgctttcattaaatgtttattgatcacctattgtttgctgagtactattctctaaggttttggtttttatcaaccactcatcttttctagacttcattgtcctcatctgtaaaataggggcggcataagttaaccttagaggccgtctgggctccctactaaatgagtctcagttttgttccctgaagttattgggtgtggttgaagaagctgagacggaggatgccacctttcagcgtcccatttccagctcccaacacattcctccttcttttaccttgcctattttactaggcagagggtctccggttcatgatttgtttacctcttctctgctccccacacaccagagatggctgtcccgaggctcccagtttgtcctcatagaccaagattacactgcactctcaggggcacagtcagccttcggtctgaacagccatccctatcctcactccccacatttcccttctactgagaaattggatatccctctccccctccccactctatgtgcttccagttcaagccaatctttctgggcaccgtggatccacgaagcgagatggcaggcttccgacgtgtggccaacagccagaaatgtgtgagagctggaggacaccataacgacctggaagatgtgggtcgagacctttcccatcataccttctttgaaatgcttggcaattgggcctttgggggtgaatattttaaggtgagtctctggggatcagtgatcagccaagaagggagtcaatttgtcctgtttccattgtactgtctgcttaggcagggcctcataccagatgtggaggcaaagtgctagttgagccggtgtaacaggaattacctcacctccctgattggattgtaagtccctgaagggcagagactgtactttctgcctaatgatcactcaaaaattgttgtttgaataaatggtcaaacagcaatgctaaggtgcttactggagttaaagatcactctaggctagagtaggcagagaatttcatgtgaaagtgggacttggtctgggacttgaaagaagataggacttagaagaagggggaagctttctgggcaggaaaacactcagaggcagtaatggttcatggcttattctgggaacaagatggcagcagaaatgcttttgtcttaagtcgggagctaaactcatgtggcttgattacttcagtggggtctccctctcacccgtcttccccccccaccccatgctggtttctgctgcaggaggaggcttgtaacatggcctgggaactgctgactcaggtctatgggatccctgaggaaaggctctggatctcctactttgatggtgaccccaaggcagggctggacccagacctggagaccagggacatctggctgagcttagggtaagtcagcccccttcttatgttcattcctggaggtcaggaggactggaaagtggagactaccagcaccaatcctcagagtcttagcatttcattccaggatattgtggggtcagccctgttcctcctcttgctgagctgtgacttgagggaggggctctcatggcagagagagtcccagcttctgggtctgtctgtctcccaccactcacctgcttttctccccagggtgcctgctagccgtgtgctttcctttggaccacaagagaacttctgggagatgggggatactggcccttgtgggccctgtactgagatccactacgaccttgctggtggggtgggagccccccagctggtagagctttggaacctggtcttcatgcaacacaacaggtaatagggtgctgaagcaggatgagaatccctgactagaagtgggaaagg

SEQ ID NO: 36317 - DNA, 2300 bp, Homo sapien
tgtgaaagaagccagttacaaagaaccacatattacatgattccatttacatgaaatgtccagaatatacaagtctgtagagacagaaggtagattagtggttgccaagggctaggaaggatgagacgattgggggttaatggctaaaggatttggggttttatttggaagtaatgaaaatgttctaaaagtgattgtggtgatggatgggcaactctatgtaaatatactaaaaggcattgaactgtatactttatttaaatgggcgaattgtatagcatgtaaattatatttcaataaagctgttttaaaaaaattatatggctccacactagatccatgtttggagtttctaatgtaacacaatgactttctgggcaaaatctgaaaaaaaaaaagttgatgtcagtactgagtagaggccctgccaggtttgtatggcaaaacactcccatctcagtttgggaaataatttcacagtcttgtctaaagatcatcaatctcagctgggcgcagtggtgcatgcctgtaatcccagcacttcggaaggctgaggtaggcaggtcagctgaggtcgggagttcaagaccagcctgaccaacatggagaaaccccatctctactaaaaatacaaaattagccgggcgtggtgatgcatgcctgtaatcccagctactcaggaggctaaggcaggataattgcttgaacccgggagacagaggttgcagagagccgagattgtgctattgcacgccagcacaacaagagtgaaaccccatctcaaaaaaataaaaaagtcattaatcacacagaaatccccagctggctttagctttctgttccagaaacactggaaaaaccaaaacaggccaaacacactttcaaaacaacacctttaatctatgtgggcaaagggagaaaaaggggatcatggaataggagttataggtgctgtcagaacacaaagttaagaatttactatcactatagaaattcaagtccaatgtagattccgcagagaaactatgtatacaaagaccccaaataacttaacacacacagaatcgtggctaaaagagaccaccctgatggctaaggccttctcggttattacactgacctcagctctggaacctctattgagttttagctttggcagattctcttctgtcttcccaatctgtttaatttcccaagccaagggcatcatgagaagccccatgagcaccctgattgcatccacaagggcctgttggcttcagggtcacagctgttactatggaaagacagaagggagaggtagaacaggtatatctcttatcctaaacgaaaacacacaaaaccttagggcattagaaggcttagagagtgaaatctctgcagctattagccaacagcttcctcctgccttgacgacctggattctctctgatccccaggcaaatgagaagaccaaatgttaggcaattaataatatagcagatgctgtttggcttctgtgttctcctatagactcctgcttcacgggcaaaaatggccgtgtctgatgccaaggtccaaggaaactggcaaatgcctagaacagtgcctagcacatactaggtcttcaataaatatttgttgaatacctcttgaatgaatgctgatactcccctgtcactctctgccttcttccctcagcctggaaaaacacacacaaaacacacacacacacacacacacacacacacgaagttgaatccacacctgtttattgcaaccccatctgtaactttgcaaaactaataagcacaacagcaattactgctagaatacggatttcagtgggcagggcattttgtcaattttgtaccctaaaagcccaaaacaatgcctagcacatagtaggctctcaatgaatatttgcttaatgccgaatgaattaagagcctactatgtgccgggcgctgtgctagactctgccagcgacccaatcgatcgcttccaccccggcggcagaggccgccccctgagtcctcctaccgccaggggccgctgtaggaaacgcctggcttccttccctcgtcactctttgaccacgtaaagtcactgcccggagctacgatggcagcgtcagtggcagctgcagcccggaggctgcggcgggccattcgaaggtcgcccgcatggcggggcctcagccatcggccgctctcatcggagccccctgcagccaaggcctcggccgtgagggccgcctttctgaacttctttcgggaccgccatggccaccggctggtgccctccgcttccgtgcggcc

SEQ ID NO: 36318 - DNA, 2300 bp, Homo sapien
atcaaggatgttcaagtcccttttacaaaatggcatagtatttgcatataacttatgcaaatcctcctgtacggtacttcaaatcatccctagattatttataatacctaaagcaatgtaaatgctatgtaaattgttgctatactttgctgtttttatctgtattattttaaatttttatatattttttgaatatttttaatctgtagttggtcatatctgtggatccaaaaccctcagatatggagggccaactttttttttttttttttgagatggagtctcactctcttgtccaggatggagtgcagtggcatgatctcagttcactgcaacctctgccccccgggttcaagcagttctccttcagcaccccaaataactgggattacaggtgcctgccaccacgcctggctaatttttttttttttgtatttttagtagagacgggtttcatcatgacggccaggctggtcttgaactcctgatctcaagtgatccacccacctcggcctcccaaagtgctgggattatgggattatgggcgtgagccacagccccagccatcaactataatcttaaattttaaaagcccaatacaagagatatctatatctatatctatctatctatctatctatctatctatctatctatctatctataatatgttaacatatttgtgcacagaaaaagggtagagaggaaggagcccctaaatatcagcaggggtgtaaatcactaggggtatatgacatacatgtgcatagaaaaaggacaaggaataacccctaaatatcagtaggggagattgtattttctaggagggccacaagatcccctgtcccctgtgctcttcatacagtatgaccatgatggagaggtgtgatctaagttccctctccatgcatttgtgactatggaggcaatacaacttctgcctggtcctcctgggatgctcacgttggaaactcagacactggtgtgagaaagcacatggaaacgccacacatgggtgaactggcgctaaccctgctgacctcaactgacaaccagcatcaatcaccagacacatgagtgaggaagctcctctgtgacctctgactgagaccctgtgagagaccccaagcatgaacagcctagcttagcctagccaacgaccaggatcagaaattaaaaatgaatgttgttgtttaaaacaacagagtttgagggtgatttgttatatagcaatagctatccaggaaaaaagtatttaacttctgtatggtgagatcatggatattaataatacttttccatattttccaatatttctataatgaccatttatttctcttataatcagtaacaaaagaagggaaaacttggtctaaacacgaatttagggacttaaactagacttggagaaaagctttctatgcaagatttattagatactggaaaggatgaggaagacaaatttaagtcaatatgatggaaagagtggtggatttggaatgaggaaacttagaaatgaatctgttttctgggtgaccttgcgcaagcctttgctaaaatttggttttctattttgaaaaacgcagctggctgtttaaggaagataatatccaccagggcgcctggcccagaaaaggcgctctgtaagtggtaggtggatcctgtctaatcaacgccaattataaccaggcatctgcaagctttgtggagggcgcatctttcactgctaccagagcctacagttctaataatgaaaattgcctggaaaagaaccacaactcttaaaaaaaaaaaaaaagtccaaaatcacaaagtggcttttgcagcggtccttgcctgtgacgccgggccatggctggagctccttgctccgtacctctcaggagcctccatcctgtaccaatggccagagagccggggggtgacagacaggggggccggcagccgagccaggcaggacgctgcgcgccgcgttactggagccggtgtcccggcaaccccggaacgcgcctctgtgggagaagcaggcggctgcggtgtcccttttgccctaggctctcggttctcaggcctcggcgtgcggcgtgcgttcggcagttcagttgccagttggttcgttggtccgtggaggcctctgagcacagacccgggcctcccctggggaagggggtgggaagaccccgaggtggaaaagaaggagcaccttgagctggatgggggctgcagcgagcctggttcgggctgggggcggactcgctggggctcccagggcttccaaaccacgaaacgcccaggtggag

SEQ ID NO: 36319 - DNA, 2300 bp, Homo sapien
ttgtggctacagtgctctggtttcagacatcctggaacttccatgatgttgcatttttctgaattctgaaagggaatatacaatctgcatgttcaaaggtgaaatgagggacagttgacagggctgttttacctggatgagtaagttgtacaatgcatgtctctaggggtggaattcacatagtggagatggtagatccaattttcttgtaatagagtgccctgttctcagaacaccagtattttgtgacaattttccagcatgtggcataaagtgtcttgaggaaggggcacctttttctagttctcacaaaagtaacatatggtaaagaggtggccctgagtgggagggagaagccttcatcaactcttggaatgtgagatctgaaaggcctctgacagagtattggtccatctctggaattgttaggactcttccttacaaataatagaaacccaattccaagtggctaacacaaataggaaactaataatcagaatgcaaggacaggaatgcagctgggactcaggaacatgctggatccaggtactctgacatggtcaggacttacatctctctctttacctgcttttttcccttagtccaaaacatggtggtagacaactcctgggtgtcacgtgttggatgttcagcagtcagtagagactgacctcctctatgctccagtgttaaaatctcgaagacctagtatttgatagcacaacagggtgactatagtaaaaaataatttaattgtacatttaaattaactaaaagattataattggattgtttgtaaaacaaaagataaacacttgagatgatggataccccatttaccctgatgtgattattatgtgttgtatgccagtatcaaaatatctcatgtaccccataaatatgtgtgtactatgtacccacaaaaattaaatataacaaattaaaaaaaaaccgccccattacaggagaggtccaaatgaaaacattttgtttgagtttaactggccacaggtccaatggtttcttatacaccacacagtgggtaaacagctcaagggcgggctgcccgccagcataaacctttgagtggcaaacactaccagggtggccatggaaaatgccctcttgctgaccataattgcacagaatgtgtgtaaataaaagctaaaaggaaaaagaaaattctgtagctcttccagaagaggcaaacggagaaatgaagaaatataaagagataggcactatataaatactaagtactataaatagggcatttcccaacccactaaatattttgatattttccagggatggagccagagatgttctggaaggatgaaggagactgcatgagtaattggggtggggtagcagagagtttgccaatccctacctcactgggttttagttatgtttcagttaatctgcctcctcatttacgaggcgggtattgttagctccacttttcagatgaggatactgagattcagtaaggttattacccaaacttatgagaaagccaagatttcacaatatttcaacccaactcgactttgtctaataccagtgcgtaccaatggcattattaatccagactgggcgatgaattaaaaactctgacgtgacgtttctgcaggtttctggaagaagcctggatcacctggggacggggtgaagttggcgttgccctccttgcagtaatagctgctattgttttgcagcagttattatggatcagatactgtgctgggtctatgatctcatttagcccttacgacaatcctgtgaggttggcattactatgatctctattttacaggttaggaaactgagccttaaataaactactggattttcctgagtattctgtgaataaattcctattactgaaatacttgaaagggctagattaataaattaacaaagccttcttcggagcaactgtgctgaaattccgtacgcgtgacgttcccaccctctgccactcggtgacgtcacgatcaatcccaccactaagttcccagccaagcgctaccgccgctatctcgcgagagccgtagtttcttccattctgttttggacatgcgcggggcgtaaggcgctttggccagagtggtttgatggttttgtgttagtcttcctgcagctgagcttccacaagacactttttccctttcagccacccaatatctcgcgagacttgctattctgcgccccctcccaccttgcgcttgcgcagatcttcaaagcagaaggtcgcgcttggaggaagtggcggctttgagtccggtggcccaatc

SEQ ID NO: 36320 - DNA, 2300 bp, Homo sapien
tttataagttgtatgctaaacgagacctgagatattggggctggggtggaggccaaggaccacctgagagacaaagctgggcattgcagcaacacaggtataacacaggttattacctcagcaacacaggttattaccatggccacttcaccaaactgtagtgatgtctcagcagatcttgcagatccttaacactgtgatgattagtgtccccatctcctgcctcctgtgtctccaggcagagaggaggcttcaattcaaccattttgaacagggtgatactaccagctgaggggcaattagcattttgcacactggataaaggatgcccaataccctgccattcctgagactgtcctgcaaaatgaagaattgtactgtgccctacacaactgtcaaattactaactggacaattctggaggtgaaaaacctgactttatcatcttataccaggacgcaatacagattattttttgcacggttttagaaaacattgaatgcatgcaaccagtatgtaaattaagattgtactttaacagtgttcacaatacaggaaagcattgtatctgacagcaatgctgcatgtagttttggaatccctgtatgacccaccttgtcactctgcattgatgatgttgctggcaccgggagtccgttcagcggtgcggtgctgtgcttcatcagggcttccgaagtagccatgcccacacatttatatatggcagtacacattaatttatcataaattgccctttttacagttaagatgtttgaccttttaaaattatgagtataatatattaccttttatttcaggataataagggagtattatgatatatttgtaacagaatagaggcattgagtttgagaatcactgctctgagcaaatggcagtttcctttttttcctagaaatcataggatttcagggttagaggagaccttgagtgtcactcagtcctttccccactccatctagtactcaaatccctgcagttggaggaccaaggaccttcacacacctctgtttccttcctcctatgatgtgaccctttggagttcccaggatggaaccaagtgggaaatgggcctgaaggaccaagggcccaggctcagtgagcttcaccagatcttggcaggtggtattatagatattgggatccaagagtcattcaagatctcatccacttaaagaggttggcatcagctcaatggaaaacctagacctgcattgcaagaggaaatactctaccctcagaggctcagtccatatcagggacccccagaaatgccaggctggtggacaaacaaactgtatctcagaacataccctggtgctggagttctgaatgactccatggcatctgattctcaagaagcactgggctaggtggaaagaagtaaatagatgggctgggatcattaggaaactagaggcaactaagtgaaggtgtctcctcttggcagtttattccaggatcaagcttcaatgacttcatattcttggatgaaggggctgtgtcatgtcagaagggctagcttagtgagcttcagccagggcgagccccagtgcctttgctgactcagtgtcccaaagctgccttgacaggagacggacctgagaggcagaatgctggattaaaccacctgcaaccgtgctcaaatccttcccccatctttcttctccactgccctcactacccaatgaatttgccactcagttgttccttcccatgccctgtgccctttccactggaggctggacagctatactccacctacttccctccagcccccctggactgacacagagccctctgtcttcctgtggaatgcagtagcaattctgagcatggtgctggacaagaagtccagctcccctcataaactttttatagcttaggaaaataaacatgtggtttaaggtctttgcataggcggtgctcgctgagtttgagcttgctttacagaactacgaaagaaaatattggtagagctaagaaatttctgagccagccaagggacagtagtccagaaatcttggggagggtttgatggttcaggcaataaaaagagaagtcatctacctagctgttatctcgctctgtcctgctaagaatctgcctgcctgagtgatgcagccaggctcccttgttccctggggcaaggaaccagtagagggatagggaatcacagtgtttcccggctgcaagggcccttggagatggttttacagatgaggaagcagagtccagagaaaggaagtgatctgctgggaaccactgtacttttcaca

SEQ ID NO: 36321 - DNA, 2300 bp, Homo sapien
tggggtggagagttctgtagatgtctattaggtccgcttggtgcagagctgagttcaattcctgggtatccttgttgactgtctgtctcgttgatctgtctaatgttgacagtggggtgttaaagtctcccattattaatgtgtgggagtctaagtctctttgtaggtcactcaggagttgctttaggaatctgggtggtcctgtattggatgcatatatatttaggatagttagctcttcttgttgaattgatccctttaccattatgtaatggccttgtctcttttgatctttgttggtttaaagtctgttttatcagagactaggattgcaacccctgcctttttttgttttccatttgcttggtagatcttcctctatccttttatttgagcctatgtgtgtctctgcacatgagatgggtttcctaaatacagcacactgatgggtcttgactctttatccaatttgccagtctgtgtcttctaattggagcatttaatccatttaaatttaaagttaatattgttatgtgtgaatttgatcctgtcattatgatgttagctggttattttgctcgttagttgatgcagtttcttcctagtccccatggtctttacattttggcatgattttgcagcagctggtaccggttgttcctttccatgtttagcgcttccttcaggagctcttttagggcaggcctggtggtgacaaaatctctcagcatttgcttgtctgtaaaggattttatttctccttcacttatgaagcttactttggctggatatgaaattctgggttgaaaattcttttctttaagaatgttgaatattggcccccactctcttctggcttgtagagtttctgctgagagatcagctgttagtctgatgggcttccctttgaggctaacccgacctttctctgtggctgcccttaacattttttccttcatttcaactttggtgaatctgacaattatgtgtcttggagttgctcttctcgaggagtatctttgtggtgttctgtgtatttcctgaatctgaatgttggcctgccttgctagattggggaagttctcctggataatatcctgcagagtgttttccaacttggttccattctccccgtcactttcaagtacaccaatcagacgtagatttggtcttttcacatagtcccatatttcttggaggctttactcgtttctttttattcttttttctctaaacttcccttctcacttcatttcattcatttcatcttccatcactgataccctttcttccagttgatcgcattggctcctgaggcttctgcattcttcacgaagttcttgagccttggttttcagctccatcagctcctttaagcacttctctgtattggttattctagttatacattcttctaaatttttttcaaagttttcaacttctttgcctttggtttgaatgtccgcccgtagctcagagtaatttgatcgtctgaagccttcttctctcagctagtcaaagtcattctccgtccagctttgttccgttgctggtgaggaactgcgttcctttggaggaggagaggcactctgttttttagagtttccagtttttctgctctgttttttccccatctttgtggttttatgtacttttggtctttgatgatgctgatgtacagatgggtttttggtgtggatgtcccttctgtttgttagttttccttctaacagacaggacgctcagctgcaggtctgttggagtacctggccttgtgtcagtctgcccctgctgggggtgcctcctagttaggctgctcgggggtcaggggtcagggacccacttgaggaggcagtctgcctgttctcagatctccagctgggtgctgggagaaccactgctctcttcaaagctgtcagacagggacatttaagtctgcagaggttactgctgtctttttgtttgtctgtgccctgcccccagaggtggagcctacagaggcaggcaggtctccttgagctgtggtgggctccacccagttcgagcttcctggctgctttgtttacctaagcaagcctgggcaatggcaggcgcccctcccccagcctcgctgccgccttgcagtttgatctcagactgctgtgctagcaatcagggagactccgtgggcgtaggaccctccgagccaggtgtgagatataatctcatggttcgccgctttttaagccggtctgaaaagcgcaatattcgggtgggagtgacccgattttccaggtgcgtccgtcacccctttctttgac

SEQ ID NO: 36322 - DNA, 2300 bp, Homo sapien
ctaatgtagaaactataagcttatttgaaaagaagaaaaccatttgctgatcatactacagcagctacctacatattttcaattaagtgattctgctattataggtacacatgaaaccatgtttggaaatcccacaagctataaggacaaaaccctccttttgtttactttggatactaattagagatacagataatatggatacgacttatttataaaagagaaaaaataatttttctctccttcacatgaataactgcatgttaaatgaacgcttttacctttcaatgtaaaatctgtttacacatacaataaggcatgataaatccatagttaaaataaaacaccaaaatgtatttctggttttttatcactaaaagtttattctgaaaaggttctggacatttgaaaaataaaggactagaatcattcccataccctaccagtgtattttgggaaaatcaaattttctgtaaagaaacttatgaacatatttgtacagttattgtgatctaatatgaaccaaaagcagataatgaatagcactaggaagaacacagggatattttagttctaacaccctcctgtctccctagcccttacctccctgcacattccaaataatcttttgtaattcactgtctccgcccaccccatttactttatgccactcctagttactgtcacactaggaagaagtctaacatgcagatttagagtggcatggataaatggcaaaaaaatgcctagaaaattggtctgttcgcctttataattttggttgaaaaatactccatcgctcccaactgatgaaaacaggaagctctattcataaatataaaattcactgcctatgatatataatcatcctaataagaaaatgagttctatacatacttgtccaaaggggcaaaaaaggagatagtttcccaaagatgtttccaattttcttctgaatcagaattagcaaatcgagacgactaacatactctgtctgtgggcattattccttactacacacagcattttgtaatttatttcaaagcttccattagaaacaaaaaaatacatagcttctgttaacccactctattctaagctcatagaatcaaatactgaacaatctacattataacataagcattttactttatagaagatctgctatcagaaactctattaatgtctaaactacttaaagaactatataaactgaatacacttcaatgaaagacaaaaaatattacaatcataaagaaaactaagattcatccaataaactatattacaatccctgtcattcatttttttaagatcttcaaactaggcatgagataatggtatacatgaaacattacatttaatctttattgtaaaggccgccatctaatagattgataataaactagacagacgtgatttaaaatttgtaaaagaatgcccagactaacactttcatgacagccaattatagtcaagcctagcaagcagtttgcaaccagaccttaaggtaaactttttttttttttacaatgagttacagattcacaagtttaagaagacaagaaaaaggaaaacagaaggaatccagccacccagcaaatatgaagcagaccccagaatgtgatacagtccaaagatgtgaattattgtatatcatcactgttgttcagaatttcacacagactcttgagccaattttgttcatttttccacagacacaataatgaactaaaaagaggaggcaaaaaggcagaggttgagcggggagtagaaaggaaagcccttaactgcagagctctgctctacaaatgcttaaccttacaggagtttgggctccttcagcatttgtattctatccaaatcctcatgagtcacaaaaattaaaaagctatatccttctggatgccaggaaaggccttaccacaagccttttgtgagagaaagagagagagagaaagagcaagggggaaaagccacagtggtaggcagtcccactttacttaagagtactgtgaggtcacaaaccacatgattctgcctctccagtaatagtgcttgcaaaaaaaaggagttttaaagcttttgcttttttggattgtgtgaatgcttcattcgcctcacaaacaaccacagaaccacaagtgcggtgcaaactttctccaggaggacagcaagaagtctctggtttttaaatggttaatctccgcaggtcactaccagccaccgagaccaacagagtcagtgagtgctctctaaccacagtctatgcagtaatagtaggtccttcaaatatttgc

SEQ ID NO: 36323 - DNA, 2300 bp, Homo sapien
aagaaattccaggaggtaggaacctggttaactcatgtgactttaaaaatcagatctctgccaacagcccaattcagtttcctaagaataaatttttaaacttcctgtatcaatgccttaactcagtttcccttctccatgtgtcactctcattaacttttgttgtgcgtgatttttttttttctttttttgacggagtctagttctgttgccaggctggagagcagcggcgtgatctcggctccctgcaacctccgcctcccaggttcaagcgattctcctgcctcagcctcccgagtagctgggactacaggcacgtgccaccacgcccggatacttttttgtatttttagtagagacggggtttcatcatgttggccaggatggtttcgatctcctgaccttgtgatctgcccgtctcggcctcccaaagtgctgggattacaggcgtgagccaccgcgcctggcctgtgtgtgattttatgcaggctggacaccagtatcctagaataagatgatctggattctatcctgataaactggatcaaacaggtactcatctgatgcaggtgaaactccagtgcaggaacttctatgataacattaactgaacataattttaattgaaatgatctacttttatgtttctttagatgtgaacattaatttttctcttaatcttctgttaactaatttcttggtaatgtactcaaaagagctttcaaccagtcttcccatgtaagaagttatcaccatactcactctgttactttcccttatactgcacactttgctcagcaatgaattgatccctgatttacacatcaagctgagctctcacatcctaaatatatctattcttttggaattttaggtatttggcaaatattgaagcgttggggagattaaagagaatcaaacacaacactagcagactcaactacaatccacagaggaaataaccaaataagttgctattttaaacaatttaagcaaatagaaggaagggatttcagaactcacagtatctataggcaagaaaataactgaagcagtgatgcttaaaaagacttggtgagggttaatacttgaatccctataaaatacagtattttatagtatttgacaacacaggtgtgaaggtgagcatggataaccagttttcttctctaagcaggcaataagaatgttaaatataaataagacttcatataatataaagagtgaaagactgaaagcattgtcttacgactactgtattatttaaagaactacatctatatcaattaaatgtggcaggacagaatgtacagtacaatactgggggtgcaagattttaaaatgaggaacaggccaaaatctaaacacagaatcgtccaaaaaaaaaaaaaagccttcaagtagaaaaagttttcaataacaaaacatggtagttaaacgcctgcgtctagtaacatgagttggggaaaaaacattaatagcagattaatgaaacagattctgtgcgaggtcagggtagggagtgatggcgcgcggaagcggcgtaagagctggtttcgccgtcccagaaagggttccacatccacacgcctgtactgcggccctgcggggagcgttcagacccctccgtttcccttcaccattgtaaacgcgcaatcccattaagatcccgttcactccaattcctggaaagaagcttagaacggtgaatctcttcctcggagttgaaaatcaacttccagtgccggtcacccaatccttcaaaaatcctagccctctcgggcccaattcctaaagaattcaagcctgcaccctgtacaccctgaccgatctcagctcgtccccactccgctcccagcgtccccagctctaaacgccgccgcgtggctcagcgctgcccaagccgggccctgaaggccgcgcacaacgccccgcccccggcgagcgtggcggaagtagctcgctcgggctgggagagcgcgcgccacctggccaagcgcgcatgcgcccgcactgccagtgcggggggcgtccgtatcgcttactcctcagtctccgcaacccccgccccaccgagagtcgggctcacgccatcttgtaccccccccatcgccccgtcacacagccgagtcaccttttccctttctacactccacactctcagtcccccaccccgcccctttccaagcgtgtcccgggccgcagcagcagaaaccgcaccatctccacccccacattctcctcgcgggaagcgcagcagtgcctccaagggttcttaaagcagaggttgtagggcttgc

SEQ ID NO: 36324 - DNA, 2300 bp, Homo sapien
agagtagtatcccctgaactccatccttacccctcgagagcgcacacctggctaccccgcacccccacctctgctcccgcggtctggcagaccctcagtcccccgcgcatctcttcagcggggcgatcccgagtcacgcaaccacagccccccaagctcatcttgtactcgaaagggctccagagtccgcgactggcaccaggcccccatcttccgtgcccctcatgctctcagagcccttccaggccccttctagggcgcagacccgggcgtgggctcagcgagtgggagcaaagctctaaaaccagacagggagggtcgtggcaggtcgctacgagggtgagggaggcgtttgcactgagcaataaaaacacccagtaatgggtatgtgaattgctttaaataagatgggagggcgtgagagatgacccaaccatctttcttccttgatgcttcgagggggaggcattctaattcttcatttattttataaaatcacttgttactgtgtcagctactccactaggaatctttgaaactttggcaactgatgatttttttcgcaaacacgttttcaagctttggaaggctttaaagagtttggtaataagcaagaaacgtagtagtacacaacgccgagggtaaaacggccctgtgcccccttcttggggtgtaatagcctcaagcggatttcccggcttctgcgggcgcagcacattgttttatttgttttgaaggctcagagtttgaggctggtcgtagacacccacgtgctctgactctcatcagcgtaatgatcgacttagccagagtcgtgtctatataaaccacaaaaacctaatcattagaaatcccagcctccaaaaaccacattttaggtaaaaagtgccgctttttttccgcgctccttcatcctctcgaccacaactttttgggggatccaaagtcgctttttaaacccacactaggaaataaatacataaataaacagccacggaagcattttgaattttttagttcgtatttttaatttttccccgtgagcgctggggaagacagacacgaaacttagtcttagatgtagaatagacttaataaaatatttaaattcatggaaaacggctggtgcttttccccagcaagggttttgcaacttattttaatcacaaagctgacagtttttcagtccttaaaacaaaaacaaacaaacaaacacctcattcttgttctctaggaatgacaagattgaatatataagaaaaaagaaatgtccagctatgcacttgagttcctaaaaactattttgactagatctccctccaccccccctcctcattttttttgtgtcacttaaaacaaaaaacacccaaaccctgcaaaatctttttcccttgggagtcgctcagacagaggtgggggtagaggtgggagggtgaagagtgctgagaagtcagcacagaggctcaagaattttctttcctcctctcctgaagttacaacgaaaaatagcgacagtcagatcagccgggggctctctggtgtctcggcttcaatctcttcctacaaagagggggttccttgtcctaggggtggggagagcaagaggacgcgacctggcgagattgcccctagtctggggccgcctctaggcttcggaaactgcacacggcgcgcggggggctccttctcgcggccggctggcggcggcagcggctgcgattcgcaggctcgagattcgttgccccgagatccgctgcccacgacttacctcttggcaccttgaagcgcgagagacaggggagctttgcaaattgcaggagggagtggatgcaaagaggtggctgtgagagggcgagaagaaaagaagggaaaggaaggagcctagccggggagccgggctggcagccgccgcgggaggaatctgagcgtgcagcccgcgcggggggagcggcggccgccgcggaggcggcggcgcgggagggcggaggcgcggccgcctgcagctgggtagcagcgcgcggcgcggcgcggcggtggcgggcagcgcgcggcaatgccggccccggggctggactgctgaacccacaccgcttcaccaccggactccaactgggagggggcgccagcgcacccaggacgcggtgccccaagggaccccattccaagctgcaaactcaagtcccccgcctccccaggccaaacacacccccgcgcccgttcgcagctgccaccccgggtgttccaaagactccggcaaagatctgcgcctcccgggtctccctacccgccagcccgactgc

SEQ ID NO: 36325 - DNA, 2300 bp, Homo sapien
ttgtgctcactgcattgagcataggtcaaacattttagttctaaaaaacaaaatatttgctgcataaataatgaataatgaatatgtgctgcataaatcattgaagagtggatgaacaagtgggagaaagggaaaaggagaaagaaaaagagatgggagagaaagggaaggaaagagagagaacaaaccataatgtgacgcaggtactgtctcctggagctgggaaagcagctcctccacatggaggaggccaccactgtggcgtcttccacccctttggtctcttctcaagcaagatgggattctgaaccttgaggctacctgcatattatcaaccagaatcctttacgagtagccagcactgttcttgagcttcttctgtgctccttcatagcatttcccaaggtctgagctctgagaaacaaccagagagctagaagtgtgcctaaagaaatgcggccttcactggctttgctggttacaggtactcagacacgaccagccctgaagcttttgtgcctgcgctgctccagacttagcttccacaggaagcccgtccgttcccatggcattagccgacttccactctactctcactggtaaggacagtggtagttaataaccttgtatacagagtcaggaaatggaaggagttatttattttccctgaagacagtttgttcttttgataaactacagttttatataattttattaatgccaatagtaaattgtgttttctcatgactaagcttcctcctcccaccctcccaaccccctttagactttggctataaatagaaagctctttgttctgtctcctctgggcaataattacaaacataaactggggagaagccctcatgtctttccacatctcttggttatttctccacaagtaggcagtcacacaaacaaacagcctgctctgtttgtgttttctctgcagtcacaattcttccactgaatgtttatgcattccagcatctcgagaacttcaggaccgagatagatggtatcttaatatgcgtttgaacatgtgcacttaatgtgcttggttaattggagtaattagtagtcttttcattccaaggccgttgctgaaattaaaacggggctgttatttcttttaatggactaactgaagaattattattttgaaagtgaatcaagactgaaggatgcgaagttctgtgctccaaaagaggaggaagggactggaattctaaggatctgaacatctttggggaaagttcccagcctcatttactccctccagatatcacaatacccagggtgatataatttattacccaacccaggacacttttgagaataaaatggggcctgtttactgatttcatcgggataactgtcctaaacagagtgttccagcaaaccggagtatgagcactctaccaacacttcacgtgggtatagctgtatacacaggggactagccatttgataccatctgtttctcacacacatccatgagggaagaatcattcccatttaacagacaatgtaactggggctgaatatagctcagcgacttgccccaggcccaccaggaagtggataaagccgtgctcaacccagcacttcttcaaagccttattctttgtctgccacactgacccgcgctgattccttctggtcagccaagaatggcacaggagtgggctggtaacatgtgagcatgtgcagctgaactggaaggtggccaggagctgaagtagcagagggcagagctgcatttcaagaggaggcagcagggcatcccggccaggaagcctcacaggcagccaggtgggttgccaaaagaggctgctcccttggtgttctggaccagcttctgacccttaggcgtggaagtgtctcaaatgagctccaggggtcctgtgtgaccaaaggagcttaattgcaaaggcaccagctattgtgacagaatttttgagacgataactttcaacaagttcctggactgagagggctggccgtaaagtgggcgtggtctatgggctgtcatagttaccgtcttctgtgacgtatcaaaagggcattgttgatgctctcatttccaccatttgataccatctgtttctcacacacatccatgagggaagaatcattcccatttaacagacaatgtaactgggcctgaatatagctcagcgacttgccccaggcccaccaggaagtggataaagccatgctcaacccagcacttcttctctctaccttccaccgatcctgcctgctcatcttccctccttggtgaaggcatgtgtgctgtg

SEQ ID NO: 36326 - DNA, 2300 bp, Homo sapien
tttagaaacatgcaacaccaactccttttctaccctcctctccgtccatacctacaaggccaaggacaaacgccatcttcatccttcttagaaagagatctattaccccattaggggagacagagagagtgaatggaggagtaccgagctggctatggacttgggtgtctggcaaacacagcttcagtctcactacttctgacactctggttattgggcactaagggccagactggaaagtcacttgagacacattctcagtttgttgcagtgccaggaatgctgcgctgctgctgctgcgcacctggcccatgctgtccctggcttccatgccgtccaggccctgccagaaaaggaaattggcatgcaattctaaactgcagtgactgggatgggaggggaggggagcagtgttgatgccaaaatacccacggggtctaccagccatggggtttgcttgcttaggagtagttgtttcagaggtgattacaggcctgggtttgactgtgcttaccaatgagtggtttttgagctatgagaaagtggatgggagtgggaggaggagagatgggtgaagacaaaagagttctttatgagcctcgatgttccctggtaaacttttaaaaaggccttctctcatgatctaagtcttggactggtggcatcatgtaactgctaaccttacagtaaaaacccaagaatgggtcaaaaatgtcttcccagtttctccaagctgcttctggaatgcaggtctgtcggctgggtgctctccagcagctgctcctgcctgattcaactgtagcctgtaatgggtaaaagccacatttaggaggtggtctgatcatagaacaccttaggaagaaagtccatgagactttctgactaggaaaccatgtggtttgaacttgaagaaaaatgtagacccatctgggttaattttcctacaatctgactcaactgccaggtgaaaaaaaaaaggaaaaatttttaagctaatatttcactcttttgtcattctccttaagtttcatctcctaaaaagcttacccagcctgagcttggggacctgtgcagaggaaactaagaaaaatgcactcatcaactccttctcccagtgaacgcccggtgagaaaatccatttgccacaggcccttaccttcaacaatcccccttctatagtgttcgctggtaaagggtgaggctcccaagtgctggaaagcccctggacttggctcatttctcagcaagggcaggatagcacgggtcctttccatagaaatatcaacaaattctaacccaagcaatccctggacctacctgcctccagggatctctgaagaaaaaaagtaacccattgatcaaatcagaggagaggaagcaggaggtctcctagagcccattgaggaagaggaactttctcagtaggacactttataagcctgagaaagctttgaaaaggcggaatgagttgattcatttccacctcaaaaggaacctttccaggtccccctggaaattgtgccctggagatgtttaacaaggagaactggtgaggaaagagtccttttttactgtagggaaaagccccaaactggcctcctgggggatgagggctgaaatgatcccgaaggccttttaattagtgtgaaatcctgctgtactcagaaatccttccccgaatttacagcacaggcaggatgacctaagaggcagtttacttccctgagacccacagttgggctgttctggaaacacatctgtgaatcatagccaattgccacagagaaaacagaaccaagcctccggtgaggccactccaccccagagaagtctgcagaattccaaggactcggattggatgttcagaattcagcaactggaaagtccttaaaaacaaacaggccaaaccaaatcaatattgctgtttctagatgtcccttctgtggttgagctagttttacagagataaatatattaagacaaggaggtgggggtgttatatgatcaatgatagccatttgaaagagagggaggagtacagaaggaaggcacttctgggtacttaattcagaaatttctttatatttcagcactggattatcatataatgcaagtgactatggactaagagttagttatggtgtcttatgactagatttattatggtatattaaagtaacaataatattaatattaccttcctttttttttttgtttcaaaagagatctttctccagatgcttcagcctgtctggccttcttatcatatgtgcagcacatcatgtctcagcaacagtgtg

SEQ ID NO: 36327 - DNA, 2300 bp, Homo sapien
ctgtactccaacctgggtgaaagagcaaggtcctgtctctaaaaaaatttttttaaatgtatgtccacctgggatctcagaacgtgacctcatttggaaatagggtctttgcagctgtaattagttaaggatttggcgatgagatcatcttgcatttagtgtagtccctaaatccaatgactgttgttcttataagaataggagaggggccaggtgtggtggctcttgactacatcccagcactgtaggaggccaaggtgggtggatcacctgaggtcaggagtctgagacccccgtctccactaaaaatacaaaaattagccagatgtgatggcacatgcctgtagtcccagcttcttgggaggctgaggcaggagaatgacttgaacccaggaggcgaaggttgcaatgagccgagatcacactgttgcctgggcaacagagcgacactccaactcaaaaaaaaaaaaaaaaaaaaaagaggagaggagaggacacagacatgtagaggagagaaggccatgtgaagacagtcagagactggggtgatgctgtcacaagccagggaactcttagctttccggaagctggaagaggcaaggaaggacacctactaataccttgatattggaactgtaaggggaaaagtctctgttgtgttaagccacccagcttgtggtactttgttgtaacagtcctaggaaatgaatatggcccctcagagccattgtgggaaagaagagtcattgctgctttcccggctgaggacagagaaccaaacgagaagacccatgacttgtctacccccaaggcagagctggctctcgaaccctcgttttcagactccacacccagtatcctttcctcttagccacaaatatcttctttcatacttgtcaaagtgccctcagaaagattatctcatttgagccctccagatttttaaaattataaatggtgtttacatattatccatatttacagttctcctattcccaagtccaaagccagtttccaccaaatgccgcatatccatttcttataaactcagtactctccaattttcattgtttccccttcttctgtttcaccctgttttcttctgtaatgagacttgcccttgtgactcctgcttcccctaactcatttgcacatttcaaagctccaacattgctgctttcccaaagagcctgtccccagatgtgctattccaccttctgtttaacaagacaccacacattccttccctggaactataacttgcccacacccctcccttcctctttacttgtccttcctcccacccaatacccccgagttgtggtcaactgggtccaaaattcttaggcttagcaagccagaggtgaaggctcctgtaaggcttgccctcctgtagagagcagcatggctcctgtgttacggtcccagagccccacagcccctgacccgggagatggtccatcccctttctgctctgtgtgagctccatggctgtggcctctccccaagagcatcagcattcaggcccaggcctccttccacatgccgccctacattactttgccatttttttccctctggatcttcagctctgcacctagttctccaactttctttctttagagggtttctcttgtattttcatttactttctcttgagcagagccctccctcccctctacctggtcactaatgccccagcccccatacacacactggcccaggtcatgatccttttctgccctctcaaaatgaaagcatgagaaaagccaacactgttacatggttctccatggtgggtcacctctccactccactcctgtggtggctacaggaaccaccaagtaaaatttccctgttgttccccaaagccttgtaagtccccagctaccacaaccgagaccccatccgtgggagccatcccagcagtactggagtaatggagagaatcatccattagtttgtacattcagtcattcactgattcattcaaaaaaccacaagttatataaagtgactacaagtccgagctaatatttaaagggcactgcttatgtgccaggtactgtgctaggttctggagttgccaaggcaacgagacaaagtcattgccctccatgaactaacaatctacagggagctgtaaaacaagtacatgtgcaattcccggcctgggtttgaatcccagcacttctagctgcacaactttacccaagaggcttattctttctgagcctctggctctgcatctgtaaaatggactttacattcagtttctttatctggcaataaggtaatta

SEQ ID NO: 36328 - DNA, 2300 bp, Homo sapien
ttgattaagttataatgtaccaagagagttgcacgttgggcttggtgactgctttcttcaggaaggaggaatttgcactgagagtctgtggggacacagcctgccataaagggtagtgaggacatctttcccttttctttgcctatcagatgcctgacctttcaggaaggttcagctaaagtgccttttgctccatgaagccttttcctctcctcaccccaaccatggtaaatagtatctttacgtgacagcttgtatagctccttcatcttcccaattcatgtggcagccttagttttcatttcatgtaactattattctgaaagggattttgatctctgttaagaccgttaaaaccatgcctttgtttcctcaaagtgtgcacttccatagtgtgcactaagaaaagcagtttgtagagcagttgagaggacaggctcaagtctgtctgggtttaaatcctgacttcaccatttcctagctgaatgactagggataagttacttaaatacttcatgtctcagtttccccacttgtaaaattgggatcattatactatttgtaaatattatacaagttcacacatgtaaagtgctcaacatttttgcctagcacataataagtattattacttatttttttattaagcgataaattttttaataaagctattaaacaaatacatgtttttagtaaggaaggacatagcacaaacaggattaattaaagagaaggcaaagaagacaaagagaattccaccagattctggtgcaaaacattcaataattattttttaaagaactgaagggtgggaatgtctgttggtgcaaccactttagaaaacctatggcagtgtttacacaaggagagcattcttatacactacaactcagcaagtccactcctaagtatacatccaagagaaaagtgtctgtgaatccaaccaaaagatgtttgatagagagaatgttcgtgacagagtagtcatgatagtcacctgcacaaatgtccattgacagaagaatgaataagtaagtgtgtcggtgaaaatggatgatacacaactacacatagcacaatggatgaatctcacaaacatagtaatgagcgaaagaagccagacaccaacattccaggcaaaaagatcctatgctgctacaagccagaataatggttaccctgggacagtggagacgggagaaaagatgtggagaggagagagcaggaggagcttctagggctgtggctaacattttattcttcatctggcgctcgttacatgggtgggttggattgtgaaaattcattgaggcatacacctaagatatgtgcatcttttctgtgtttgcatcctacttcactaaaacaaccagaagagaacgggaatgaagtaagatcagaaaataaaggaagaaatagaaagaaaatgaaagaagggagaagaaaaataaacaaacccagaaggctgaaaggcatggaagccgcacctgaccgggttgactcacccctctgccccaggagccacccctgccctgccctgcccgtccccagcaccctactctccttttgcttagcccaaggatggcaaatgccccttttggtgggggttctgagcatcactaagacaggaagggctttccaagtgggtaaggctggtagtggagtaactcggaggagctgacgctttattaaagaaacagaagacttgagagccatctcctctcttccttccccttcccctttccccttcctcttccccttcccctttccccttcctcttccccttcccctttccccttcctcttccccttcccctttccccttcctcttccccttcccctttccccttcctcttccccttccccttctcctcgactctttctgccttcgcctcattatccgcccccaggacatcctcttggccttggtggctttgccaggaccagctctgtctccgcctcctgccctgcggggtcttggggcggggggccgtggcccggcccaggcccgagctgccggggtgtccccgccgcgtccccgcccggctgaccccgccctgcagccgccggctattttgggcgcgttggcggcggcgggatcgctgacagtcgcggatcctgtgacacctccgggcagcccggcacttgttgctcccacgacctgttgtcattcccttaacccggctttccccgtggccccccgcctcctcccggcttcgctccttttcatgtgagcatctgggacactgatctctcagaccccgctgctcgggctggagaatagatggttttgtgaaaaat

SEQ ID NO: 36329 - DNA, 2300 bp, Homo sapien
ataaatggggagccattgtaggggtttgagcacagagcaatatgacctgacttacattttaacggaaggacttgtttcatattacaacctgtaactgtagatcatgatagatgtgttctaaaatgggataagagagggacctaatttgaaatatctgtttgatcttgggccctaagcttagccaacctcagccctgcctcactgggtcattgtggtgaggacttgacaacatgctgtatccatatgcacatgctgtatactattctttgtaataatgcagaatgaaacagaatccagtgttagattatgagctacacactgcattagtagtaaaagcatgagttgcattgtggaaaggagtagtgtcaccccccaaggggtgaaaattggttcttgggaagcaaaaagaaaaaaaagttactcttttaatgtacaaaatgcatatgtatatacaatatgcaaacagatatgtagtatatctgcagcatttttatttcatagagaaatatctgaaaaggctcctttgggagcagggaagggacagtgtgtgatcatgaaaaaaagattggaaaatactgagttaaggaagagatttagtagcagaaatattactgagctggaggttcaaaaaccacagctaaagtcagctccgccattaagtttttgtgtaaacttggaccattcacttccactttctaggtttaaatttttttcaaatgtaaaataaaatgtttgaatgatctcttaggttttcaccagctgtaaaactaggaggaagatttgaactggaatccattcaattaaaaacacctgattatagaacctatcaaaatgtgtaaggtatttggacccattgaatgtcacttttcaataagataaatgtccagtgtcaatagcctttgaagtctctgacctctttttccttacccattctttaagctagaattctagaaatgctgctctaattcccagtagaagattcctggatacaatattgaagtctaagagtacaacgaagttttgccaagatgcccatcaaatgttctgaagcttgtcaacaggagttgcattgcttcacagttttcacatgatttctagacattaaagtccctttacaacctagctgggttgtcacttcaaggagaaagatgtatgtggtgtggcaaagggaagcaggaattagcaggatagagtaccagattaaaaagaatttggggggcacacatattcacagcatctgtggatggcattgactgaacagccttgtgcatacaattttttattgcttatccagacctgggcttattgcactaagaaaactttaaatagtttttcctcggttttatttttctcttctgggccctccagctacatttaaaagcccctttgaagacagagaatgtgtcttctaacgcttttgttgtgctcaattcagcattctgtatatgataggattttagtgaatgtttgttgatggtgatgatcatgcagatttaagggggaaaaataaaaattaaagccataagtctttgagtccctaatttgggtggtctatactgatgtgtctataggccagagcatttatcttcttttccttctgctgtttaatcacctagtggtgtttccagataagaaatgtaaatggaattcattacctaaccagggcatgtaattcatttatcacagggtatcaataggcaaataattgttctatgtgataaattcagcagtaaatagatgagaggccattgtgaagaattgtagctctccactgaattgcaggggttcttgaatgttgtcaacatttggaggcagttggaggagggagctctattgatgaaaaatggctacatattcaaaatttcagtgtataccaggaagataattcaattcaatctctggcttacccaaagaatcttggagttactgccaatgaggaaatccccagggtctaataaaaatatctttaggagtgaaggagttaactgagtgtgtaagctttatcttctgtccaatggacttgtggtttgcttataaaactctccagtaaataattgttagagacctgtcattgatagcagttgctagttgctgccttttaagagctcgttgattcctctgcaaggtggtgcagcatcctctgtcccttcattcatttcagatctactcaggtctccctgtaaacagatctctcggatcaataagcatgaatgacgaagactacagcaccatctatgacacaatccaaaatgagaggacgtatgaggttccagaccagccagaagaaaatgaaagtcccc

SEQ ID NO: 36330 - DNA, 2300 bp, Homo sapien
tacatggttcctgttgctgctggtagttatatttaccactaaaggaaccagaagtctactctgttaaaagccaagtgtaaagctgcaaagaactgagtacattatgaaatcgttgagttgctaactcaaccagtcctgaagtctgccttacctctggacttcttgttccacaagacgataaatatccttactataacaggattttggttgtggttgaaatggtaaatatatagaggataacaaaagtttagggccaaaggtccttatgtgtcattttgtccctctgttcctgaccactttatcttacagagcaagagcccaggtggcatgagactccctaatttaacccagccacacaggcagtagcagtggataaagagagtcctctcctgatgcccatccagctgctatcttcaccacacatctgacctagatggcattcagttttgtccaccctttaagcatacatatgcacctactgaatgaacaaacaggatatgcacaatacccccaaatgccacaaaatttaagttctgctaatcttaaatgttatgtcattggacattacctaaattcccccaaaacttggccttaccctgactattgttcaaattggggtacttttttggtcataatgataataatccccaaaacaacatgtgtcagatactgtgctgaatactctactcgctttcctcattcatttgatagtaagaggttggtattgtaacaagacgcgttttgcagatgaggaaatgaaagctcaaataggttgagacactggcccatgattgctctgctggtgagtgacagagtgagtattcaaaccaggttctagggtctgcaggttctagggattcagctacagacccactaccatcccctccagctctgaaagcccatggatctaagatgcccatattcaccaatgcacaggccaacctgagacttaaaactggaattaatttatcaaggcacaaactaataatcaacggaatacatctattgccaaatcatctccatggctgcttccagattgttggtaatagctatactgtaaggttcagaccaaggggaccaacgtcagaatttgttatctaaggtccagtactgcagtttactaatccaggtactggatttacagctattaaatacttaacacttgaggatatcacatgtgattaatattcttaatttatttgtactttttatttgagctggagatacagtagtgaacaagaaagaaaataccttctggagcctgcattttaacaagcgggacaattaaattcaatagtgatttagcaagtacttctataccaagttctgtttggcactacagataaaaagaaaaaagatgctatcctctcactgccaagtgtgcctggacaacccaactgttagcgaataattctacttctgtttggtaactgctctttatgttggaaagtttagttacattattctattaaataaccttccaattaaaagcaggagcacaatcccacatacgcgtctgtcaaagtaagcacccatttctcagctgtaactcattactggttccctgccgcaggcactgtgctgcttttaaccttacttgtaaactattacctaacttccccggtaaaggtgctcgcttatccagtaagacggacagacgtctatggtagatccacgtttcatttatcccaactcactggaactggctgaagcttctccagacttgtgccggaccttggtgcagccaaagttgctttctccgcggccacctaagctgccaggtgcacattaactaagtggcagaaggccatcggcttggcaattgcctgaggcctttccgggactcgctggtttttaggttccatgaagggcatccagatctaggatgatacgaaaagtgcgtggtgggagagtggaatcaacctctactcttaggtccgatacaacccctccaagcacctgtctaaccaatcggaaagaaagttacattcaacgctggttctagcatccaatccaaggacgtgtttcagactctgctgcccggtcccagccagccctgagctggcgccttagacgctcgcctggcagctgcgcacactcggagcgccccgagcggcgcagatagggacgttggggctgtgccccgcggcgcggcgcctgccactgcgcaggcgcctcaggaagagctcggcatcgcccctcttcctccaggtcccccttccccgcaacttcccacgagtgccaggtgccgcgagcgccgagttccgcgcattggaaagaagcgaccgcggcggctggtg

SEQ ID NO: 36331 - DNA, 2300 bp, Homo sapien
gaataaaagaatagttacagtcaatagcaggttgtggtttctgctgctaaaactttctgaaaacctattgcaaatagacagatactgaggcaacaataagacaggagggcaggtgcagatgtgggagcaggaatctcatgttttacattcattcctctatactatgtaaaccagactttctccccatgaacaacataaggtaatagcaagcctatcaggtgaacattagatatcattatatggacttctgggaggaatctggcagtcttatgagcacttttctgtgttgtgcactgtggttaccagctgtaccatgcctatttcacaggaatagctggtgaatataatcataacttccataaaatttgcagagcaaagcaggttgtcatccaaacagagtccaacaatgttcagtgatccgaacaaaagtcaggcccattttcaccactcctgctctctgataagcgtacattgtcctttgagtgttttgggagagcacagagttgacctattctgggggacaaggacttacaagattggaccactctgttccaagtttgggcaatttcaaaggacagggctttggggaattggaacaacttgttcaacttcattgtgtttgggtctcactaaacatagaaaccagcctccctcttaatccccatcccacgtgttgaaaaccataaactcaagttaccacgaataaaaggccatggaagagtgcccagatgcccttcgggatgggatgacccagttaggaggtaacaatgtttggggttgagattgtccctctattagaagcagacagagaaaaagctatgaccaaaatgtttgcatggcttaattaaatatcaacagatatctctattcactttaaagctccagcacaccagacaagggatccgagctccgggcaggagccaaaaccaccattgcagatatgctcccagttttaccagctaattagatgttaaacttacattgtaacaatcaacctgatattattgcctactgcagatagaactagaattctaattaggtcagaattctagctgggattgtgtagatggacaaattctttcagggtagtttgatatcactgctataatttatggtaaagacagttgggatcatactggcaaactaagtacctgcctacactccctcaggcctaaaaatgccattgattatcccaaaaaaactgagaaaataatccactacagtacggaaaaagacaaaataggggcactaacacacaagaagcactgaaggctttctgaaagagtaatcaggcctgatgtttgtagttttaatgtttactttgcaaacaaaggtagaaacagagtctggagctcggatgccaccaccagagagggtggctgttcagcctctctcctgtgcaaattaacctaattctgaacctgtcttggtttaattcgcacaatttcaggtgccatgctaggtacaccacaaatatacctcagggacctcaattgcaaaaacctggactgcaaacgttggggctgcagagttgactaggttaataaattctttctgaggtaaagcagataacacccactaataaaaagaatgaaacttcatcgtcccattggcatcctcgggtgtgcaggtgttcctcagagcaaagcccatggtgtgccccatcgccaattcgtgacaaggcagggggcggggggcgggggaaggaaaaaagcctgggataagaaatcagagaatacaagtcgcttttaaacaaaaaacagtgactgttagagtacacccaccattggggtaacacgcaataatctctcagcatcactgactccagcacagctggtcccctggaaaaggcacgttgccggaaggttttgtgtgtgaccaagcaattggccatcccacgccttcgccctaccagatgggtccctgcccccgggagtcccctccccctccaccctccaaacccaggcagcgcccgcccctgcccccgctgattgacaggccgtgcagctactcctgggagcctggctttcgggggcaacccaggcagaagtgactatctctgcagcagccaatagaagccaggaggcggggcggggaagcggcgcggtcaggtgctccgctccagagttgagcgcaggtgagctcctgcgcgttccgggggcgttcctccagtcaccctcccgccgttacccgcggcgcgcccgagggagtctcctccagaccctccctcccgttgctccaaactaatacggactgaacggatcgctgcgagggtgagtccaggggcgtgggtggcttcc

SEQ ID NO: 36332 - DNA, 2300 bp, Homo sapien
gtttgcatttgcagaggaatatattaattgatggtttctttcactgaatcccattactctattcaggtagctatatataggtcatctactgcctcaactgtggaagcagaaaacaaaaggtcagattcttggccttgggttcaaaagctaaggtacagctgctagcacaaaatatttggaggtatatttgcagaaacagttgttccatcaaagagaagataaaaattctctggactagggaaaagtaggagagttagagaagggagcaataaggttgtatgctgatgtaggtctctgagtatgggctctgcatccccccgccccatcttggtcacaaccttcaaagggtggtaaaattctgggatccaagtgagttgagaaatctgaaacagacagcacctgtgcctcaccacctggagagggaggagtgaccaggaaagcagccagcctccagaatccctctcccatgtcctatgttaacagtagagcagacatggttgtgtggacatctaggcagagaggtcccgagacagccccagtggatttcccatagttctagagtgtaatggaagaaccaccaagtactttctgaatttttccaagaggggtacagaggtaggctgagagagcaggatacccaaggagaccctttggccaggacaaggaagatggagggtaaccacgtggcctcttaacaggggagcaaatggaaacatgggcacttcctgccatgaggaatatatgcagatgactggaaccagcaggctgagaatatagtggcggatactgattggctaaatttaaacaaggtcactgtcactcttaacaaccatatctcaacattttgacaatgtataagggtttcattttatttattatttatttttcgagacaggtctcactctgttgcccaggctggagtacagtggtgcaatcatcaccttttttttttttccacagttgatcaggaatcatgtgtaagtgttttaaattcagcatctgtttgggagtggtctgaattgactgagaaaaccctgaggtggctaagattatattcttatgatcagcagactagggttttacagtagatattatttttgctacaaaaaataaagggtattattgcttttgtttccctgagccaattgcctttgaagtctgtagcctctatgccccactaaagctcatgatgagaatgcaatcacaatgcaaaacagttggtgagtttgccaacactggacttggctccaccatcttctctcaaatagagacctcctctaagccactcagatggcacccaaagtcattgttcttttaatggttggacactaaaaatcataaaatcttttttgttggcttggtataagcatcacctagttttttattcttgagaaagaaaagctatttgattgtcagaggctagtgatgacaaagtgcttgtagcacggccacagagctaagacctttattttgctacacagctattgagacacaggctcttctccactattccgtcttagagcttggttaatttctcatgctctatcagtgcaaatgccacataaaaattatcagatgcgaccagaaagtttcttaaagtatggaagatgttccacaaatgcaacaacagtaaaggaacatccactatgaggtcatcaccattttagtgaggtgggttcttttcccaaatgaagaatatttgggctaggcgtggtggctcacacctgtaatcccagcactttgggaggccaaggggggtggatcacgatgtcaggagttcgagaccagcttggccaatatggtgaaaccccatctctactaaaactacaaaaattagccaggcatggtggtgtgcacctgtagtgccagctactcgggaggctgaagcagaagaatcacttgaacctaggaggtggaggttgcattgagctgagtaagccaagattgtgccactgcactccagcctgagtgacagagtgagactctgtctaaaaacaaaacaaaacaaaaaccaactatgcagggttggtgtgtagaattctagtggatattattacatcatgagaggtttcctcggaatatctgccttcaattatgggcatcagcagcagtgcccatcatagagtatactttgccacgacacaagctctgaggagagacaagcccccaccacaagaaacagcaactgtgtccaggagtatgtaaggtatggccacaactaggagctctgtggtcctatgatttaaatatcccaccatcaaaagaggcatccatgagacctgtcaatctgcactggccaa

SEQ ID NO: 36333 - DNA, 2300 bp, Homo sapien
aaattgacgaatgctaaaaattgaaatgtttcttttcagagagctgattgttaaacatttaccagtatgctgtgaaatgtaaaaaataaattttaggatatgccatggcatatgaaaaaatattcatttctttgttttgcctcttgaacagatgccagtgatattcaaaatcacattcatctttgtattactttacattttagctacacttgtacaggtagatcccccatttaccttttcaaaagctgcctggtacttcatgttggccaggttttgcatcatctggctccggctgccttgtatacttcaggctccagccagatttaaccctgagtgagttttgcatccaaatgccttattctttcctttggacatttctagtctgtttttacctagctgaagggcacccctcacttctctgtctgccagtatctttcccgtatttcaaggtcagagcagaaatttcctccccttctttgatgctcacctgccatcctaacatgggatccagcattcagcattcattgctctttctccagtgctcccactgaacacttcctatacctattcagccatcaccatccctgccttgtgaaatgttggtctccatgtcttatctcctcccctggattttaagcccattgatgatagtgacatttgctttttcatcattttatccttgagagtatcagatgcagagctttgcatagtcattacttgatattagttggattatatgcatatatgacttaatatttcccacagtgtcctggacagcgaaataaatgccacttgaacaaatgcacaaagacacacacacacagtttcatcagtctaaatatccatatttgtggcctgattacctttagcatagaaaatgccttgttgaaggggaacattggactcaagtgtacaccaatgaggacaaatgagaaagcttctactctcagtctgaaatgtcacctttctcatctgcatgtaaaattgggaggcttttgtccagtcatatgttagaaaagtaccaatctgttataaatcaggatgttccagtggccactgaagatacaactgaactcttaaggatagatactgctacaatgttagtgagttctactgggacttgtataactaatgataaaataaaaaacaattggaaatttttcctttggtcactcctgtgaaaggaggctattcctgtttgattgatttatttattaaacaagtatcatcttcttgtgccaggcaatctgtgaaagactgaagatataaaggtaaatcatctgtggccttgcccctcagggatttataatcaggaaaaaagcctgagaaagcaaaaggatgtgttcaaagtctcaggtgaagtcaagccccgaggatctgacaagctctgagacacatcagtgagtttgcccgttagaccctgccatctgtccccgtgtgaaatatttgctgtaactcctttccatgaactgcttttggtttgaatgaccttggagacagcctgaaatcctgagcttggaagggtgctcttagcgttactggtctgcacttatagccttcaaatagaatttccacaaacctctaattatctcctcttaccatgctccctaaatgacagacgaccagctctttagtcactccaagaacggatttctattcagcccatgcccgggatgcattaggatgcccagaacatgtgtggctgctctgagtggcacagagcaattaacagaagccaagcaatttgcaaaatgcctcaacttcctgctcatctcgaaggcagaaaattgtcaaaccttaacctcaggaggctcatctgcagaattacacctcccccacctcaaagaagaaactctggtgtcagattcaccccctcctgctttttgcaaacataagcactcggctgcaacaacagctatgactcagttcctagctaacgctgcttgaattgatttagtctgagttcagatttagcacataatcatgttcaatttgctccactgcactgcctagagataaaaggcttggagaaaaaaaaatagcttcagcttgtgtcagtctttgtggtgatgtcattgccatgagcgagccgggccgttcgttactctgctgtgctgcctcagacgcggagggctgcgtgcagtgggagcgggctccaggagcccgagcctccagccgtccccagagcaaggcagcaccgaggcctggccacagcaatatccatctggaagctcttcccttcactcccaactctgaggttgcctaactctttattaaaaattcagaagggggaatgccag

SEQ ID NO: 36334 - DNA, 2300 bp, Homo sapien
agttgacagtcaatgctgacctgcctcttgatcctttccagcttttgggtatttccaacttcactgtgcccccagaatgcagaggccggttagcaagtgttgcgtggtaccttgtggtacatttgttcttcgttttgaagtgatgtaataaaggataacaaaggtgtgaaacttgagttgcactgttaaagttgtcctacatttcctaaagcctcccctctgcatgataagttgagtgaaattctggctgaagggagagagaagtgtgagctggaatgctgtgacatcccttcatctccaattgtggaaaactgtgggaatgcatattaaaggaaccccagaaacttttgtttttactaaactgagacttaaaaaaacttcatttggcagttgaacacctctatcccattgtaagaaacaggaaagattcaaagcatgcattctgctataattcattttgggataagaaataggcagaagtacctcgaagaataaatcattaactaaaaggcaaaccgaggcaccctggaaaccagcgagacctggaggcggccgagggatcaggcggctgggatttgcctgttccctctggtgacttctggagcgaagcatcccacaggcaggacgaacccggcacactgcgctccgctccatttcacttttcaaacttgaagttatttttagatgacccaaggccgctaatcccaagcaggacaattctcagcccgctgcacctcagtgcacctaccccctccccagcctctgcattgggaagaagggatctctcgatcttctttgctctctgcatccagttagtctcttctagaccctctctaagcctcagtcccggggatcacaggcgtcatcctcgctccttcacttatgcacctgctgctgcttccaggaaggcaaacccccgggccacgggcagtggggaaggggctcctttggacccgcgccccctagaggggggtcgcgggagatctccgtccccacggccgcagccgggactgaccacagatctggagacaaaccccacccccgccactgcccccacccccgccaccgcccccgcccccgcccccgcccccgccctgcacccagacccggcccggagaccagatccccgccgcggacccccggcacgaccccggggctgctgtcagccccggcgggacggggtgcctgggcgagcctggccggcgcggttacataaccgacctgctgggcgtccgcgatgcgccggcggaggcggaggcggaggcggcggctggggcgtctacgggggccagctgctagcgcgcggcgctgcctgctcacctgcccgccggtgcgagcgcgtgggggcggcgcggtgcccgcgggcctttgcgtggggccgtacgcggcgcggcgcgccccgcctccctctctctgccgccgtgggtcagtgggattctgcctgctgcccgctcctccccgcaacctccgccgccgtcacccgggacaaagcggctccagggaggggctgagccggcggctctcgcaggagccggcggagatgggcgcgtccccagctccgactcatcgggccaacctccaatcagacccagggaaaccgaaagcccctgtctggcctcttctcatctcctccctcctgacccggcgccctccccagtcccctacccaccgcacctccggggctctcaccctgccctcagccccgcaccccctcctttccacttcaggtgcccgggagggcgcaggagcctccgggcacctggcgtgggagcctggctgcaggagtcccggcctcagcgggaagaggctcctcggggtcccatactaagctgagggtgagggggcagcgacagcccagaagaaatggtcagagaagcaaactgtggtgggggagtactgggagaaagactcttcttaccagatgtctgagccccccgactctggctaactgaggaaatgtcggggagcccctggatggtcctcccgggcttctgcgcttggtgggcgctggcgccctctggctggagccctgcgcccggcccagcccaggccgctgagggtgccctgcgcgggcttcacagctttgccaggatttgcagccatcagacctgaggacagaagggttcgggctgcaaggaatcctattgtgtgagagccatgacacagtgagtgggaggttggtatcctacagcaaacgggactgaaggtgaatcgcaatctagggtagatctgttgctcaacaaagttaaccccagtagaagtctctgctttacggaataaagcaactcaaatgggtaagg

SEQ ID NO: 36335 - DNA, 2300 bp, Homo sapien
atttttttcctcatttattatgcttccttcttcacacaaactgacaaacacagaatttctcttagcagtagaaggaggaatatgtggctatgagaactcagaaacagcatctagaaaagtaacaatatctatatttggtgttaggaaaatggctatgttgattttggtaacagctaacatatattgagtatcactgtgtgccaggcactgtgcttaggtgttttacatgtattacctcatttagttctcagattaaatcctgtgtttttccaacttttcaaaatttctgcaatgaatatattgcttctataagctgaaaattttatttgtaaatgtatattcacaaaataataaatagtccctgttaagatgaaagtcatcagtttgacgaagattctaggaagtactcactaataataagtgagattttgtttaaagggttggggatgctttacttggaaagaaaggggatcctggagtgcattagacatgctagctatttttacatattttaaagatagttagaagaggaatttgacttggtttctttggcttcaaaaagtaagggagaactaatgattaaagggaggcaagtttttgctcaacttaagaatgccctttcagacaattctaacccaaatggcaattatctaaatcaacgactaattacagatttatgcatccaggggaaggctgaacgaggggaagcctaaggtcattttcaattctgaaattgtgtttatgttaatgcagattaatcagagagaagagccaacgtctcgtctacctttttttgttgaaaacaaacaaaacgtgattgtatgtcaactttggaaaaaaacaacgtagtgtgggtaagtgaagaatgattgtgaatggactgcttcagtgcaatcgtaatattgttatcagaaaatcaaaaggcataaaaagcaaaaagaaaacggcttatttatgcagcaattcgaaagatgacagaacacaaacctgatttaaatgttattcactccctccctcagattggtctgcacacctccttcctttaatttcccgcactctcctatgatcttttgcataattcacattctcttgccatgagactcagtcctgttcctatctgtgccacccgtaagccacaggcttccttacccatttgagttgctttattccgtaaagcagagacttctactggggttaactttgttgagcaacagatctaccctagattgcgattcaccttcagtcccgtttgctgtaggataccaacctcccactcactgtgtcatggctctcacacaataggattccttgcagcccgaacccttctgtcctcaggtctgatggctgcaaatcctggcaaagctgtgaagcccgcgcagggcaccctcagcggcctgggctgggccgggcgcagggctccagccagagggcgccagcgcccaccaagcgcagaagcccgggaggaccatccaggggctccccgacatttcctcagttagccagagtcggggggctcagacatctggtaagaagagtctttctcccagtactcccccaccacagtttgcttctctgaccatttcttctgggctgtcgctgccccctcaccctcagcttagtatgggaccccgaggagcctcttcccgctgaggccgggactcctgcagccaggctcccacgccaggtgcccggaggctcctgcgccctcccgggcacctgaagtggaaaggagggggtgcggggctgagggcagggtgagagccccggaggtgcggtgggtaggggactggggagggcgccgggtcaggagggaggagatgagaagaggccagacaggggctttcggtttccctgggtctgattggaggttggcccgatgagtcggagctggggacgcgcccatctccgccggctcctgcgagagccgccggctcagcccctccctggagccgctttgtcccgggtgacggcggcggaggttgcggggaggagcgggcagcaggcagaatcccactgacccacggcggcagagagagggaggcggggcgcgccgcgccgcgtacggccccacgcaaaggcccgcgggcaccgcgccgcccccacgcgctcgcaccggcgggcaggtgagcaggcagcgccgcgcgctagcagctggcccccgtagacgccccagccgccgcctccgcctccgcctccgccggcgcatcgcggacgcccagcaggtcggttatgtaaccgcgccggccaggctcgcccaggcaccccgtcccgccggggctgacagcagccccggggtcgtg

SEQ ID NO: 36336 - DNA, 2300 bp, Homo sapien
tatacacttgtctaaactcaaaaaagtacaccaccaagagtggatctgtaaactacggactttggttgataatgttgtgttcatgtagctttattcattgtattactcctgtgtcagactttgatagtcagggagactatgcatatgtgggggcaggcagtatatgggagttttctgttctttctgctcaactttcctgtgaacctaaaagtttatatttataatgtcacatacaaccattgagaggcagtctagtctagtggggactccaaagccaggttgtctaggtgtgaattcagctttccacttgttagcttcagcaagtcatttatttaatctttctgtgctttctttactataggttaattatagtacctatctaatagagttgccatgaaagtgaaatgaattaatgtataaaaattcattggcttggagcgtggcatatactaaatgctcaataaatgttagcaaaccaaaattctgatcttatttaccaccatccttaacattagctaccctttagcctcactcctgctctccaaaatcctcttcaagctcagaccccatcccataaactctttttctctctgtattttcttcttgccattaacatttgttttgctagtaacattttgttcttctcaaggtaaacaacatgaggctgtttgtcacttttcatttttttcctcatttattatgcttccttcttcacacaaactgacaaacacagaatttctcttagcagtagaaggaggaatatgtggctatgagaactcagaaacagcatctagaaaagtaacaatatctatatttggtgttaggaaaatggctatgttgattttggtaacagctaacatatattgagtatcactgtgtgccaggcactgtgcttaggtgttttacatgtattacctcatttagttctcagattaaatcctgtgtttttccaacttttcaaaatttctgcaatgaatatattgcttctataagctgaaaattttatttgtaaatgtatattcacaaaataataaatagtccctgttaagatgaaagtcatcagtttgacgaagattctaggaagtactcactaataataagtgagattttgtttaaagggttggggatgctttacttggaaagaaaggggatcctggagtgcattagacatgctagctatttttacatattttaaagatagttagaagaggaatttgacttggtttctttggcttcaaaaagtaagggagaactaatgattaaagggaggcaagtttttgctcaacttaagaatgccctttcagacaattctaacccaaatggcaattatctaaatcaacgactaattacagatttatgcatccaggggaaggctgaacgaggggaagcctaaggtcattttcaattctgaaattgtgtttatgttaatgcagattaatcagagagaagagccaacgtctcgtctacctttttttgttgaaaacaaacaaaacgtgattgtatgtcaactttggaaaaaaacaacgtagtgtgggtaagtgaagaatgattgtgaatggactgcttcagtgcaatcgtaatattgttatcagaaaatcaaaaggcataaaaagcaaaaagaaaacggcttatttatgcagcaattcgaaagatgacagaacacaaacctgatttaaatgttattcactccctccctcagattggtctgcacacctccttcctttaatttcccgcactctcctatgatcttttgcataattcacattctcttgccatgagactcagtcctgttcctatctgtgccacccgtaagccacaggcttccttacccatttgagttgctttattccgtaaagcagagacttctactggggttaactttgttgagcaacagatctaccctagattgcgattcaccttcagtcccgtttgctgtaggataccaacctcccactcactgtgtcatggctctcacacaataggattccttgcagcccgaacccttctgtcctcaggtctgatggctgcaaatcctggcaaagctgtgaagcccgcgcagggcaccctcagcggcctgggctgggccgggcgcagggctccagccagagggcgccagcgcccaccaagcgcagaagcccgggaggaccatccaggggctccccgacatttcctcagttagccagagtcggggggctcagacatctggtaagaagagtctttctcccagtactcccccaccacagtttgcttctctgaccatttcttctgggctgtcgctgccccctcaccctcagcttagt

SEQ ID NO: 36337 - DNA, 2300 bp, Homo sapien
gcaatagagacctcacaaatatttagccttctgacacaagcttgtaaaaaaacagttccttaaaaattatcaagatcatatgcataaggaaggctgtgggagacaaaggagtatttctttaggagatataatgtttcatctatcagactagcaaaaattgcaaagaattatggtattcagtatggcccaggatttgagaagttaggcaattgcatacagtcaatggaaaataaaaattgcatattcatacttctttttccaaaagtaacacattcatataaacaatttaagtgtgcatgtcctttgactcagcaattctactcctaggaatttattctgagtaaacaatcagataattgcaaaatgtacaaccacacaatcaatacatgcacacaaacacgcaagaatgttcactgaagcactggctgaaagaaaaaagtttggcagcaacctataaacccaactattgagatttaagtaaactattgtatcctcctatgacaaaatatagccataaaaggaagattcaaagtatttcatggtacaggaaagtcattcacattatatgttaaaatcaaaagcacataaaagagtattatactattattccattgttgttcattaaatagttgtaaatacataggaaaatgaccaaaataatataaatacactaaatttttacagtacagctggtgtgatattctgggttatttttattttcatcttagttctctttaattttctatatgttttttactaaattggaatctcagagattttgaaggcaaatgatcagtggtaaaataatgctactacgtataaattcattctacaaattgggctaaccagatggaaaatgggtcaccacagaaagtattataattcataagaataattataatatcatacaaatttattagacaatcaaataccataaaatatttgtgactggaaattgaataaaacttaaaagacattaataaaggtctgttccttaaagtgctcagacatttaaaagatactttcaagacaaaaacatctactacaaggaggattactagtctcttcaggccgtagtgaaaatggagtacatcatcatcaaataacaacgtcagctaaaaatacagagcctgtttattgtgtacggaccaactgtgcaagcaatttgtacaatactttggtgttaactccaatttggatacgaattactcattttcacaaacttaaattggattacactttatctttcccaattactgaaaacatttacttaacacatacacatttggaacttaacttcgatgaagtaaaaatacgaaaagttaatctctacttccaaaaatgtcgatgcacgctgcaattgtatttcatttctttcgcaaaattttgcacaggatattgttgttaattgttagtagaggaattcagaaatgactagatcctttagttgaggcaagcaggtatgttccccgtgttctagccctgcacttaagagtcaatgaaagaaagtttaaaaaagaaagcattgtctcctctggagaccccgtctgccacgaccacataccttgattcttgctttctctataaattctagaggggctttcccaaactcaaatccaactccaatccaaggaatccagcccttgatgcacgggggtctacgcaaattcttccgctgaaggagtaagaacagagcaaggcaacccaggattataatcactgttggggaaattagttccatgtttttgtccagcaccttccagaagcagaaaagtgtgaaacagtcctgccgtcccttgcttcttttctgtgggctacggaacctgtcgggactcccaacctttctgctgcaacttttgcagctctccttcgtaactgtagcttccttcctctgtcccagttttcaggtgatttttccattgtcgctccctcccacctccacttctctttgaatctcagccagcgcggaaaaaatgcaaggaggggcagggccgggctaggactgacgggcgagaaccagccgcgttgccatggaggccgggggcggagccgcagagggacccgcggccggccaatcagagacgtagcggagcccggcggactacattgcccagtaacctcctgggctccgctgtgtttttctattctggggtgtaaggggcagctggaccactccagctgggactgctaggaaggttgcgggtccacccggccgagccgaacgagggaaatggtcctcacccggccactcgccggttgaaaaggggccgccctggcagggaagcggccgccgcggcgcg

SEQ ID NO: 36338 - DNA, 2300 bp, Homo sapien
caaaaccttagtataccttttccaagagaaaacaatgtggggaagggaagtgaatattaaatcttaccactggtttttggaaaagttagtatcttgctgacagtttccctagaacagaagtagcttgcatagacttcaagcaatattttattgacatatgaaacctgaaaaatcttaatagatttctccatattacacagattatgtctttcaaaataagttttgttttctcgctggtttgttaaatgatgcttcaggttcctgaagtggtttgtacttaaaaccatcccacattttgattcccatccattctccacacacaattctctccatgaatttttaacgaggaatagtcctgtataaaagccattgagtcagagggggacacatcaattaaaaataaaacctggaaatatcattcagcaatctgcttttagatctttttaagctgatgaattttatttcagtaaaaacaatgaaaagtaaaaattctccatcattttcgaaaggagagacattaaaaaatagaggggctaaaaggcaaaaatggaagagcacgaaacaactgatcatggctggctatgctagaattaaaaaataaactcttaaaataggaccaactaacatttacaaatgataacgcatcagaactgttctttttatttttttgtaacaggcaagaaaatgtaagggtaatcttaaaatacacagttaaggcttcacaggaaacacatgagtatactactcacaaaatccttggaataaacgctacttgctcattcaagggcatcatcattccactctagatggcctcttaaagttttttcttactcatgtaggcagatgtaactgctcttctatgcttttatgacacctaataatatcttcattataacaagtagcacattataattgtctttctctgtctccccagcagcctgtaagaaggtcagaactgggtcttttcaaatatatatccacagtccctggtattgtaggaattataaaaatgtcgcaactaatgggtgtcctgccttgggtttagcaatcatatattattgacttctcagaatcctgcaaggtaaacagtatagatgaattacactcaaagaggtcaagtagtcgatgctctgtgagtggcaggttaataacggaagtcccacaaggtaggtccacaacttggacccacaagataatgacagtgtggctgtgtaagactataaaccacagagatgatctcagtaaggatggaaaacagattacgtttttaaaaaggtcatcctcatgaaaaggaaaatgattcctacagaggaatgacagctcgcgaagcttcttaaagtacaacattcaagcaccacagcacatgcctaagggaagcattagaagagattagaaggaaaaggccgtggagacctcaatccctcctcctcccaccgcgggcctggcctccaccgccacctctgccaggcgggcatggaaggggcgacctctccgatgcgcactgccgggcgcgaagccgcccgcgcaccctcccccagcgcggcgcgtgccactggcccgggaggcccaggcgtgggcagccgggtacctagctcggccacggtagccgcgcagccggacagtaggaatttgctcgctcggggccatctctgggtcagcggcaaaagcctctcctcctcctccgggacggacattcagcagtagcgcaagacgataacgcactccttctcgccgctgcgctgcaccgcgccgcggcggccgcttccctgccagggcggccccttttcaaccggcgagtggccgggtgaggaccatttccctcgttcggctcggccgggtggacccgcaaccttcctagcagtcccagctggagtggtccagctgccccttacaccccagaatagaaaaacacagcggagcccaggaggttactgggcaatgtagtccgccgggctccgctacgtctctgattggccggccgcgggtccctctgcggctccgcccccggcctccatggcaacgcggctggttctcgcccgtcagtcctagcccggccctgcccctccttgcattttttccgcgctggctgagattcaaagagaagtggaggtgggagggagcgacaatggaaaaatcacctgaaaactgggacagaggaaggaagctacagttacgaaggagagctgcaaaagttgcagcagaaaggttgggagtcccgacaggttccgtagcccacagaaaagaagcaagggacggcaggactgtttcacacttttctgcttctggaaggtgctggacaa

SEQ ID NO: 36339 - DNA, 2300 bp, Homo sapien
cagctctagggatcattgaagaggaaggctttctaaagctttggcaaggagtgacacccgccatttacagacacgtaggtatttatcttgattctagctggtaagtttgttatgagttctgtgtttgtctcctgtgcttttctgtttgtccaaaaacaagttagtttttttatcttactgatacaataactgaacacatacagcacatagtctttttttattattatttaggttttttttttgagatggagtcacactctgtcgcccaggctgtagtgcagtggcgccatctcagctcactgcaacctctgcctcccaggttcaagcgattctcctgactcagcctcctgagtagctgggactacaggtgcacgccaccacacccagctaatttttttttttttttttttagagagtctcgctctgttgcccaggctggagcacagtggtgtgaccctggctcactgcaacctttgtctcccgagttcaagcgattctcctgcctcagcctcctgagtagctaggattacaggcacatgctaccaaacctggctaatttttgtatttttagtagagatggggtttcaccatgttgatcagactagtctcaaactcttgaccttgtgaaatttttgtatttttagtagagacggggtttcaccatattgatcaggttggtcccaaactcctgacctcaggtgatccacctgacttggcctcccaaagtgctaggattacaggcgtgagccgccgtgcccagccagaacacatatagtctcttaagaagaaaaaaattaactactgattattattaagaagttactgtcctaaatttttagaaacgcatactcacgtatttagggatgaactgtcatgaaatctgtaaaccactttaaaatatttaattaagcaaaaaacaatgaagcaagccagatacagtggcttatgcctataatcccagcagtttggaaagccgaggcgggataattgcttgagcccaggagttcgagaccagcctgagcaagatggcaagaccctgtctctacaaagagtaagaaaattagccaggcctggtggcacatgactgtagtccccactacttgggaggctgaggtgtgaaaacagcttgaatccaggaattcaaggtggcagtgagctttgatcctgccactgctctccagcctgggtaacaaaacaagaccccatctctaaaaatattaaattgggccgggtgctgtggctcacacctataatccagcactttgggaggcacaggtgggtggatcacctaaggtcaggagttcgagactagcctggccaacatggtgaaaccctgtctctactaaaaatacaaaaattagccgggcctagtggcgcattcctgtaatcccagctactcaagaggctaaggcaggaaaatcgcttgaacccaggaggcagaggttgcagtgagccgagatcatgccattgcactccaacctgggtgacaagagcgaaactctgtctcaaaaaaataaaaaatacaaaataaatttaaaaagttagaaaattaaggaaatatggcaaaaatgttagcagttaataaatctcaatggtagagatagagggagttacatattatttacttttcagtgtttgaaaattttcttaataaaaatttgtataggtttaagaaagaaaaagtgaatagctgattatcatttttcttcacttaagaactttaaacacagaatttaaatttttcatattttttgaaaattaacatatatttattacagtgccaaatctcatgagtccctgtctcataatctaagaccaggctactctgaaagaggacagagttcactgcctaatccaacactggctgtagtgtaaatgcaacacaggtgatttttgccccagttccaaggctacctaactagctatgtgggccttagtcacccttaaaggaagatggttgcaactatgccagttagaacatttttctgctctgcttccacagtggcactcacaagaggaggacttgattttatagcttgtgtacaggagaatataaagttggcttcaaaggaggtaggataggtttggcatttttctcctcataatgtttcctgaagcatgaaaggatccttgatcagaagagtgctcagttctaatttctaaaatttgctggcttaatatttttaaagattcaattctccatatgagtaagttagcgtgtatcatcaaaaactatctagaactgtgtgcagagactgttactggttttccaagttgtatatttttgagtatcttaaaat

SEQ ID NO: 36340 - DNA, 2300 bp, Homo sapien
aaaaaaaatcccctctcccttcttttccgaaaccaagggcctctcaagactaatgggaggaaagtttatttattataaaactcaagatattttgtttaatatagtatgggagatatatgaggggagcttaatcttaacagtgcaatgacctgatttttaaaattaacccgagtccctgtccaacagcagagcatgacagaacaaactaatgctacctgctccagatacagaaaaggtaggacattggaaaatctgggtggatgggggtaaaggattcagatcagcccataacggccacgtgatataccctgacgtcctaggattaaggccatgagccatggaaggaggttggaggacaaatgaaatacagaaagtcataatatctacaaccctgtggtctacaaaggagtttggttatactacatgaacctgaaatagatgatggattaaagtctccattattccatgtaatgataaaacaatttcaagtgatcataagaccattttataatgaattccttctttccactgtaaaggccatagtgttagattgcttactcttgttaagatttactggatgctaacagtccagcactggctaggcatcgagaacataaaaataaatgagaagtgttcctgcttttaagatgttcctactgtggcaaacagagagctacaaaatataataatatagaagtatgtaaaaaaaaaaaaaaaaaggaataaccaattctgccaggttgaatagtagggtcacgaggaaacgacgtttgagctaggtcttgctagatgtttttaaataaaatgtttttcttccataatgaatatgaaacaattagaaaaaaaatgggaaaattgagttttcaaggatgagttcttcaggaaaagaaaagctttggcttttagagaaattggattcattcattcattcattcatattcatttagcaaatattcattgccttcactccaagctagattccgagaatccaacaaacggtacttgccaaagggaacctgtcggctggtgggatgatagagatcagacagttgccacacaatgtgaaaagtgccgtgaaaaagtaagcatagggtgatgtggaagcacatggttgcctctaatctggacagactgaagacactgagatttacagttaggccagggtcatttgaagcactgccttgttgtatttgtatgtaatgacatttcgaaacgtggaatgaaaggaaaagtacaggcagactataagaagcttccacggatgtgtctaactttgcaaatgaacaaaaatctaatgtagacatatcctggaaacttctagtttgcctgcacttttccattccaaatggaggtttggacatttaacagaggcctcaaagggttatcctgttaagattttagtatatacagcaggggcttgaaggaatgttgattccattcctcttggcctccttttatgaatccagttctgtgctagctctgtgagtaaatgaaaatgccttcaaaattgggatgccagagttagacagcaaaggagcaaaggaacccgtatcagctaagtgtgggaagggaaatatgtaccagttgctatatactttcacacgttattttaacctcataacaactcttatcaattcagatgatggaacagggttaaagaatagaggctgagcacctggctgtccacggacacactgagccagcaggagcacccgtgccccgcagcagcacccagggccctcctagagttccggccttaacgcctaggaacgtgccattggctcctgcgtttctcgttcccgtcgggaacgccactggctagtaccttgcctggcccccagtgctcaatccctggtagttgggaggacgaaaaggaaatccctctctggtcggtcctcaccgcagccctgtgtcaggccgtcacacggcggcctccagagtcgaaggcgctctgaggagatgcaggttgtgtccaaaacctcccacctcggggtctcctgaacgtcccaacaagctccttgggcccttaggcgttaggccaaccccaggcctcggctggccccgcccactctccgcggccggaagtggcggcgccgagtgaggtaaatgcgtgcccggaagcgcgacctcgggcggttggaggggctaccgggtcttaccagtccgtggcgggagtcccggaggaccctcgacgggggagttgccgagaaaaggcctcgccggcattcttcccctccactgggtcctttgaacctagtttggctgggactcgccttcaggcggcgcggaggatttcgagg

SEQ ID NO: 36341 - DNA, 2300 bp, Homo sapien
gtgttccaacagatgcgggagctgggcctggctcggcgggtgcccgacagcctcttccgttcgctgctggagcgctatctcacagcggccactgctagcgtgggctccggggtcccggttctctcgcgagtcccgctcaagcaaaagcagcctggtctggattacttctatccccagctgcagctgggcgtgacggaggccgtggtcataacccaagtgtgccatccccaccgcattcactgccagctccgcagcgtctcgcaggagatccaccgcctctccgagagcatggcccaggtataccggggttccacggggacaggggatgagaactctaccagtgccacctgggaggagagggaggagagcccagataagccgggctctccgtgtgcatcctgtggcctggatggacattggtacagagcactgttgcttgagacttttcggccccagcgctgtgcccaggtgcttcatgtggactatggaaggaaggagttagtgagttgcagcagccttcggtacttgctgcctgaatattttcgaatgccggtggtgacctacccttgtgctttgtatggactctgggacggtgggagaggctggtctcggtcacaggtcggtgacctgaagacactgatactaggcaaggcagtgaatgcaaagattgaattttattgctcctttgagcatgtgtattatgtcagcctgtatggagaagatgggattaatctgaaccgtgtgtttggagtacagtcgtgttgcttggctgaccgagtccttcagagccaggcaacagaggaggaggaaccagaaacatctcagtctcagtctcctgctgaagaagtagatgaagagatttcactcccagccttaagatctatcaggttaaagatgaatgccttctacgatgcgcaggtagagtttgttaaaaatccttctgagttttggattaggttgaggaaacacaatgtcaccttcagtaagctgatgaggagaatgtgtggtttctattcctctgccagtaagctggatggtgtagttttgaaacctgaacctgatgacctttgctgtgtcaagtggaaagaaaatggttattatagggccatagtcaccaaattggatgacaagagtgtggatgtattcttagttgaccgaggcaattcggaaaatgtggactggtatgacgtaaggatgctgcttcctcagtttaggcagctaccaatattggctgtgaagtgcaccctggctgatatttggcctttgggaaaaacttggagccaggaggcagtttccttttttaaaaagactgtgctccacaaagaattagtcatccatattcttgataaacaggatcatcaatatgttattgagattcttgacgaatcaagaacaggggaagaaaacattagtaaggtaattgcccaagctggatatgccaagtatcaggaatttgaaacaaaggaaaatatcctggtaaatgcccactccccagggcatgtttcaaaccactttactacggagagtaacaaaataccttttgccaagactggagaaggagagcagaaagccaagagagagaataaaaccacatctgtttcaaaagctttgagtgacacaacagttgtaacaaatggttcaactgaactagttgtgcaggaaaaagtgaaaagagcatctgtttattttcctcttatgcagaattgcttggaaattaagccaggctcctctagtaaaggagagctggaagttggaagtacagtagaagtcagagtgtcttatgttgaaaaccctggctatttctggtgtcagctgaccaggaacatacaaggacttaaaactctaatgtctgatattcagtactattgcaaaaatacagctgctcctcaccagagaaacacccttgcttgtttggctaagcgaacagtaaacagacagtggtccagagcacttattagtgggatacagtctgtggagcatgtcaatgtaacatttgtagattatggagacagagaaatggtatctgtgaagaatatttattcaattagtgaagaatttctgaaggttaaggcacaggcttttaggtgcagtctttataatttaattcaaccagttggccagaatccctttgtttgggatgtaaaggcaatacaagctttcaatgaatttatagataatgcatggcaaaaaaatctagaattaaaatgtacaatatttgctctggcttcaattaatgaagaactgtttaacattgtggatttgctaaccccctttcagagtgcatgccatttcttggtaga

SEQ ID NO: 36342 - DNA, 2300 bp, Homo sapien
taaaaataaaaaatttagccaggtgtggtgatatgtgtctgtgatcctagctacttgggaagctgaggtaggaggattgcttgagcctgggaggtaaaggcggcagtgagctgtgatcatgccactgcacttcagcctgagtgacagagtgagaccatatctccagaaaagaaaaaaaaaagaaagaaagaaaagaaaagaaaaagaaattgagcacattattacaatttaatatcttgattgaagggaagaggtgagacatcagtttcattcatattaaagaggaaataggtactgttatgtcaatgggaaatgagaggaggaattaaatgtaggaaacagaataacaaagaaccaactcataaaaaactaaaacaacccatatcagacacaccttataatctgtatgtctgtgttgacttatcctcttggaatgtgaggaatattctttattaattttacttactgggttgccagatataatacaggaagcccagttaaatctgaatttcagataaacaacaaataactttttagtatatgtcccaaatattgcatggggcatatttatactaaaaaactatttattgtttatctgacattcaaatttcaccagatgttctgcatttttatttgctaaatctgggcactcttcactgggcatcttctcagggcactaacctgccaaatgccaactgctgtggggctgctcagagaatatgacctaatgacaatgggagatgacatgttgctggcaatgagagaagtgaataaaatgttgcatacttgttttcaggagctgttctcaaagcttaccacctttttagtgtgggattaggtcttcaacttcaactttgtcttcacctttgtcttaaggtcaaaagaagacgttagagatgtctttggtagggcataatgtatccttttagattgatatttgtgggccatttgttttacagggggttagtccaggaagtacaagacaatgtcattaggcggatagagttccatttaaattaaaaataaaatctattgttaggtttaaatgagtcactgcttcattaagctatcaatattagataacacatattgaatgaatgtttcccataggccaagctctgtcccaagcatttcacatgtatttgcatttcgtgctcacaaactgcctctgactgactgattttgattttcttgattttatggatgaggagaccgagaagcagagatgatgaacttccccaaggtcacaccactcataagtgggagaaacaagctaaaattcaggccatcttactgcagaatactcaaaatcaaaataagcaaaatttcatctccagttctggcacctcaccaaaaaccaaaacacgatttaaaaatataaaattttaataacaccacacataaatttcaaactactttccctaagtttctagctgaagttttaaatgagtgtgtttttaatttattagaaagtggattgaagagaaaacattggaagatgaaggaaggcgtttcagttaaaccccaaataactctgtgttacactgagctatgaaacggctccttctagctccatttctcctcagacctaagtgctattcctgattgtccttcattgtcatttccagggagaaatgacaccagcacagtggcaggccttccaatctggagcacggtccacacaacttccgaattggtgttcagtgtaaagtgtatcggagtgcggaaaatgcgcagggcattgccaactatagatgctcggagtaattcagtgtattcagagaacacggtgaaacaaggaaaaccggcctgactggggggtgaattcagcagggagtaaatctgatcggcatcaggtctgcggaaaggagctggtgagcacgacaccacccaggcattgcctggctctctccgcggcgggctaagttaaccgcgggtccaggtgcgggccatggtcttggggagggtgctgggtgcgctcgagcaggctagcgtcgggagccgccgctgctagtgagaggccggggccacacacgctcctccccggtacctcctccagcatcaccaggggaggagagggtcggggccacaaggccgcgctaggcggacccaggacacagcccgcgcgcagcccacccgcccgccgcctgccagagctgctcggcccgcagccagggggacagcggctggtcggaggctcgcagtgctgtcggcgagaagcagtcgggtttggagcgcttgggtcgcgttggtgcgcggtggaacgcgcccagggaccccagttcccgcgagcagctccg

SEQ ID NO: 36343 - DNA, 2300 bp, Homo sapien
cttgctgaactcccacagtcctctgtatttgcctaatagggtagcactttttgttgttatttccttatcctccagggaaggactgtgtcttattcatccttgaaatggtacctgacatacagctggccctcacctcagtaaacactattcaaatttaaaaaaaaacgttgagcgcatggcaaggcacagtggctcacacctgtaaccctggcactttgagaggctgaggcaggaagatcgcttgagcctaggagttcaagaccaacctgggcaacatagtgagacactgtctctacaaaaaataaaaataaaaaatttagccaggtgtggtgatatgtgtctgtgatcctagctacttgggaagctgaggtaggaggattgcttgagcctgggaggtaaaggcggcagtgagctgtgatcatgccactgcacttcagcctgagtgacagagtgagaccatatctccagaaaagaaaaaaaaaagaaagaaagaaaagaaaagaaaaagaaattgagcacattattacaatttaatatcttgattgaagggaagaggtgagacatcagtttcattcatattaaagaggaaataggtactgttatgtcaatgggaaatgagaggaggaattaaatgtaggaaacagaataacaaagaaccaactcataaaaaactaaaacaacccatatcagacacaccttataatctgtatgtctgtgttgacttatcctcttggaatgtgaggaatattctttattaattttacttactgggttgccagatataatacaggaagcccagttaaatctgaatttcagataaacaacaaataactttttagtatatgtcccaaatattgcatggggcatatttatactaaaaaactatttattgtttatctgacattcaaatttcaccagatgttctgcatttttatttgctaaatctgggcactcttcactgggcatcttctcagggcactaacctgccaaatgccaactgctgtggggctgctcagagaatatgacctaatgacaatgggagatgacatgttgctggcaatgagagaagtgaataaaatgttgcatacttgttttcaggagctgttctcaaagcttaccacctttttagtgtgggattaggtcttcaacttcaactttgtcttcacctttgtcttaaggtcaaaagaagacgttagagatgtctttggtagggcataatgtatccttttagattgatatttgtgggccatttgttttacagggggttagtccaggaagtacaagacaatgtcattaggcggatagagttccatttaaattaaaaataaaatctattgttaggtttaaatgagtcactgcttcattaagctatcaatattagataacacatattgaatgaatgtttcccataggccaagctctgtcccaagcatttcacatgtatttgcatttcgtgctcacaaactgcctctgactgactgattttgattttcttgattttatggatgaggagaccgagaagcagagatgatgaacttccccaaggtcacaccactcataagtgggagaaacaagctaaaattcaggccatcttactgcagaatactcaaaatcaaaataagcaaaatttcatctccagttctggcacctcaccaaaaaccaaaacacgatttaaaaatataaaattttaataacaccacacataaatttcaaactactttccctaagtttctagctgaagttttaaatgagtgtgtttttaatttattagaaagtggattgaagagaaaacattggaagatgaaggaaggcgtttcagttaaaccccaaataactctgtgttacactgagctatgaaacggctccttctagctccatttctcctcagacctaagtgctattcctgattgtccttcattgtcatttccagggagaaatgacaccagcacagtggcaggccttccaatctggagcacggtccacacaacttccgaattggtgttcagtgtaaagtgtatcggagtgcggaaaatgcgcagggcattgccaactatagatgctcggagtaattcagtgtattcagagaacacggtgaaacaaggaaaaccggcctgactggggggtgaattcagcagggagtaaatctgatcggcatcaggtctgcggaaaggagctggtgagcacgacaccacccaggcattgcctggctctctccgcggcgggctaagttaaccgcgggtccaggtgcgggccatggtcttggggagggtgctgggtgcgctcgagcaggctagcgtcgg

SEQ ID NO: 36344 - DNA, 2300 bp, Homo sapien
gaagtaggagtaggaaatagcactggaggatggtttgaggccaggtagcccgtgagtttagacataattctgtgtgcagtgggagccaccaatagttttagggtaggtgacaggcaggcactaaccacaggagctaaggtctaaggacacactcatgccacacacatgaggcaaactgagaggcaaatgcatgcggcaggaaaggaaataaatgatacagaagtctatgggattactcgctaggaataaagagttacatagaatttcctaagtggcatgtctctcccacagttgttttctgccatggaattggccaaaatgtcagacatgacaaagcttcaccaagctgtggctgcaggagactacagcttagtgaagaagattttgaagaaaggtctctgtgacccaaactacaaagatgtagactggaatgaccggaccccacttcactgggctgcaatcaaaggtgagtgggcaatgcttaggtagatctgcccttttgagtccaccattcatgaggctatcaatcagtaggctatgtgggggagtggaacaaacatttctttagagccagttggaaacttcatttcattttttttctttttttgagacagagtctcgctctgtcatccaggctggagtgcagtggcacaatctcagctcactataacctccacctcctgggttcaagcgattctcctgcctcagcctaccgagtagctgggattacaggcatgtgccaccacgactagtgaatttttgtatttttaatggagaaggtgtttctttatgttggccaggctgctctcaaactcctgacctccagtgatccacccacctcagtctcccaaagtgctgggattacaggcgtgagccaccacgcctggccccagatggaacattttaatcctgatatcaccgcttactagttgtagcatcttaagcaagttatttgatatctctgggcctgtttattcacctaaataacgtgtgcaggaatgccaccttggagccctgtgatgggaattcagtaatataatgagtgtacagtgcctatcttacagtctgctctcagttaatattagtcctttgccctctcaacctctaacaggaatagagcatcacaaagaaggataggggactttgcttcattcctcattgaatcccccacgccttacatagctcagttacagaattagaggaagatagtggcaaaaactcaggctgtgggcctctcaaagcctttggcaatagaaagccattaaagaatgttaagtaagaaagtgctatggtcaactttgctttttacacatttattgtgattcttgtgtggagaatgggttgacaagaagcaagactggctgcagagaaattagttgggatatttttgcaaaaatctaagtacagagtgatggtagctataccgaaacaccttttagtgaagatttgctatgtgctgggcactgtgctgtgtacttcatgtctgtgatttcacctgcactctacaagaattcagtgatataaggggtaatatccttaatttgcaaatgaggaaattggcctcagatatttgtttcttgtctgaggtgccacttgttagcaagtgggattgtcagggtatgaaatcacatctatcaactagaaagcctgtgctcttaacctgtgttatttatcacgtaaataggacttaaaatatttggttttggctcagtgttgagactgtcaaaagcacagtgggccttaccaataggcaggtatagtgtggcttgggagagaaagcaagattcctgggcagggcctgtggcaatgcacaggggaggggagtgtcctggaaggaggacagggaaggcttgcaaggctcaggccctgggtgggaacaaggttcgtggggtgaggtagggcactgagtccctggtgagaagagggaaaagggaggaggggatgatgataggaaactggaggctcctcaaaggcaaagtttccccttctattgtgttacctagactggccctggcctcaagccacttgggacatctttatcctaacctcatcctgtttctttttggtacatctaagggcaaatggaggtgatacggctcctgatagaatatggagccaggccctgcctggttactagtgtgggctggaccccagctcattttgcagcagaagcaggccatctgaatatactcaaaactctccatgcattgcacgctgccatcgacgcccctgacttctttggagacacaccgaagaggattgcacagatctatggacagaaagcctgtgtggcatttctg

SEQ ID NO: 36345 - DNA, 2300 bp, Homo sapien
tagagaagttacgcagtgtaaccaaggttcaacaactctttgatcaggctgacttgggaatccaagcctttacctactgtgctgcctccctgtggcattgtgtctggaatttgtgggttcttggtctcactgacttcaagaatgaagccacggcccctcgtggtgagtgttacagttcaaggcggcgtgtccggagtctctgttccttctgatgttcagatgtgttcggagtttctcccttctggtgggttcgtggtctcgctggctcaggaatgaagctgcagaccttcgcggtgagtgttacagctcttaaggcaacgcgtctggacttgttcgttcctcccggtgggctcgtggtctccctggcttcaggagtgaagctgcagaccttttcggtgagtgttacagctcataaaagcagtgtggacccaaagagtgagcagtaacaagatttattgcaaagagcaaaagaacaaaacttccacaacgtggaaggggacccgagcgggttgccactgctggctccggcagcctgcttttattctcttatctggccccacccacatcctgctgattagtagagacgagtgatctgttttgacagggtgctgattggtgcgtttacaatccctgagctagatacaaaggttctccacctccccatcagattagttagatacagagtatggacacaaaggttctccaaggccccaccagagcagctagatacagagtgtccattggtgcactcacaaaccctgagctagacacagggtgctgattggtgtgtttacaaaccttgagctagacataaaggttctccaaggccccaccagagcagctagatacagagtgtagattggtgcactcacaaaccctgagctagacacagggtgctgattggtgtgtttataaaccttgagctagatagagagtgccaattggtgtatttacaatccctgagctagacataaagattctccacgtccccaccagactcaggagcccagctggcttcacgcagtggatcccgcacggggctgcaggttgagctgcctgcgggtcccgcgccatgccctcgcactcctcagcccttgggtggtctatgggactgggcgccgtggagcagggggcggggcttgtcggggaggccagggctgcacaggaacccacggaggcgggggaagactcaggcatggcaggctgcagtcccgagccctgcccctcgggaaggcagccaaggcccggtgagaaatcgagcacggcgccggtgggctggcactgctgggggacccagtacaccctccgcagccgctggcccgggtgctaagtccctcattgcccggggccggcagggccggccggctgctccgagtgcggggcccgccaagcccacgcccacccagaactccagctggcccgcaagcgccgcacgcagccccggttcccgctcgcgcctctccctccacacctccctgcaagctgagggagtgggctccagccttgggcagccagaaaggggctcccacagtgcagcggtgggctgaagggctcctcaagtgccgccaaagtgggagcccaggcagaggaggcgccgagagtgagcgagggctgtgaggactgccagcacgctgtcacctctcagcatctcttacctaggttgctccagaagtctcctacttggtctccctgcctgcatttttgccctgttccaatatgtttgcaataccactatgtcacaaccaactttacttaaggccttccagaggcttctcattgccctcaaggtaccatcaaactgatatgccctgggcatctgtgaccgggcttcatctgctttctagggtcactagggccatcgcttccccctccctgtcccagatccctcacatacaccatactccagccttgccaaacttgctttggtctctcaaacttggcataaattctcttcggtctgggccttcctaaagcagctccttggcctagtgtgtgctctctcctcctcttcttctgcttaacccagcctcccttttagttttctgttcagataccaccacctcctccaagagacctgaattcttctggtctgaattcttcagactacattatgagctccaggtaagggctcctgagatctttgggcctccccttcacattccatccccctttactgtttttgtgagttaacttattgccttctcagctgcatgggatctagcctatctgtccactttagggtgagcacctggcacctacaacagtgcttggcacattaagtgtgcctaatgtatatttgt

SEQ ID NO: 36346 - DNA, 2300 bp, Homo sapien
ggccttttatcacctcaccatcagtggcttaggtaaaacaaaaatcagccatagaacgcttctgcccatcagaagcaggcccccagttgacatgcctcctattttacagctcaagaagctctactgttcaccttctaaaagtcttttgtgacaggaaatgcttttttgacagcaggactagcccacctgcccagtagtaagtctgaggtagagagatgcaggctctagaccttgaagattgctctaatgccaaagattcttatatctggtgcaggcaagaataggtgggtgtgtgcatatatttagtattgtgctggcgcagatggagcccactgtgtacatctcttcccaacactgcattcagtgacatggtgttggtagcttgaaattgaccatggcaatcaacaaacactacaaataaaggcttggttttgtttgtttgcttgtttgtttttactttttttaaaagagccgattattaaacatttacctgtgcatggctgaatatattccataatttatcttttcttttagtataaacacattttccccattctttaccataacaaaaaaacttcaatgaatatgctatgtggaattttgtgcacatatgtgtgagttcctttagcatatagacctagaagtgaagtttctatcttatgaactgtgcacatttcaacttcattagatagcatcaaattgatgtcctactagatttcctattttcttaccttcttgttgacacttgatattgtcagtcttcttaatttatgccaatcttagcttgaggtggtattttactgctatttgaacctataatttttctgattacttacgaggctaaaaatctttttacatatttattggccatctgggtcttttgtgaatttgctactcatattttttgttcattttttccttagataatctcctgttctttttattgatttgtagaaattctttacatatcctgaatacttattcttattcaattatatgcagtatacatatcatctctcacctgtggcttgtcttttaatcatgttatgtttttgtcataaagaagtttaaattttgatacagtcaaatgtattattcttttcctctgtaatttctatgtttttttcatgtttaagcaatctttcttgacctaaaggttaaaaatatgttcctatattttcttttttgaagtttatattttcatatttaaatttttaatctatctagaatttatttttgtcaatggtatcaggtgtacatttaatgtatttcctcatatggaaatgcaattattcccacattattatgaaagagacccaagtttccctcttgcctttttggttcctcttatacataaaagccctgcatatgcttgcatctatttggatattacctattccagtctatagattcattttatctttatttttggaactattacactctaattactgtaactttaccaaagctcctgatattcttttgaggcaattcttttctctttattcagccttttcagaattttcttatctattcttcaatgtttactctttcatgcgaattgaaccatttgtcagcttggcaagttccactgaaaaccctgttagattttttactagaatgacaatgaatttatagattaatattaaaacaatctattaatatttcatacatatgtacatatagagagagagtcaggtatttttatgtccttcaataattgctttataacatttccataaaatttgaatttatattttattagaattaaataataataattttataaattatttttatttttattgttaaggggatcgtctatcctgttttatgatatgaatggctatggctgccctataggaatgttattagttcttatatgctcatttccgtattaatttttcaaacttttccccagtctttggagcttaagcatttaaggtaaacttagtgtttgtcctcgaaagagtcaatgatgttatctttgacaacctttattggcactacggtacatatggaagggtcaaagtttctaatacgaccgtcagggtaaagtctaaacggtatttatgacaaggtgtgtgctaaaatcagctcacttgcagcaatggcttggattagatccacttgcattctcttttttaccttgctttttgcccacatagcagctgtaccggtaagtcgagtcctgctttttggatatttagaaatattaattctagtatacattatccattttctgtatatttatttttttcagattaagtatcttcctgaagaaaatggtaagaattagt

SEQ ID NO: 36347 - DNA, 2300 bp, Homo sapien
ctacaagagttcaaatgaagagactttaatgaagggatacctacagaggtaaagacagggttaacaaacaaacaaataaaccaggggtgatgaggcactcagagaccagcaacatttagaagccattatcaccccctaggaaaaagaggaaacagtgcagagcccagtgagagctgaagacttagaggcgggaccagtcagcaggagctatagtcttggaaggccagagctataaccagacatgtgctcaggagaaaggggactgcagcggggagagcagtggacagcaggaaagatgtatctccacttcccaggtccaagcaattctcctgcttcagcctcccaagtagctgggattacaggcattttgggaggccgaggcggatggatcacctgagatcaggagttcaaaaccagcctggccaacatggtgaaaccccatctctactaaaaatataggcttaagatttaaaataaaataaaataaaataaaataaaatagtaaatatccctgccagcctgctgaattggccttagagagtagggtgtgtagtgggtgtgactctcactgtcaccattgctaaatgcttactggcatctttcagtcttggggacccatcctttgctaaactctgccataagaaggtcatacatccccactgcctgtgatgtctcatttttgttttctcatttcctcttacctttatgcaatcagtttctaggaagatgttgtttttttcttttttatgattgaaagaatttggttagtttgaccccataccatttcactttcagcacgtgctctctacggttaatgtcatccttggcaagcccgtcttgaacacctggaaggttttacaacagcaatggaccaatcagagttcacagctactacattcagtggaaagattttcccaagcattacagtcgggagatagccctcctttgtccttctcccaaactaatgtgcagatgagcagcatggtaatcaagtccagccacccagaaacctatcaacagaggtttgttttcccatactttgacctctggggcaatgtggtcattgacaagagctatctagaaaacttgcagtcggattcgtctattgtcaccatggctttcccaactctccaagccatccttgcccaggatatccaggaaaataactttgcagagagcttagtgatgacaaccactgtcagccacaatacaactatgccattcaggatttcaatgacttttaagaacaatagcccttcaggcggcgaaacgaagtgtgtcttctggaacttcaggcttgccaacaacacaggggggtgggacagcagtgggtgctatgtagaagaaggtgatggggacaatgtcacctgtatctgtgaccacctaacatcattctccatcctcatgtcccctgactccccagatcctagttctctcctgggaatactcctggatattatttcttatgttggggtgggcttttccatcttgagcttggcagcctgtctagttgtggaagctgtggtgtggaaatcggtgaccaagaaccggacttcttatatgcgccacacctgcatagtgaatatcgctgcctcccttctggtcgccaacacctggttcattgtggtcgctgccatccaggacaatcgctacatactctgcaagacagcctgtgtggctgccaccttcttcatccacttcttctacctcagcgtcttcttctggatgctgacactgggcctcatgctgttctatcgcctggttttcattctgcatgaaacaagcaggtccactcagaaagccattgccttctgtcttggctatggctgcccacttgccatctcggtcatcacgctgggagccacccagccccgggaagtctatacgaggaagaatgtctgttggctcaactgggaggacaccaaggccctgctggctttcgccatcccagcactgatcattgtggtggtgaacataaccatcactattgtggtcatcaccaagatcctgaggccttccattggagacaagccatgcaagcaggagaagagcagcctgtttcagatcagcaagagcattggggtcctcacaccactcttgggcctcacttggggttttggtctcaccactgtgttcccagggaccaaccttgtgttccatatcatatttgccatcctcaatgtcttccaggtgagttttacagtgcggagctttcaggaagattttattcctgtaggacaaattaatgatagaaacacaaacaagagtaggaatggggaaggatttcagcccagaggaag

SEQ ID NO: 36348 - DNA, 2300 bp, Homo sapien
tacttctctagccatcacatctagcttcccttttttgttccaattagctatcaggttgacatacatttgttccccttctgtgtgtggccttatgtcatattctgttctgaagagcatgcatggagtgcttaagggataagcacatcatcttatgggacatatttatggaaatggagcaaaaaaggaaacaacggatgtgagagattttgccaggaatggatcagctggattcgatagctgaattgattggtaaatttttttttgtgttggcttttgttttactaggctttgatcaagagcccctctcaggatgagatgctccctacatacctgaaggatctttctattagcatagacaaagcggaacatgaaatcagctcttctcctgggagtctgggagccattattaacatccttgatctgctctcaacagttccaacccaagtaaattcagaaatgatgacggtgagtttgcttaacctttgcaggagttttgggtcttaccttttcacccctcagaatttgtattcaagaaacgtaattcctccccattgcagcttctctgtcttttccagagcagtgctcaggatagttctgccagctatggcttttaggatattaggaaatgtttccagtattcattttgagaccttaagaatatttattagtgaatctctgctttattttcttcattaaaatggaataaattcatacttgctttccagaaaaactaggaattaaaggttttcagaatatacaagatgatattctcaaaggtctagcactaaatgtgaactttaaaggaatcgtgggaggataggttctggaagcatagaggttctgggaggataaagaattcacctacaagagttcaaatgaagagactttaatgaagggatacctacagaggtaaagacagggttaacaaacaaacaaataaaccaggggtgatgaggcactcagagaccagcaacatttagaagccattatcaccccctaggaaaaagaggaaacagtgcagagcccagtgagagctgaagacttagaggcgggaccagtcagcaggagctatagtcttggaaggccagagctataaccagacatgtgctcaggagaaaggggactgcagcggggagagcagtggacagcaggaaagatgtatctccacttcccaggtccaagcaattctcctgcttcagcctcccaagtagctgggattacaggcattttgggaggccgaggcggatggatcacctgagatcaggagttcaaaaccagcctggccaacatggtgaaaccccatctctactaaaaatataggcttaagatttaaaataaaataaaataaaataaaataaaatagtaaatatccctgccagcctgctgaattggccttagagagtagggtgtgtagtgggtgtgactctcactgtcaccattgctaaatgcttactggcatctttcagtcttggggacccatcctttgctaaactctgccataagaaggtcatacatccccactgcctgtgatgtctcatttttgttttctcatttcctcttacctttatgcaatcagtttctaggaagatgttgtttttttcttttttatgattgaaagaatttggttagtttgaccccataccatttcactttcagcacgtgctctctacggttaatgtcatccttggcaagcccgtcttgaacacctggaaggttttacaacagcaatggaccaatcagagttcacagctactacattcagtggaaagattttcccaagcattacagtcgggagatagccctcctttgtccttctcccaaactaatgtgcagatgagcagcatggtaatcaagtccagccacccagaaacctatcaacagaggtttgttttcccatactttgacctctggggcaatgtggtcattgacaagagctatctagaaaacttgcagtcggattcgtctattgtcaccatggctttcccaactctccaagccatccttgcccaggatatccaggaaaataactttgcagagagcttagtgatgacaaccactgtcagccacaatacaactatgccattcaggatttcaatgacttttaagaacaatagcccttcaggcggcgaaacgaagtgtgtcttctggaacttcaggcttgccaacaacacaggggggtgggacagcagtgggtgctatgtagaagaaggtgatggggacaatgtcacctgtatctgtgaccacctaacatcattctccatcctcatgtcccctgactccccagatcctagttctctcct

SEQ ID NO: 36349 - DNA, 2300 bp, Homo sapien
cccctgcccacagagatctgtgctttaccctgaactccacgcatccatgaccgccacctggggcagagctcattctgccgtcagggttgtctaccactattttctagttatctcacatcatcacaatgacaaacataatacttcctaagatgtatttaacaccctgtgccaagacaagggtagatgctgttattatccacatttcactaataagaaagcacaggcagagagaggtccagtaacttgcccaggatcacacagactttaaaggcagagcaggattcaaacccagccagctccagagtctgcacttgtccacgcaggcactgcatcatcttatcagcagagtcctgggaaactggctttgtctcagggagcgggtctctctttacccagagccgtttctctcggtgtctgtataacctcttcctattccctcctcctttccagtgaacagttcccttggctggtctccctcctcttactaagttacatttttaggaaaagatcagatgtccgcaatttaccactccatgtaaggtttacctgttcccctcgctgatgcccttaggaggtactggttgaggaatgtattaaagtcaataggaaatggggagcgactgtgtacttgatagttcataaacgttcttgaagaaataaataggggaatgatggatgatgattggaatttcaaaagcccagttgctgctttatttgcagtgaagttattttagatgtacttgaatatgcaggaactgaaggtgcaaagtcaatgtataggactgtttccagcccagcttcccttggagaatgctttggctttctgcccaggcaaaaggaaggttcttcgtgctttcctgcctccatcctctctggggcctggtggggaggagggagtggccactgggagctttctctgtccacacttcaaggcaacagttaggggactcagacaacacaggagaacttgaccgccaatggtcacctttgggcagttctcccaggtcgagttttcattctctctgctttccaataggactaaagcattgaggtcttgcctcttgtcttgtcagttacatgttaaaatcaagatatatttcaattatctaatgcagcatatttcaactctttgtaagaatcaggatcattggtctcccctgcccccagtgtgattcagtaggtctggggtgaggtgcagaaaactgccttttcaagcagcgcatccattgacatgaggccatcttttggaaacactactttctgaagatttccggaatctttatggtgatcatctggaactttcaggccacatctttgcaagtgccgcttccacagctctgtcacctacagcctcttcgttgtccagtgggagcagcctacttactattttaagccctacaatcattggagataatggagggaaaagcacattgatggcaatgaagcctctgaggagttgggatggagatgggtaaatgctcttggccatccccagattcaaggagttacaaagatctggctgccaagtcaccggacctgatttgaatagagcaaatggtcacaccaagaagtgaatcccacagtttcagatttttaggagatgtcattcactccctcgaatcctctgtttcttacattatgaaaaataataagtgctgaggcatgtcaggtgctcagtgcagtctctggtagtggtgagtgtcgtgtatcctgccggcatggggctcactggggaccagccttaccatcctgagtcctcatgttatcgcagtttggggaactgtgggactccagcacttgcctttcctcttacactttgggtgctgggtagatctcacaagggagcacaggtttgccagggctcccagtgctcggcagtgtatttacttcagacaagaaaacagagcttccaattggacctcccctgcctgctccatctgtgtagaggtccccaggggactgtctgagccacagtggacagagctgtccagagggaatttcctgaaggcaaagcttcagccggaaaagacaaggtcaccaattccaggaagtgccccacctgtcggacatgatgacttcacaaataattgtagtggtggtggggcagggtggcctggagtgggggtgggtagtcagtcaggaatgagaggtggctttttattcatgaagaagaaaattcccagggaacaggatggcaaacgagaaggtaagcaaaggctcctgctttcccaaatcttaaccctactcacccgagccctgccacacatgcctctttttcttgacctgaaacttccaattta

SEQ ID NO: 36350 - DNA, 2300 bp, Homo sapien
gacaaacttggccacttgccaagtgtgtttgtttagccaaggctcagtttcttcatctgtaaaatgaagatgatgatacttctcataaacaggattataaagattaaatgagtctagtgcatgtatagtgcttaacctaatgcttgccatatggcaagtgtctgacacacagcaagtgcttgataaattatagtaattgttgttaccaaatgaataagcaagacctgaaataatgagtaaagctcagaaaggagaaatagagcatttcagttaccaagaatagcgcgagaagaagctgcaaggtagcaatgcattccactaatattgtctcttaatatttatgacaaaagaaggtacaataaaagctgggagtgggtcagtttgctctatactcaagtgttatgggagaaaaattgacagagctcattttacattaggtcgtggtgatcatgcttgcctggtgaattggcttaaatattctctgggcatttgcaaacatttaaagtatttaaatatgatctagccacaatttaggaagaatagtgctctgggcaaataaattccctgctgttgtgttggattattggtcagggaagaaaggagcgaggggcccattcaggagattattgagaccatctagatgtaagatgataatgtcccaaccaatgtagtggcccaatgtccaaaaaagtgtggtgagatgacaatatccaaaccgatgaggggctctgagcacatcagcagcaggtaacaggacttagtacccggtcgaattgctgcttctgctcctgcaccacttcttgtgtccaaggacacctgtgaagctgtgagcctaggaaacaatgaagccagcagttggcacatctgggaagggatgggttaggagagagcagtgggacaggagacaagttcagttttcgatgatctgaatttacactcaagtggaaagagtatagttgaaaagccatgcctaatatgtagcaaagagaggaaataggcatgcagaggaaagagatatctttggggacaagaaaagaggcaatatgccataaaggtcagaggctggaaatacagttctgggaattctcacataaactgacaattaaaactatggaagtggatgagcttactataagaaggtgtcaagagagaagagctgtagacccaggagaggtatttggcagggcgcacagtgaggcagctgcaggatgatgaggatgggagcatagaaggagaaaaggcataagctcgggagccttgagaaccaggaaagggaaagggaaagggagcgctgcagaggaggaggccatgcacaaatggagcaggtacccaccgcaagccagggagagtgaggactggggcaaatgttgtgggtttgcctctacagaatacttttcataatgaggtgaggactaaagtcaaactgtccagagtaaggaaatcttgaactagcaaggacttttcagggtactgtatttcttggggttgggggtggggggataaagtaatattttttttttcattctgaatagcacacacattatatggttaaaatctaacaaaatccctgaagaaggaaatgaagatttagaagagaagtcattggctaaggacagcaaagccatttctcagagagatggaatggatgggggccataaagggaggaagtgcagaaggctaaggtggccctgccaattactgtaatgttggaatattttaagccacattgcaaataactgcttcctccagcccctggagtgcctccccacctcttctttagtcatccagtccctttcctgggatcctacacagacttccctacaatccagcaatgacactgctaaggtctagcccagcaggagacccccaggccctgctcctgcacagtggacagagattgttctgattggtccattattattattattattattattattaaaatagtcaagtattattttggagcttacctaacacatggtagaaccacagaactgtgaagcttgagaacaacctaatgtaaaatgagctttgccaagttttctcacataacatttgagtatagaacaaactgggccgggtgcagtggctcacgtctataatcccagcactttgggaggccgagatgggcggatcacttgaggtcaggagttcaagaccagcctggccaatatggtgaaaccccatctctactaaaaatacaaaaatcagccgggcatggtggcatgttcctgtagtctcagctacttgggaggctgaggcaggagaatcgcttgaaccccagagtcagaggttgcagt

SEQ ID NO: 36351 - DNA, 2300 bp, Homo sapien
ctgagaaagtaggagctttgtctctaatgagactgtaccttacagccatgagagacatttcatattaacaaagtgataacatgactggtaaattattctctctacgtttgcagttgggttcaagaaatttgggttcagccaccaacaccaacgttttagaattcaagaaaacggctgctgtgacagtcaattccagccgtagctacgacagggcagggtctctccatccacagttcattctgggttgccgctgaggccatatggtggttgcattttttatttgcttttgttttcattgtaatgtgtgtgcagcaagcacatagtgttcctaacaacaagcagggaactgtgggcgagaagaattgctcctcagggaaggaaagggacagccactttgacaacgcccattccatgttagacagcctgctgcacccaacaaccaaaatacgagcaggaaaaaaggcagcatttgcccaggaactgcatccctcagcaggctctttttaagttagggtgtatccaatctaacgtgtagactacagttgagaatcattatctagaagtggaataataacattttggagttcatcctcttcttgcccaaatactctggtctcaagcctaagtcctgctggtggttgctgacttgctacaggctgatagcatgacaagaagggaaggcagctggaggggagagaggatgaacttggaggcattggagcccagggctccagagaacaacaaacagttactaaactcttcctcttcagtttcagcagagtctataaactcagtactattattatcccactttcacacacaataaaactgaatctcagggccaggagcagtggctcacgcctgtaatcccagcactttgggaggccgaggctggggattacctgaggtcaggagtttgagaccagcctggccaacatggagagaccctgtctctattaaaaatacaaaaattagccagatgtgctggtaggcacctacagtcccagctactgggaaagctgaggcaggagaatcgcttgaacccaggaggcagaggttgcagtgagccaagatcgcgccactggactctagcctgggagacagagcgagactccgtctaaaaacaaaacaacactgaatctcaatagggtcaagtaatgtgtacccggccacatataattggtgggactaaagcatcagttcctacagtctgactccagagtcctttctttgacactatgaggaattccctgaagatactcttgggactacctgcatgggactcacccgaagcacttatttccaatgccgattccaagccaggcctcattcatcaaactttctgtgggcagagctccagagtagagagtcaaacagcattccccatccgtgttctgaccttgggaagggttctccttgggcctcagtttcctcttttgtaaaatgaggatcagtgaggtcacttccagttcaaaaatgagctgactataattcatctttaaacccagcaacctggatgcagcctgccaaccaggcctttaccatatatctccttatctttaaatatccatgctattgagcggtattttaagtaccactaaatttatagtttgatacacaaatactcacagagtttccctggaaacctaggagaactggacgtccctccaatatggcatttttgaggtacagccctcccgcgggggaggactaagcaacttctctaggtctcttctcttctgcggattctttttttctctgctttcttggcactgctaaagacaaagaattcatcgatagtcttaattttccttcctctctgaagttacaatctaatttagtggtcatcttttaaaagttgaaaccagacatcctgtacttctcattagctctaacctatgtttggtttgctctggttttgcttttctgatttttttctttggagaaagaaaagtgagaactaggggcattggccaaacaagtctgtccacttggtggagaggtttccagataagaaggatctgaaggacttcccatgggcgtgagggaaatcgcacacgccatccggggaagaggaccaggaaatcactttttgtttttaaaacagcagcgcggctctcagggatgactctgtgagactgggaggatcatagctgggggaggctgagcgtgggagcggtgctgccagtcctgcctgaaaacgcgaaatgagtcttgcttggttctccctccactgggcgtgagagcccctgcccaggaggcccaggacaaatggccccatagtggaaactgggaagctt

SEQ ID NO: 36352 - DNA, 2300 bp, Homo sapien
ttcttcccacttctcctgtctttatccttcctcccatatccctccctcctcttttcctctttcctttccactgccccttctttctccctctctctcccctcacctccaacagactcccatttcattcacccttgctaactttagtcctccttcttgtgggcattatctaagacttcactttttgaatagaggttgttgcctgcttataataatctctgtgaggcagcaatacacagcatatgacaaactgcagcattttcataatattcagcaatagctccgcaatatcacccgtgaagttgctccactttgtaaaactataacaacagtcttgtgttttcctctaagtcatatattctcctttccctaacatgtaataactgtaattaatttgattttattttgtaaattaatcaaaaataatttgattttatttttaaattaatcaaaaattaatttgattttattttgagaccaggctggtctcaaactcctgggatccaacaatcctcctgcctcagccaccggagtagctgggacttgtacaagtgcgcaccatcgcacccagcaataactgtagttgatgacgctcctcctcctaacattaaacccacacaaaccagacactgctgggtcctggatgctagggatataatggtgaagcagacacagtccttgacctcacagagggacagcccagcaggagacagagagacaagtaggcaggcttccttgctttagtgttatgagagagacaagcatggtttgcttggaagaacaccaaaggggcccagaaattggaaaatgcattctgaaggatgtcagattcaaggaattggatcttggaggggaggacatacttcattgagtggagagaggtggggaaggagggaatgagaaagggcatgaggagagcacaggtgaaagtgggctttgagggaaagtagaagagattggccattgtgcatttaagggtttgacctatatccttaagctcctgaaagattttaagcatgggaatcccaccatgaagatggcatttgagagacattaccctggttgctgagaggagaatggataggaagtgagggaaaatatgggcaaggagaccactgtgtgatttttactcagtgatgtgtttgtggtctttgcctgctcacacccgcaacccagcatccaccctcctccccctctgctgccttgcagcagcttccaagtgtgctgctgttggaggactgactgtcaccctgctgaacacaatggaggtagtccaggtctctcaacaactcagcttgtgaaaatccacatggcccagagttcccacgttctttctacagccaggactggcttggtgagtctacggcctggtacagttgcatagagccctgtgctccagagagtccccacacttgctttaatgttctattgtcaccatcttgaaattcttaattttcaaatgagtggcatcacattttcattttacatgaaaccccataaataatgtagagggtcctacttcactccacggatggtggcctcctgataattctttaaactctaaggcaaaatggcctgagggctttggagtcagtccaagattaagaaagatcagactttccaaagacagagcttagggggtcttgcctgaggctgggaatggattcttccagggcctgttctaacctgcctgtcatcagctgctctgtaatatgacatctggactggggccagaatatgctccagctcagtggaagaagatgaggacattcttgacttttacagagttaaacacttagaggaacttcaggaagaaagcacttggtaaaaggtaaagttggctggcccatcagctccttgcctggggtcctgctgcttcttttcacagttctcagtatgtttattctcttctttccagtggccagaggacaagtttcctgtttcctctagggagcctggagagaggcatcaggcaccaaatataggaaatcatgtggagaggatctcttatttattacagtccccatattacttccctcccccaagcccccgccccccacctccagtcagtcagtgtctcccgtcttcttcctgcagcagagaacagaaggcagttcacctctgctcccgacagcctgggaacccgcaagagccccagcatttgaagtctggtcttgtgaaaccccaccctcctctggctgtgtgattgaatgggatgccctcgaggttcacctcacctgagagggttttgggcagatcagcagtaaggtgttaaattttagaagcctgaaaactccagaaga

SEQ ID NO: 36353 - DNA, 2300 bp, Homo sapien
atggtagagcagcaactaagctggcctcagaagtccagaagacctgggaattaaagagaagagtgaaggtgtgagtcataagccagcaggcttagtacaagtaaggatatatctataccagaaattagggcaaggagtgggtcagacaaaggtgaaccatataaaatgactgaactgcaatggaccttaaggggcatctggtttaccaacctcattttgcagatcagaaaacaaaagaccaaggggccaatagttcctctggtagcaatagttttgaattagaagcatggtcacttgattcctagtccagtgctgtattagtctgttctcacattgttataaagaactatttgagactgggtagtttataaagaaaagaggtttgactcacagttatgcaggatgtacaaaaggcatatctggggaggcctcaggaaacttacaatcatggtgggaggcgaaagggaagtaagcacatccttatatggtgacaggagagagagagagagagagagagagaaagagagagatggagagagaatgggggagatgctacacacttttaaacaaccagatcttgtgagaactgtatcatgagacagcacttgggggatggtgctaaaccattagaaaccacctccatgatccaatcatctcccaccaagccccacctccaacattgggaattataactcgacataagatttgggtggggacacagagccaaaccacatcaggtgctatgccctccacatgatgctctcttaggaaggttcaagtattaagacaagtaagacagaaagaaggaaataaatatctaggaatcagaagaactcaagtcacagaaaagaaggaccccaagaccagttcacagatactgttcagcaagtagatttccatattgagcagaacttctattccagccagagaccttgcttctgctgctgcagtagaaaaccccagaatagtattcatcagaggactgtggaatgtttacttctccctttgtggatctcagtttcctcatctgtaaactggggaaggggattagattctggggtttcttcttgctcttgccttcgttgcctcaattctggacatgagcaatagttgagactagttcgctccaggcagatcccaggtggcttgaacagaaaacagcattgtcagttgagaagaacaagaaggaaaatggcgggcacttgggcgcctgagtggacttaatgttgagtggaaggggactgccttcctttgctgctttccaagttagcctggtgtagtaaaagtagatgggagcctcaagaaagaagtaaaattccaaatctagggccgggtgcagtggctcatgcctgtaatcctagcactttgggaggccaagccgggcagatcatgaggtcaagagttcaagaccagcctggccaacatggtgaaacccctgtttctactaaggatacaaaaacaattagctgggcgtggtggtgcatgccggtaatcccagctacttgggaggctgaggcaggagaatcccttgaacctgggaggcagaggttgcagtgagctgagatcatgccaccgcactccagcctggctgacagagcaagactccatctcgaaaaaaataaaaaaaacaaatcttgtgacaaaacgggggctggcacaagcccagtagtcaaatctccatgtatgtttctctctcttcccatcttacaacgcattctcagtgtagcgtggtgaacataacaggattactaccagtagacctaccctaacattttccgctgagtgctctttggaaggtcattaaatctcattgaacatgagtttctgtataattaagataataatttatatgaaaatgatttttagtaaatctttgcaagtttcagtttccttagctataaaatgaaaataataatggcacctccctcaaaggatattgaaagaattcaatgaatgaaaataataatggtacctccctcaaaggatgttgaaagaattcaatgaatccctggtaaagcacctagtgcaatgtctaaaatatagaaatcactgaataacagcctttgttactattgttatgtaattatcctacattagaacacaccatacaaatgttagttctatatggccaagacatctgatttaaatttgatgaaacacagcatgtcattgttttctagaacttaaccattttcgcttctagaatttcagtatgattgtaggcaatgccactgaggcagctgtgtcatccttcgtgcaaaatctttctgtcatcattcggcaaaacccatcaaccacag

SEQ ID NO: 36354 - DNA, 2300 bp, Homo sapien
ggcacaaagaggcagaacggatcactctgcaggcaccaaaactgttatcccatttgaaagctccagcactataaactgtggtctaaatagttcctgggaattcaaattaaaaaatccttccctagaggtgaagaaaaagtggccgggcatggtggcttatgcctgtaatcccagtattttgggagtccgaagcaggcggatcacttgaggtctggagtttgagaccagcctgaccaacatggtgacatcccatctcgactaaaaatacaaaaattagccaggcgttgtgatgcacgcctgtaatgccagctactcatgaggctgaggcaggagaatcgcttgaacccggaaggtgaaggttgcagtgagccgagatcatgccactgcactccagcctgggcaacagagagaaactccatctcaaaaaaaaagagtgaagaaaaagtggaaaaggggctggaaggggcacaacccccactctgcaatgtgactgtgcttcatgagggtattgcaaaatcagtttagtagaatatagcaatttactaataaaatgaaataaaaacaagtagaaaatatccaaggtacacacacacacacacacacacacacacacacacacacacacatattcatgttatcacatatctttctttctatgggatcctgtcaagaaagtttgtaaaacactgctcgagagaaaaatattcatcacttttagaaagcagaaagcgcaggcgggaaggaatagaactcacagcagataagctgtggggaaacaagaccctgaagaataatctagagcccaggctgctgccaaagaattttaaagcaatagattttcaaggagtctttggcaaacaggaaggtggggcataagaggaccattcatccgaaaggaaaaggtaaattcaaaagctgtacatgtcacgttgcctatttttcatgctcccctagaaagccctagaaaaggtctctgctgagacataggccacctctatggtagttcttccctgtctctaatgccttttctcggctttttagattagagggcagtgtggggtggcactggagaaatagcagggtttgtatgaagtttaagcacacccaggaagcaaggtaagggctggatggagagccctactctgtgtactctggactgctaagcaaggacacttattccactggaggactcttgagtttgggaatcaaactttctcatcttctcctgtgagatgtaaaagaaacattgagaggccagaagaaggtattcctttaagttctatcaatgctgtggagtaaaacttagcaatgatgtaaccgttctgtgttgagctacccaatatggtagcccctggccacatgtggcccctgagcactggaaatgtggtcaatgtgactgagcaactgaattttaaatttaatttaattttaactgtaattgaaatttagatagccacacatggctaatggctactgtattagacagaacaattctaacattttgtgatttttttgatgcaaaataacctgggtataagtgattaatcttgtgaccaggtctatgtactgagttttatctaaattatttgagataaccataaactcgaggacatctttttgctaattatatctactatgaaaaaggaaattttctggattgattcattattatttatatgcttaaacactcaaattatatcctggtattaatggtttacagagtctttggttattttaatgtttttctttcctgaaatgaaaaggaaacctcagtgaaatataaaagactgatgttaaatgcacctaattgcaatgttaagcaagtcacgattaaaaaaaaaaaacctgtgtttagtcagataccatcacttggaagagagctctagagcagttttctagtaagtttgtaatgatggaaatttactacatctgcaatgggagcagaagtcatgatgtcacaggttccgtggagtggaaacataaacacccaggggttcggatcagctcagtgaggccttaccactttgtgcatttttacattttggcttgaatttcttgtttttgtgcctctaccttacctggtaccctgcttgtttagtcacagactatgcacccgactgctgctgttcagtccagggaaaatgaaagttggagtgctgtggctcatttctttcttcaccttcactgacggccacggtggcttcctgggggtgagttggtgctatgtctcatatctcttctcaactaactctcctctctcgttccggcacttttagaacccctcactctctaggggactg

SEQ ID NO: 36355 - DNA, 2300 bp, Homo sapien
aatgcattcatctgtttggattcagattttctccaaaatcaatgtgctcatggaatcattgatgtctaccggttgcctcacctactagtgtctgctaaagtgtttttggtctaatgagacaatgtagggtttcctttggttctgagggccataccttggccctaggaagttgttgggctgcagtgacacaatgagccaaaggtggataacagagcttccatctcagcttcaagccctcaccaccttaaactccacactagttggtcatttcaactgtttccacccaattccatggccactttcttgctctagtgattagtagattattaattccattttataaacacattcttactaggatgtcagtgaattactttaaacacttgtaatttaatatagacaataggaaaggggtggcactgaactgagaagatggcatctctcatcttaaaactttagacattggacctactgagtaagagtatgtatgtctggaagtctttatcctttcggaattgaaatttggtctacagttataattggtggactgtgaaacaggcaaaaccctacagaaaacaagcagaaggagaatggaattaactcgactagattatgagattagcttttttccacccaggctgatgggggacaaaggaacaatggttgaagcttgagtctacctgacaattggggtttgtcaggtaagccccattctcttgataactttttcagtgggctagacccagacccaatcatgttaagtatgatagggatcagtggcccagctggtgtggaagacaagtgggtcatactgggtttaggcccacatagcactaaaggtcttcaacatgcaattagaagctcaaatgttgacgggaatattgttcactctaaaaaagatgtttctattagaatttacttactctttcatgaaaacatagatgcttcctctttcctgattgtgagaacagtgtacctgactagcttccccttttctttaactgttaggaagttctgtcctagagataagtttcaaatttatgaaacaataatttcagggattattatttgcatcacttttcttaattgactctttatagtttccttttttatagtttatatagaggttttataatgattttaaaatttttattctcacactattttattttatgcattaacattgtaagccagctcaagtcatttgtaaaacgtggagtgcttaaaagaaacaaaagaaaattaataaattaattgaattcagagacatcctttgctttcttttcagtggcatttttgagaattaacatattattatccccttcattattccataacagaattacaaattgctaatttagacgtggttgttagtagctcattaccttgaccaaaagtaatttatgagccaatgtggctaaagatacagcacataataatcttgacctttcatagttttcaaactggatgactccttggaaagaaaacaaatctttactaaagaagttaatcaggtttcactctaggttttctaagcacaaaaaacacaccaaaagcattcaccccagcatccaccctgttgctgtcttttgccacagctcctttggtactaccccacccagaagtctgaggttgttttatctgggaaagtagctagttgattctttagtcttaaataaaaaagttggaaaaggaaaaacagtatctacccttatttctgccccacaggaattacccacctctcctcattggaattatgcatgaagggctgcattccttcagctttatagggtatgacccagtgtgttcagaggttggacaggaagatttgatggagtagcattttgtagtaaaccgatctagggcaaaagtgttccacattcccctagagcttttctctcccatttcccttctgtgatttcagacacccatttatgtctgctgggagaatcattaagtcttgagctctgtgctccttcctcttaccagacctgatagtgactttaagcgggagggggagttaggagaaaagtattttgtttccttcttgaagggggtgtgtcccaggcttgtctacctgcacaggcagtaatgcgtgccaggaattgctgatggatcagtgagcctgtgttcatgccagtgagctgctgtggctcagatactgatactttctttccaaacagcataagaagtgattgagccacaagtatactgaaggaagggctccctcgagttctggtgtgaagagataaatcaccaggtaagcccaataactgtactttgattactaagaacgtgta

SEQ ID NO: 36356 - DNA, 2300 bp, Homo sapien
ctctccaaagcagtgtaacacagagattagctctgttttcaaacaagcagttggaatgatacaatgtgtacattttgtgcctgacttcctttactcaacattacgtttgtaagatttatccatgttactatgtggagctgtattagttcattttcattgttgtataatgcattatatgaccaaatgacaattatttatcctttctgccaacaaacgtgtgctgtttccaccttgggaatgttttaaatagttttgctataagcgttgttgcataccttctggtgcacatatatacacatttccattaggcatgtgtgtatatactaggagtaggatttctgggtcatagcgtatacattttcaacttctgtaaagagtaccaaccagctttcaaagtgtgtgttgcaatttatgcctttatcagaaatgtatgagaattccagttgcttctcatactcaccaagacttaattttatcagatagtctttttaactttagccattctggagtatatagtactatttcaatatggttttaatatgcatttccttaattaataatgaagttttacgtttttgtcctttattggctatttgaatattcacttttataaaatgcctgctcaagtttttcacccatttttatcttgtgttgattttctaggagtcctttacatattctgtccacaacccctttgtcagttataagagtagcatacatgacttgagccacaaaatatgtgtataaatttgaaatgtaaatttcaactgatttcttacaggtttagttaccatttcagttttatagtatagaactaagctaaacaaagtattttacaaatctgtgataaataattcttaaatagaaagagtacattttttattaaaatacatcttctaaagacaagaacagggcaagttttttttttaattagctcccttatccttaaatgaataaaatacccaatgttaaaaagtcagcaagttattttcctgttgcatttggattttgactagtatacaatttttcttttctttttttttttttttttttttttttttgagaaagagtttcactcttgtcacccaggctggagtgcaatggtttgatcttggctcattgcaacctccacctcctgggttcaagcgattatcatgcctcagtctcctgagtagctgggattacaggcatgcaccaccaagcctagttaatttcttatttttcgtagagatggggttttaccatgtcagccaggctggtctcgaacacctgacctcaggtgatctgcgtgccttagcctctaaaaatgcaggtgtgcaaaaattacagatgtgatgtaaggcaaattttgcaaattgcaaattttgcaaatgcaaaaattacaggtgtgagccagtgcgcccagccatatataacattttaaatctcagctacaaagtgttttcacatacatattctcaactgatttttataatcaatttgagatgcattgtcagtttcattttacaaatggaaaaaaaggaagctgaggcaaaggtcaggcagtgaaaccaaagcatcacagccagtagatcaagctgtagggtgggatccaagtcttcgtttctctcgttctactgtgttgcagcatgctgtcaagaggatgcagtcctggtcggatctttaacaggaatgatgatggtggtgctggaattgttggccctttttctgctctgctcctatgtaacatcttcttggtttttgttcctttccctccccttctgtttctttcagcttggattccttagcaccaccacagctcagccagaacagaaggcctcgaatctcattggcacataccgccatgttgaccgtgccaccggccaggtgctaacctgtgacaagtgtccagcaggaacctatgtctctgagcattgtaccaacacaagcctgcgcgtctgcagcagttgccctgtggggacctttaccaggcatgagaatggcatagagaaatgccatgactgtagtcagccatgcccatggccaatgattgagaaattaccttgtgctgccttgactgaccgagaatgcacttgcccacctggcatgttccagtctaacgctacctgtgccccccatacggtgtgtcctgtgggttggggtgtgcggaagaaagggacagagactgaggatgtgcggtgtaagcagtgtgctcggggtaccttctcagatgtgccttctagtgtgatgaaatgcaaagcatacacagactgtctgagtcagaacctggtggtgatcaagccggggaccaaggagacaga

SEQ ID NO: 36357 - DNA, 2300 bp, Homo sapien
acatgtctaagttaccacattgaaaatgtggcaatgaattatttaatggttgcagcattgttacttcaaaatggaaggcatgtatacatttcaattcaaagtaataaaatttcacactgcatctagattcaaattatctataatctatcactctatagagggacatgtatttaaatgttagtagtaaacagaattgagtaaattttttcatctctcaaaatgtatattaaatttcaacttgatatgatcaatggaacaccaggaattcatgaagtttcaaagtggtccaagcacaaataaacaattttcttttagttttaggaagacaaatagttgagaagaacttcttatacctgcatagtaacccagacactaaactctaaagttgcccaactctttagagcaaatcaatcatatattaccacgaaaaatgtgagtttggatgcaaggagtaaaatggactaaataaaaacgtatttgaagctcctcctcctctttaatacctatgtaacttcttaaaaaaaaacaacccaaccttataatagtattggccagtcatttgaatttttgaagaaaaaattgatacagttatgcatgaaaacacagcatctatccctcactctttcaacttctgaaaatagctagagagtggcaagtccaaccatcatcctttccccaaaactccataattaatggtaatattttctagaactcctttgaatttcactagaggttatatattgtagcttttttcccactctaacatttatagacaatactgacaaatgtttgaaataatagattggaattaaccctcatattaattttagcttctaccaaagtgtgcatagagcaaagaatcaaaggacaacatgttaactaataaagcaaataattggtacctatgacttagcaagttacctttattagcactgggtgttggatcttgaaactgatagtttaaaaagtgtgattcttttgaaatgggaccaaaggagcctaggataagcccagcaccatagggctcccaattgaggggtgtggactggatggctgaagaggtaatatcaatacagtgtgccatgtgctgtcagtacctagatgatggataacacgataccagaaatggtggccacagtcaggagactcggccttcccccaggtgaaacaaagaaaaggataacagctgctctcttacattcagaagtgtgtgagataccaacatccacgagaatattccagttctccttctgaagcagaatactacctattctaccacccacatcctgacaaggcctttggaaatcaactcaaaaatttttagcattattttttgggggaagggtgattaaaaaaaatctcagggataatccgattcaaaactcttgatttttaaattaggaaaatgcatcttttgatacatttcaaggagttcaaaagtccctccaagaccatccatggacccaacaccaatgactctgggttttaaatccttttagtttggatttccttaattgcattcataagcccatattaaaattaaaatataaaaaattaaaatctttgccccatattaaaatcaccctgaaaacttaaaaaacaaacaaacaacaacaacaacaaacctcaatgcccagaccagatcctgtcctgttccaattaaatcagagtctctagaggtgggacccaagaatcaatatatatgttttgaactctccaggtgattccacagggcagcaaagtttgagaagcaacacacaggtctcctttttcgtcacgcagttgatctaagtgctctgtggtctattcaccatcgctctctgatttaatcatcgtgtccgaaacaatggaaaggcgtatgtagctgaaataatttagttggaattatctcggaaaaaataagtaaagttagatcaggagtgagatgctttctcagcgctttccctgggtcaacaggcgcgtgcaatttcctcagcgaacgccaaggggcaccctctccctccccgctctacctggaacgccttcgcctttccaaccgcacaaagagcccggcctcctcccgggtgacatcacaaagggccggtcccccgccccttcggcgccaccacgtgtgtccctgcgcccggtggccaccgactcagtccctcgccgaccagtctgggcagcggaggagggtggttggcagtggctggaagcttcgctatgggaagtcgttcctttgctctctcgcgcccagtcctcctccctggttctcctcagccgctgtcggaggagagcacccggagacgcgggctgcagtc

SEQ ID NO: 36358 - DNA, 2300 bp, Homo sapien
cctttcatgaatccttcttagcccatcaccagcctcattcttccaaatcgtaaatggccttccttatgggctgcttgagccacacacatttcttaaaggctcagaaatactctgtttgcatatccacttccattcctcagttctaggactcctccagactgaattattgccttccccaagctttcgttcaactcataccttctctttacagcttgctttgcccacagtaatttattttcctttaaattctcaagcatttgaccctcactacctcatactgttaattaactttgtgttcgtatctcacccccctagaagaatgcaaaatctctgaggattagcgctgtactttagctttttatttttttgcttggtaggggacaacgaacataatgctgaacacatatttgttacctaaaaaaggcacatgttccatgatgtcaatgtaatcttgtttaggtgagtatattcaacttttttcttttatcctttttggctgctgtttgtgagtttgatcattcttgttataaaattaccacatgtaaccttttgagaagcattagaagaattaaaagatggcaaaagcaggcctataggaaatagtggtaatggatacgtccaaggttactactatgggccactgtgctctgcattgcaagatttgtttgaacatactcaagaaattgaagttcagacaggttaatttatccaaggtcccacaaaaagtaaatggctgtgctgagtttcaaggacccatgtctgcctggatccaaagggcaagtcagtttcagtgctggatgactgagaattacaaaatttcttgaaaaagcactaggcacaatagttggcgttcaacaaacgctcacacacacatctgccctggaattgggtctacttaaacagaagggggaaaaaaagcttgctgaaataattatacttcttcgtaactaccaagctcatgtttgactgactatagtaatcctatgccctccttcacattgacgctagaaaaaatgcctggcagtatttcaaatcatgatgcctatttttctctcgatcaagtaacaactcaaattatactttaaaaagaaaaaaagcaaattataaagttgcattcagctgacaagagactaaaggaatctgtgaaacagaatttatttgatgcctaggtttctccctcacccgacgaagaccaaatgctgctgatccgtaagtaacttcgcaaggtaaactgaggggcctggcagcatctgggcctcccttaaaggtcgaaatcaagtgcgctcgccctccttctgtccgccttttccctttaaggtcctcgaggctgcttcgctgcagaaagtaactccgcgtcgccgccgcggaaagtggggcaactttgcctatcagcagaaaccttttgatccatctgaggcgacaaaccagaccaaacgcccgcccaagctgttccgagcctccggggggagagcgagcccaagctcctctgcaccgcttcctcatccgctcgctgcacctggacgcggtcggcgcgcgacccccggccgtgacgtcaccgcacctggcagcagccgtggggaccgggagagagcccgaacgcgacggggcggggtggggcggggagaacgagggcgttctcgcgagatttgcctcctcccggtcccagctccccgcaccttctcggcctctgtctgggtccccaccttagtctacggtgtcgccttttctaactgcgagtgctaaggaagaggcgaggggcgggctccgaggctaggcgggcgctcggggttggagccgagggtctgggcaaaccggtgggtccctccccactgcgggagcggccagggtgggaaaaccgcggtcgggcgggcggggtagggccctcccgccgccgtggctcctggggaggccaggggtgaggagctgtcgccgcctttgcctctgcctcgagggccgcgctgaagagactggtaggagagcgccgcgggcggatggaggcgactcttcgccccgcctgagctcaggaggggctagcgcggagcgcgggtcccgcctccagccgcgggagcggccgcgcgagccaccactggaggaggaggaggaggagcggacgtcggcttctccccgcgggagcccccagcatgggtaagagactcgggcgcttcccgccgcccgtccggaccttccagacccggggaggctgtgccctttctcggccttctggggaggcgactgcggtcagcccctgagcggcagcaccccaccctctccattctccccaccgccccttcttgccctgc

SEQ ID NO: 36359 - DNA, 2300 bp, Homo sapien
aagttgggagtcccagctctggaaataatagctgggttggcttcctgatttgtgctgtgcggggctgggcttggatgatcttcaagaacacttccactttttacattcctgatctctggtagatgctcaataaacctttactgaacaagtctctcctgctaccaaaacgttgctcatcagtgtaaatcagacgtgtcctttaaggcctggtctgtccctgtattctccatgaagtgactcctgaccaggccagcctccatcaactcctccattgttgggagtgactgtgtcagctattagtagagaagatcttgtatgtttttcatatttatgtgttttcttcttccaactagaagtgtgaactctgggaggttaggggtcatattttatataaattgatatatccacagatgcatggcacactgggcattttgtgtataaataatgacaatgcgactgattaggacatgttagtgtagactcaccagttgtgacaaatgcatcacctaccgcgagatgttgatagtgggggaggttgtgtgtatgggggggcagggatatttttgaaatctctgtacttttgcctcaattttgctgtaaacctaaaactactctaaaaaataaagcatatatatatatgtgtatatatatatgtatatatatgtgtgtatatatatgtgtatatatatatgtatatatatgtgtgtatatatatgtgtgtgtgtgtgtgtgtgtgtatgtgtatatatatatatatatatatatatatatatatatataaattttttttgagacagggtcttactctgtcaccctggctggagtccagtggcacaatctccactcactgtagcctcaatctcctgggctcaagtgagcctcctatgtcagcctcctgagtggccagggctacaggtgtgcaccaccatgcccagctaattttttttgtttgtttgtttaaagtagagacaaggtctcattatgttgctcaggctagtctcgaactcctggcctcaagcattcctgcctcagcctcccaaagtactgagattacaggtgtgaggcactgtggccaacctatattttttaaaagatagaattttcccatctgaggagcagacttgagtggatttcaagagggtactattcagccctcaaggggattcacagacctagaattagagaaaaatagcagcacagcactcacagcagctgggaactttcccatccttccctggccacttcctagaagatcaagactagctaaggaaacaaaatgaggaagggggaatgctgagattaaaattaaggggtgcctttcagtatattaggagaacttcgtgaagattttgaaaaatgccacactctagataaatatagatatagcttttcaaacatgggattggggaagctaagaagttcataaatacaaaaaaaaagagtttttgagtgtttcaaatttaaaaaaagatatgtcactgaccatgttgctttttgagagtctttgtccttgtatagggtaggttatgctgaggtgacaaatagctcccaaatctcagggagtaagaatagtaagaagtaatcctttcttatggttgtcatgtgttagcagggacctcttcttatcacggtcactcagggacccagtctcatggagtaactactattctgaattgctggcaccatgcagaattacttaaatgccccactgaccacaaggaggtgaggaatcacaatgctaccttgtgtttgcaactggagaccgataggaatgattagggaaccataccaccataatcctagtaaccagaaagccagccagctagtaccagagccccaagcagaggcacttgtggtttccaaatttcatctttaggctcaggctgatttgtaagaacaaatgagctacagccatgcatcacacatcctgtgctgccaccacagtcttaaatcccttgcccaagacaggagcctttgctttttgtgagagtccgcgtctgtcacctggtgtgactcatccattctccagtgcattgcccctcccactgcaggagctactcccatgcaggacttgtctgtcaggctgcagcactcctgcacatggggctgactgcctatgggaaccgcagggtccagcctggggagctgccattcggggctaacttgactctcatccatacaagagcccagcctgtgatttgtagcaaggtatgacagaagagagccagtaatgcccatatctccagctgccagggagtggggcaaatttgccggtgagtttgtctttggccagccacagt

SEQ ID NO: 36360 - DNA, 2300 bp, Homo sapien
tacaggttatctgaagagatatgctgaagataacagttgttattcggagagaggggagttaaggaataggtagatgggaaggagggacttttatttgctggttcatacaacttggtattggtcaagttatttcacagcagatgtgactctgagagtgtaaaatagaaaaacattatgttaggctgtcctaagttttagtaaaggtacttttacatttaacacaaaaataaaatataaaaatttctttctttttctatattgtaggaggattcacgtttggttcagccatttgaagacaatataaaaataagtgtatatactggaaagtctgagaccataacagatatgttgctacaaaagtgtcccacagatctgtcttgtgtaattagaaacattcagcagtctccctggataccaggaaacattgccgtaattgtgcagctcttacacaacatatcaacagcaatatggacaggtgttgatgaggcaaagatgcaggtgagtgtccctgaatagttggtagagcattatctcagtgggaaaggaatgcaggtttgttggagtattctgtgagcttcttagggactaggaaccatgtctttcacatcagtatttctaatgtttagcaaagcaagtgttcagtaaatcttcattaaagaaaggatgaataagtgaatggaaaaagtaaacatttaatcaacaaatatttatagagagcacttacttggtactgtattgaactttggagtatgagttaccgatgtatcttttggctactgaatacatttaagaaacattctatgttctggagagagaaagactcttcttattttcatttgtgagtcaggataggttgctaaaatggaaaataattgaaggcaaagaaaacagccatacctatccactgcagaagcatgaaatagaacggggtccattttgcttggttttaatcttcaaagcaaagatagtaaaaagtagattcagactccagggtgaatttccaatttattatgttcttgtatagggccctgcaacacatttgggatgcaacagaggttaatcacgtgataggttctctgagcagggtaagcaagttgctagtttcgactaggtgtgatatggaggggatgatggacatgagcatgtggaaagctgcccagtggcctggctcgcaggaggccattgcataaatggagaagggcatggtgaggcaattcctttgtagctctatcatctaagtcaaacttcagtgtacatgcaagtcacctgagtatcttattaagatgcagattctgattcattaagtctggggtggggcctgagattctatattgctaagaagttcccagagtatgcctaggttgctgattggagaagcacgctttataaaggtgagtgttgaatgtgctggcagtttcagagagtggctcagtactaacactggttcttcattggcagagttacagcaccatagccaaccacattcttaacagcaaaagcatctccaactggactttcattcctgacagaaacagcagctatatcctgctacattcagtcaactcctttgcaagaaggctattcatagataaacatcctgttgacatatcagatgtcttcattcatactatgggcaccaccatatctggagataacattggaaaaaatttcactttttctatgagaattaatgataccagcaatgaagtcactgggagagtgttgatcagcagagatgaacttcggaaggtgccttccccttctcaggtcatcagcattgcatttccaactattggggctattttggaagccagtcttttggaaaatgttactgtaaatgggcttgtcctgtctgccattttgcccaaggaacttaaaagaatctcactgatttttgaaaagatcagcaagtcagaggagaggaggacacagtgtgttggctggcactctgtggagaacagatgggaccagcaggcctgcaaaatgattcaagaaaactcccagcaagctgtttgcaaatgtaggccaagcaaattgtttacctctttctcaattcttatgtcacctcacatcttagagagtctgattctgacttacatcacatatgtaggcctgggcatttctatttgcagcctgatcctttgcttgtccattgaggtcctagtctggagccaagtgacaaagacagagatcacctatttacgccatgtgtgcattgttaacattgcagccactttgctgatggcagatgtgtggttcattgtggcttcctttcttagtggcccaataacacaccacaa

SEQ ID NO: 36361 - DNA, 2300 bp, Homo sapien
tgcacttctatagaaaatattaattgtattctacatttgtatagcttttggtacttatcagttgctttacgcatgtttacaaaactagtcattgaaaagacttgggtaaaacccctatttttcataaacccctcatgagctcatgactcattccacaccattttccttctcttgtctcccttagggccatcttatctgtgagctttgttttggacaaggctgtgagcacttgcattttgatatcatgagcacctttatctgtcataataggatcacttgtgctttcaatttagtttctgccttgaatcccagtaaggaacagggaggggtctatctaagcgccagtacagatggggcagtgaggagctgagaacaaagtgtcagtgaggcccagtggggggcactgggcagtgctgtgttggagctggcctgtattggctcacgggagctgccaattatattttcacaattgttctgagctggttgtgaagacagtcatcaataacaattaaatcatatagacttgcaattaaacaaattaggttaaaagtaaaggtcatgtatcctcagaactcatcacttcctaattatttgtctaccttttctcttgaggttacttgcctctattgtgtctgcatggtggaaaatctgtacaacgatgtgctactgcccatctcttcctaaatccatgctcagcgatgtcacagggcaagattcaaataggccatggtgggtgtaattaactatagagattggcaaacactacaaatgaggagagtttattgccatttactagcatatcactggatcagagcatccactgagggaggagagagaggagccatggatctactgagatgggagactcaaccaactgggtggaaaaagcaggagaagtgcagtcttaggatgagaagagatgaggggcagcagcagaggctgatggagcagacagaggggagcgattctgaaacatattgagaagcccagatgatgtgggaggaagactcctgtaaagatttcctggtcctagccccaggggaatatctgcactagttttaaagctcaaccatcccctttactatagaggttttattatggtgtcagttgctgcctcgattaaccgccttgttcatccataacttctggttggcatcctactcttgtatttactgagaataattgtgggctgggtgagtttttgggactccctcatagctgtttttgtgggaaaaaaaataaagcacatataccaaaacctgggagaacaccttgagatttacctgtccaaactgtgctttacctactaaaagaagtgcaaagaagctgctactggtgaattgtttgttaggtatattctctcttcccttctcaaccagatactaaactttatggccaatttttttatccaaatcttctgaaagatatttgacataactttctctaaggtggcatggaccgacaaaaagtgatcctagtggagtatttccctgttacatgtttataaagtcatgtttatagtcatgctacataactataaaagtgcaggttgcataataaagaaattaaacacatacatacactcaaatgaagagacactacatttattacttattttgtgcaaagcattatgcttaatgttgcagatacaaatatagatagaccaaccccaaggaattaaaaatcttataaggagagaaattcctcttagttctttagccaaagaatattagccatcagcatatttgtggaaaaaacatgctagaattgttgttcccagatctttaaaaaatataattcctgggccaaattcacagagatcctgacttgaaatgtattcctagtaccaaaatcaggctggaatatatttgtcccaaggggccttataagaatgataactttgcaacctaatagaccatgccaacaataattttttttgtagcagatacaataacagatttcaataattaccttgtaggctcagaatgttacacagaacaatctcataaaagccatatggagattaagcttttgagagttggactggctgaagagaaaggtgtatgttagtgtgtttggggggctggattagctgcaaggatgtacactggtccctgtaaggtcctccacctctcatctgggcttttaccaaatagcggtaggtttggtattgttctcagcgatgaataccaggttgtaacatctttatggtgccagctgtatacaacccatgcacctcaacaggcctctgggtaggtaagagttcacactcacttatgaagtcagagcagcttagcaag

SEQ ID NO: 36362 - DNA, 2300 bp, Homo sapien
tgagatagacatagtcctggttttcctcaatgcaggcttaggtacaaagagatgtcacttacccagagtccatatattgaagtgaaaatggaatttcatgaagcaaatatagttataggatggtaactctggacaaattttataaaagatgaactccaattgcttcatttcacagataacagctctgagcactagggagagagggagggattggcctagcatttgctttgtgtcttgagcagtcacatctattatggaagtactcactactcagctatactcactccctgagacaggatggttggaaagaaaccccaccttagcttcatcattaaccaagaaaccccaaggatgcttagagaaaaactctggaattatttgggaattcctggaagaagctatgccctctctcctgcatcccaaagcccactctacaccatcttgaaaaatgtcaaggaactgcatggattaggttgactctggatgaccctgggtagagacacattcagtttcctgctgacaccgcaccaagaaagtgatttggtcaggtgactctaggagaaattggtactgatagtatccaaggcagatttttaagtatcagacttaatacataatgattcttgggaaagccatttaaatccctgagactttaagtggataaatgtaggtaaagtagtatagtacttggctcataataattgctcattcaaattcacatgttagttttagttgttttttttaaattagagtcctgtgaatacatgaacccacccacccacatgcaaacacaagcaaacacacagccatgaccccatgcataagtttggctgaagacaccctcatgggaactagttcactgacttccaaattaaagagttaagcatttgatttggtctgttcaacattaggggtatcagccagcaaaatctgttgagcttaccattgaaaaatcctttcattcattactgtggtcataatacacagttacctggccaggaaagagtacacatcacagggatctgctcactgcacgtgtgcctgagctctccctcactttctgccttcttcaagaattcttccctgattggtccaaccagaagcgctgattctccccacctgatttcctgtaattttataatctatgtccttcacttttgtgttatattgtttatttccttttggtctttttgtgtgcatatgtatatgttttggggaatggggtattcacttttgttactcactgtgttactcacttttgtatgcccatagtgcagagcatggtgccttgtacatagagtatgttcggtaaatatgtgcaataaaaagtcctttgattacacaatggcttgatattggcttttccacttcccaaatgagccatttcttaactactgacctaaatggagctgacccatttccataaacagcacctccttgaccttcattgctataaaacccataacaaaactgcctcctcacttacctctccttattgtccacatttctcctggaaatatctaaatgagggtttgctttagatctttggggaaggaaggcctgtgagtagacaacagtagaactaggatgtgtgggactgtttggtggttagcagaacaatgcaaactggctcccctgtccaaagtcaaaccgtgtgcattccccacaagtggacacagtgtcttctgtgtctgaattaccacagtcatgtagtggctcagtgagaactccttgtcccggtcattacaaaaataaaacagaaatctctctgttgctaggttaggaattagatcacaattgatgcaccagtttatcagccaatttcctccaagttcaacatcagaacaggcaaaaaaaaaaagtatcagcctttaaaaatcatcaacaatagtggcataaccttgcattttatcaccctccttccaattatcccagtgcagcagatgcaagcagagtctcatgcaatcatctgagataaggatgaagaactgaaagacaaacaagtgactcactttaatggatttgcttcagacaggagaaacctgtaatttctcttaggcgtgcttcatggacccatagtggagtgaatcacagacttgcacaagccttgaaactgtgggtaactttacagttctcagatcggcttctcgcaacaggcagtcagttctcactgggccccttggactcccatttcaaaaatggagaagacagatcacagccactgaccagggaccgtgggaggtgccacgtgatggtgaggcatcatgctagggagctgagctctgaccttcctgctgggt

SEQ ID NO: 36363 - DNA, 2300 bp, Homo sapien
ctaaaaccaagtaaagcagcattttattgttttatattcttgtattattattatattttctgaccattagttgcatcttttctctgtccagaaaatgatagataccctccctaagtctagataacatggtaaacctctgttgtcctacctcataatgctgggtttgtagtagatgttcagtgaatacttgagttaacacacaagcatccattgattcagcatgggaccctgaggaaatctcttatacaatagctatatcttgatggataggcaagtttgggaaaagtaagcatctcagcatataataaatatacaggaccccccattcataatatgctttcgagtccgatatcctattgctcctacaacaagcatgagtgacaggtaagaaggagactgcccattttacagatgaagtggttgcagttcagaaagtttaaatgatttgctcaagatcagagggtgggtatcacagctggactccaaccttcatcttatgattctgaagctaaggtggaggacaggactggacagccagttgggcgggggcaatctttggggaggagagagtttaccagaacaagaggcagtcaaaggggaatcaggagtttgaaaggtaaagataaactttcacctggggtaggtcttgggatgtggtgcatctggcagccaaagatttctcctacagctttctaaccatctcagggagaaggatttggaatgaacattagcacatgactgtcctcaaactgtgtgtaggagactgtagtttcagccaactggccactgaaagggtcactagccttcctctgtaagctgtaagttggcagttagaaaggggttaaattcatgtcttttgcgaaggtgaattacatggttagatatgtgccgatcaccctgtcaccgcctgtggggcacacaactctgtgttccacttgctgtctcatataatgcccgaaattgttgcctagagagctgaacagtgacatctgttggttcgatttgaaataggcaagttcaaaagagaaacagccacactagtatttcttcccctttcaaaacaaataggaacaatcatgacaaaggaatgacccttccaaaggaagttttaacatcagcagcatactttatctgaagaacaacacacgactccaagtttcaggatgagggatatcatgtgacttttatttttgcagaaagcccatcaaagactttgtgtaaaccttttaaaactccaattcaaaagaaacagtactaagacctgtgtatctgagaaattcctcaatgctcaagatttcatccagaagcataaatgagcaaatagaaagtatggatttggggcagtggtgagaaataatgaaattgctttctgctctaggaaacttgagaaacaaaccttcctgtggatgtgcctgtgagttacaacccagcttgaatcctttctaaatagctccaaatttcaagatcactttgacaatcacctagctcttagcttcaattaattaagtgtccatgttcctttgtactgaatgctctatttctttccttacaaaactctaaacctcattgaatgtacaatggaaatgattttctgggaaatctggataatcaaaaaatactatattctgacaagttatatatatacatatgtaaattttttatatattatatataatttatatacataaattatatatatatagtgtgtgtgtgtgtatgtgtgcacactccatacaatatcatttcctgctcagacctttacaaaaattgctaagaaacagtaaattgcacagtttggccttcaaccttttaatcaccccaaggagaaaagaagtggctcaaagagtagcatgagaaaacagaggagaaaatgaaggcttggataatctgccaaccgaataactgagtaatgacataattggatcattgaaaaaaatgttaaaatttttaccagttattaattagagaatcatgcatgaccctgggaacttgctttttgttttaaaacaggagccacgattatgaaatggttcaagctggcttattcaggtctgctgagatctctactggtttgcttttcagatccctcgtggttcgagaacagaatggcgttaaatcacactgccctgcctcaggacgagcgcctgccccattaccttcgagatggggatccttttgcttccaaactttcttgggaagcggatttagtggctggcttttacctaacaataattggtaagcttccttaattcttctgtgcaaaggctgcatttagaaaattcatgggctgatatgttaat

SEQ ID NO: 36364 - DNA, 2300 bp, Homo sapien
tattttttgataatgctttgggcactgggtgaaaccttatgaagcagggtcagtaaagaaaatttaaggaaggaaaagtaagaaaacaaatattttcaaaagagatgtagacagatgaaaggtgtttcaatgagccttgtgtatcaaacgaaaatggatacttgtttttactctttttggatacaaagtaggtggcattaagtttatactttttcaagccacgttttcacattttgctttcctagctggtttccttgagtgagacctgtttcattttagttggtttgctctggaactccgtaatctcttttatttttctcttcttctgctttatgaaagctaaagaggttttaatggaccattaagcagcactgactccagggagtcagaatttcctaagagcacaatgcagttagttcctggtggtttcataccatcagctgaatcacacatttctttctttgcccccaaaatgaattgtggtggagaagtagaaattaaaatagaaaactctgggtttctcctgttaatactctccttattccttactactaaaggcagctgtaccagattctcatttatacacagctacactatgaagcaagaattcctgaagaaatctactctacatgttaagctatggaagtaggtgtattcttttcttaaataaagtcagtagggattgggtctttttggatttaaactgggtttgtaagaactttcgaacagtttcattgtaatgccaaaggcaactagtcattaataaaaggatatgaaaaagtgggaacacacttatggcattgttggtaggttcggtgggttgagggtcactttctctccccttggtgggagggacagtgcccaggttctcgattgtcacccacttacccttgatatctagtccagtagcagctgaaggctgtcctatctgccagacactcagtgtccatgtctcccaaagaggcggaagtcctggggcgtctctgggagatgtccattttcttgaagggagttatgccagtcatacctggcctctgcctctcctgaacactggtgctcccttaggagttgacagtgatactgaaggcaccttctttggttggcttcatcttcagaatttatcaagagctaagggtttaaccctactgatcagagggagggagttctataaagccaataatctataaaaatggctgaggaaagtactccactctgggggccaggacaagaactgaccattgggattcccacactttcctgagcctcgcggggaagttagcgatgcctttttctgggtaagttcagtcttataatccctgactcctgccccattggcctgtcactcacaactcatgctttttatttcatcttcttaatttagatttttttatttagagtcctctcactaccctctaaatctatggtgtccatttttgaagttgagaagtgtttcatatctgagtgaactcgaaatcttagttttaacgattggaatttttatttttccttgtagggattctgtccacatttggaaatggatatgtcctttacatgtcttctagacgaaagaagaagctgagacccgctgaaataatgactatcaatttagcagtctgtgatctggggatttcaggtaacacaaccatgctgtgttttctttgtgggtttaaactactccccattctaaagtactcactgtctcaaacgtcaccccctgacatctcttcccttcacatctccttccactcttcgcttcacaaatcaactttcagagttttgtggtaagtcaatggggtgctgtccggctgacaagattattcatttaatatttattgagtcttttctgtgtgtcaggcatgttagatgctgaaggcacaatttgaaataatatgtgatacctcagatgtctcaaagtgtagtgggctaaatgattcagaaatcagaaatcaggaggcaaatcccaggtcagtattttaagcttctttacacctcttcaacccttatggaagtctgattaaaataaacatcaacaaaggaatcttgaagggtaaatgacagttgaagacagttgaaggcagttgagaggtgaatgtaggaagaggaaagaggtgccctgctgatgatatatgtaatcatgacttagtgacatatcacaagcataggaagcttctggttcagtggtcctcaaatgcaactcacaaaatatcatctggggaagttctgaattaagtcgttgagagtgttacctgggcatcaggatatttaaaatgagaatctacaggtatgttaatgtgtggcca

SEQ ID NO: 36365 - DNA, 2300 bp, Homo sapien
gagaggaaagactagtctatgaatgtggcaaagagattgagtttgactgaatacaagaaaaggcagtgtaacaatagaatgggcttcctagaaaaatttgtgaatttgggaatgttgtagcatgggccagatggagaactaccagagataatatagaagctattcctgcactcagtagaaattcaaacagaatggccgccaaggtcactttcaatttagaaagggcggaatttttatttaatcttatatatgacaccttcttctagacacttttccttaagcattgtcgctgtttctgagctctctgctgtgtcattggtctcttaactgaagaatcaattccagtagaaaaaaataaaaggtatatattatgacaaggagtcctttagcttgtttgtatgcatagatggttccctttctaagtatctaattaaaaatgggcactttcactgttattaagaaattgtgcacagaacatctcttgaaactcaatcttttctatgaagtcattccaaaaagaacagaaactttggaaagcaaatctccagttcacaatcacactttagagtttgccctaaaaaattcatatatatatatacacacacacacacacacacacacacacacacaaacacacacttattaatattagtttttgaagttgacctgatctgaagctgagatcctcatcttcacacttttgggtgctgaaggaggaattgtatctggtgggggttttctttcttatacagtgaaggaggttcactgttttttacaagtgactccaataggtttccctctacccacccgactctcttttttttcaggcaaaactacctggtgtgtctggaagtgtctgtttctggaattccactcacaggggaaaattagcctgaaccagatggcttgaaacagtcctcatgggtgaggggtggaaggagacactggaaaaggggactgaaatcagctttaggaactttctgtcctttaatctcaagaatacagaaagtgaatgtaacatgttatgagaaacctcatattgcctgtagatcttcactttcaatacacacacacgcacacgcacacgcacacaggctactgctattggcaaatgcctcctctccagccatcagaggaaagaagctatccagacggtcccaacgcaccagggatagatggagtctccgcagccctcagctgcagcggactggtctgtggaatcacagcgaggaaggtgttgcgaggaaatcccttgcatgctgtgtggtgtgttaaaaatgcagcatcatcctctctgctccttttcttcgctgaaaagcagaattcgagggcacagggaaactggaggggcgagaaggctgtctcctggagccctggggctgtctccctccatgccccactccttgggctctaattgcccttgctccaatgggccagcagcaccttcaccatttatttcctcttcaattcactccagcggggagggaagagggaacacaaaactctaaaaataactgtcagcatcttaaaaaaagaaaaaagcttatctgcccccccacccccaacgtgctcccgcccttctccctcctctccccccctcagccccccccccctttatggggcacatgtctgcttcttacaacaccgaggcacatggttccagttaggcaccgaaccccaccaagacagagaggaaatccacatctgtgggacgctccacacggaaccacctccagcgagggaggccaggggactgcagcaccgagatgaagggctagaccgagggaacgctgctcatgcggtgagagccagcgcgggaggcggcgagggcgcggggagaccggggagggggtgggccccgcggcgcccgccgcccgcccccacgcgcgctgtcggtatttgcccgccttgctgcaacttgctgcagtgtttgaaagagtagtaggagcgcatggaggtggggccggggaaagaccaggcggagtggttgtggggtgagcgcggagtgggtggggaggcggcggcggtggggaggggggactggccccagggggtgggatgggggagaacggggtagcccggcgcttacacatgtcacatgtgctttttaagacggccgggagcgcctgcgagctggatctggtggaggatgctgcggcaggtgcttcgcagagggctccagtcgttctgccacaggctgggtttgtgcgtgagccggcacccggtctttttcctcaccgtgcccgcagtcctgacaatcaccttcggcctcagcgcgctcaaccgcttccagcccgagg

SEQ ID NO: 36366 - DNA, 2300 bp, Homo sapien
ttatacagttatgttttatgcagtttctgtaaatatatgtataagtaaaaagttaaaaatgtgttatgcatagtttcccaaaaaaagagaaacaaactcaaaaagtagtaagtaaaagactcaagacacgtaattgtaagtgcaacaggttcaactatgtaaaaagtacatagaacaaagtctaaatggaaacataacaaaaaaggctgggcatggtggttcacgcctggaatcccagcacttcaggaggccgaggcaggtggatcacctgaggtcaggggttcaagaccagcctggccaacacggtgaaacccagtctctactaaaaatacaaaaattagctgggcatggtggcgcacaccagtaatcccaggtactcaggaggctgaggcatgagaatcacttcaacccgggaagcagaggttgcagtgagcagagatcgtgccactgcactccaacctgggcaacagagagagaccccgtctcaaaacaaaacaaaaaaaccttccatttttttaatactagcacgatttttattctttaaatccatggggtccttgtcatccatctttttgcaagccatccactacatttactagcttaaaaggtggatgaaaaaaataatgaagcaacaactaaactgtttcaatagtaatcctgtaaaaggtaatttgaaaaccacctgagactaaactgttggcaggaaatatcacactcatttcacgtgggctttcctaaatctgaacaactaataggaaagagccccgtttaagtgacttcctgaaaatcacatgtgaattggtggaggctggaaacagacaccatttttagataaaaacacaactactgcggatggcaatacgacctctgaattttctcagaagaccatcaagagaggcctcaagcattcaaagaagcaacatgcaaagcaaatatgttactgacaactaaaatgagttaaagagcaatgattaatcccacccccacacctcaaaaacaaatcagtgagaaaaagatttcttgaaccaataagtttcaagctttggctgctgacgtatgattgcacattaatacttcaagaaggtactttgatgttcaactagttgggtttggagatggaaacatagggcatgaaaattatatttgatattagcataagtacatcattaaacacaaaattatattggcagaaaatcatcaagtggtttaaaactttacacacatacgttatccagggcttcgagcttccctaagaccaccttctttctagataaaactgagaacgagttagtaatgtaagcttttatgtcaatttagacctgtcttttctattctacctctcactcttaacactgtttacactcttaatcctgtttacacacagaaaatcacttttattcccgaaaactcttagaaaaaccctgacaataacataacccacaacctagaagggaggcagccatgaagcaggcgcatccctttggaaccatacaaaaagtgacctctgccaacgggaacagttcagggtgcttaagtggccaaagaagataccgacatggcccctaaagtattaaaagcaccttctttccagaagtacctccgaattgccagggacttcgcccaaaactagaggttggtcgaagtgaaaatctaaacctaaggagaaggcagagagtgggatcccgtcacagtaggaaggtaaagaagacagaagtaaaggacagagcgggagagaaaggacaaaagttcaaaatacaggggtagaggagggacaggagccagaagaatggagcgatctgaaaggtgtacgtcctactcactggtaggcctgttttggactccgctgtgggagagggcggctgcacttctgcgtcccccgcctcacctgtcagacatccacacagccaggcctccccgccctcaccaagcccacacaaaccgcgccaccgccagcgtcagccggacgactctgggggcgtaggccgacaccgccctccctccagccaatctaatagcgctctcatgggcgcattcctgatgacgtttaggggtagggttagatgcccgtttccgctttcttcccacccacttccgggtctcctctgtttacgaatgtttgggcgcgaattactctaagcgcggctctcagaagggtgcaagaagaatcagtggtgagtcgtgatatccttaaccggctgggtggatctaaagttcagggatgagttttaaagccaacgcgtttgtggcagactccgcagtttgcatttgaggatagcgaggggggattgcttacggggaaa

SEQ ID NO: 36367 - DNA, 2300 bp, Homo sapien
ctctggaaatggaagaacaaagcatgagtgacagcacatctgtttacagcacggtttactgagtattttaagcccatctttgagacctacagctcacaaaaagattcctttcaaaataatactgctcaatgaccacgtacttggtcacccaagagctctgatagagatgtacaaggagattaatgctgttttcatgtctgctaacacaacatccattctgcagcccatgaatcaaagaataattttgactttcaagttatattatttaagaaatacattttgtaaagctatagctgccctagacagtgattcctctgatggatctgggcaaaataaattgaaaacttctggaaatgattcaccatcccaaatgctagtaagaacattcatgattcacgggaggaggtcaaaatatcaacattaacaggagtctggaaaaagttgattccaaccctcatggatgactttgtaaaggtcatgactttgttcaagacttcagtggaggaagtgatgaaagatctggtggcaatagcaagagaaatagtggagcctgaagatgtacctgaattgctgcaatctcatgataaaactagtggaaaagaagttgcttcttatgaatgagcgaagttcttgagatggaatctacccctggtgaagatgctgtgaatattcttgaaatatcaacaaagaattcagaatatcacaaaaccttagttgctaaagcaatggtaggggttaagaggatttactctaattttgaaagaagttctacagtgggtaaaatgctttcaaacagcatcacatgctacagagaaatctttagtgaatggaagagtcaactgctgtacaaaattcattattttgttattttaagaaactgccacagcaactccaatcttcagcaaccatcaccctgattggtcaacagccatcaacatcaagcaagaccctccaccagcaaaaagattaggacttgctgaaggctgagatgattagtagcattttttagcaataaaatattttaaaattacagcatgtaatttttttttacacataatgctattgcacacttaataggttacaatacagtgtaaatacaactgttatatgcactgggaaaccaaaaaaatcgtgtgacaggctttattggtctggaaccgaccccgcaatatctcggaagtatgtttgtacattattcatagaaaaagtattattctaataacattttgaaatatttagccaaaaagtagaaaaatgaagcatccaagggaaaacagtaaaactcggacggcaggaaagctcggaaaaaacacaaaaaacctggcgtgttcagggacaggataatccagcgaggcttttaatgtgtataggagaagtgaaaagaaataaggctggtacagtagtttgccgccagactatatgctttaggagagagggaggcattctaggttgtcttgtttttcttaccagcttgttgatactcatgggactcaattacctcaatttagacctctatgtgggcacaagagtgagtaggactcctggagaaacacagacactaatgtccaaggctgcacttgacttcactagtgcccgcgggagaaatttagcaatgaggatgagccatgaggatgattcgggagaaataggaagtattcatggctttgctccctcccccctaatcaaacatctcaatctcaggatcctaagggcagatcttttaggacatcgggcatttccccgtaagcaatcccccctcgctatcctcaaatgcaaactgcggagtctgccacaaacgcgttggctttaaaactcatccctgaactttagatccacccagccggttaaggatatcacgactcaccactgattcttcttgcacccttctgagagccgcgcttagagtaattcgcgcccaaacattcgtaaacagaggagacccggaagtgggtgggaagaaagcggaaacgggcatctaaccctacccctaaacgtcatcaggaatgcgcccatgagagcgctattagattggctggagggagggcggtgtcggcctacgcccccagagtcgtccggctgacgctggcggtggcgcggtttgtgtgggcttggtgagggcggggaggcctggctgtgtggatgtctgacaggtgaggcgggggacgcagaagtgcagccgccctctcccacagcggagtccaaaacaggcctaccagtgagtaggacgtacacctttcagatcgctccattcttctggctcctgtccctcctctacccctgtattttgaacttttgtcctt

SEQ ID NO: 36368 - DNA, 2300 bp, Homo sapien
agaacgtattggggtaaattttttactcaattaatttgttccaaaatttgggattgggagggactaggcagggcttgctcatgtcttgtccacacagtgtgggctgcagcatattgacttaggtacatgtaccagactggccagttggtgctggctcttggctgggagctcagctaagactttcctggggtttcagttcctctcggtgttggccttcctcctatggtggtggctgggttataagagcaagtgttggccgggctcagtggctcacgcctgtaatctcagcgctttgggagaccgaggcaggaggatcacttgaggtcaggagttcgagaccggcctgaacaacatggtgaaaccccgtctctactaaaaatacagaaaattagctgggcgtggtggggggtgcctgtagtcccagctacttggaaggctgaggcaggagaatcgcttaaacctgggaggcagaggttgcagcagtgagccgagatcgcaccactgcactccagcccaagcgacagtgcaagacttcttaaaaaaaaagcaagtgtttctaagcaagaagaagtcaaagttgccagtctcttcatgtctaagccagtaagctagaacagaatcacttctactatattctactgctcaaacagcttcagagtctgccaagatttaagacaagggaacatagaccttactgctcattaacaatcatgagaaggaatgtgtaccatttttaatctaaaatctcagctgttacttgtcccttcacctggatgctcttattcagtgaacaacttgaactattgtacatgtcagcccttccaggagagatctacaagtgaaattctgtcatgtggatgggtttttaagtaggggaagtataagggtgtagatgtaaagttgaggtaattaggcattttagaaattgaacacaagatagagaatgagtgtttggtaaggtatcacattgttcaagagcagggtaaagtgatattttgacttccactgctttttgtaactggtgtgatatgtggttgctaaatgtagtttgtgatctttctgttaattctttcccaattttttttccagtcttgtgtggaggggagtttgaagcttttaacgtttgagaggatagatttatcattgtctttctctaaatctgcacatatatttaaactgtatcagtataataattctgaatgtttagaaaataaatgatgaataatttatctgtatatctagctatggctaatatgtgtatatgtttatatgtgtatatatatattttctaggcatatatagctaatatgtgcatatacatatttccttgtatactgcacctaacttctatccacttcttatggtgtaatgcaagaataagtatttcattcttctgttccttttatcagaaattagtttggtaataaaagagggaaaattactctaaattttatcaacatccccatttccaatcccatgtctgttttgtaatttgtgggagggcagggtattcagtacatttctgtactcttgttaaaatgcacatagcccagataggattgcagtttaaattcttaatagtgtcagactaacacatgaatttccacatagattgatggtataatcctaaaaagtgtctccttccatttttggcaaaaattgggtaatggtaaatttattacttaaaataacaagacctaggctttactccttgaactgacattatctgtgactactttatatttctatttccttggacttaaacatggagaggatgttatcatacgatagagtataaaataagagatacaaaagcatttttaaatgattttctaaaatccatacaaacggaagttaatttctaggaatgaaattgaattagatatccttattctgataagagtgaaaattatttcttttaaaaaatgcttgtttaaaagcatacaatactatccccaaacttttattatgatttttctttaaaaaaaaaaaaaaagagaatgtggaacatttacaggatagttttttaaacaaaacattgtgcaaggctttagctttttttgtattattttcatctttacagatttttttttttttcgaagcactgtgtttagatcaagatgtctggtaaagcaaatgcttccaagaaaaacgctcaacagttaaaaagaaatccaaagagaaaaaaggataatgaggaagttgtgttgtcagagaataaggtaatgaaaatatcaagtttctcatttagaaatcttcaactgtggccaagcactatggctcatgcctgtaatcccagc

SEQ ID NO: 36369 - DNA, 2300 bp, Homo sapien
ttaaatgttgctgatataataggatatattcaagccatggttttagtttctaagagttagtgagactcttggaaatctaactgctatttagaacatttggagcagtgaatgactcttccacataattggtttaataaacatatagaagaaacttcataattaaaatatttttgttaagaaaataaaaaacttattcctcttaggaaagcttaggcagatagtttgtgtttaaatgtgatagcctaatgatgatttttctaaataactagagtttgtcttaacagtttaatgagaattatgatttgtggggtttttgctgcctacttttttctttacaaaaattaaaattttatttgcaaacaatgcatcaaacaaaggtctgtatcaagactctattagaaacttaaacaaattagcaagcaaaaaaccaacaatcctattaaaaagtgggcaaaggacatgaacagacacttttcaaaagaaaacatacatgcggccaacaaacatgaaaaaaatgctctcaacatcactaattactagagaaatgcaaatgaaaaccacaatgagataccatcttaaaccagtcaaaatggctgttattaaaaagtcaaaaagtaacagatgctgggaggttgccaagaaaagggaatgcttataaacttctagtgggaatgtaaattagttcaaccattgtggaaagcagtttggcagattctcaacttaaaacagaactaccatccaacccagcaatcccattagtgggtatatacctgaaggaatataaattgttataaagacacatgcacacttatgtttaccacagaactattcacaattgcaaagacatagaatcaacctaaaggcctatcagtggtagattagataaagaaaatgtagtacatataaaacttggaatgctatgcagccataaaagaatgagatcatgtcctttgcagcaacacggttggagctagaggtcattatcctaagcaaactaacacaggaacagaaaaccacatagtgcattttctcacaagtgggagctaaacattgaatatatatggacacaaagaagggaacaaagataccagggcctacttgcgggaggagagtgagggttgagaaactacctatcaggtactatgcttattacctgggtgaaaaaataatctgtacaccaaagccccacaacatttgcctacataacctgcatatgtattcctgaatctaaaataaaagatttttttttaattaagatttttaaccagatcccaaaagtgggatagtgggttccactattgttcagatttcttcaaatcttaagtagtagaactttttagaacccaaagatactgctgttataaagggaatcaaatttagcttttcctcctcataaaattcaagaatcaaatctgggaaagctattttgcagtctgccagatgtgatgatagaaatagatgtttctactggtgatcaactcaaatttgtaaaagaattttttaactttaatattaaatgccattcatgtttatagaatttttgagcaatgcactttgatcttagtgttttatttgccttaaactctatagaactcagttttctttgaaatcatttagaataactaatgtaaatcttctctatttttgatcacattctctaaaataattgagatttggggtccagggtcatagttaagacttctagactagtgttctgtctctcaaccaataattcacaatgtataatagactcatgtagtgtaatagtctagaaaacatctggatgataaaaggaaattttggttttaaaatgtatataaattgtcaaatgtgtaagatagaaaatttgcttttagtaaagtagccccagtgtcccttaatttgaggtaaatcttaataaattgaaaggctaaatgatgatttgtcagggcttttagagggggagatttactggcaatgttacccagtggtaataaaagaatattgtacccttaagaatatgaggacaagaaaaaatgaggactgttttaaaataataatagtactcaaaaataaacaaaataattgtttttattttatccttaagattgctacaacagtgtgaaactctgaaagtccctcccaaaaagatggaagatttaactaatgtatcaagtctactgaatatggaaagggcacgagacaaagctaatgaagaaggtctggcattactacaggtatgaaatttgaatagggaatccataattagagagttagggaaagggaagaagaccaaagtttttaaaattatcatgatgttc

SEQ ID NO: 36370 - DNA, 2300 bp, Homo sapien
ttattaaagtagcctctgttcttatcagggctgtgaagttgctttagcaaccatctccaaaattggatatagtagttgttaaaactagacaaagaagaagataaaagagggacattttctgaattcattagaactacaatagagcacatttttaaaattaagttgttcattttttttaatactttaagttctagggtacatgtgcacaacgtgcaggtttgttacatatgtatacatttttaaactaatagaaataaatgtgccttagccaattttgccccatttctaccccctagagttgtccttaaaattactgtaagttttcaaatagtacaacagggatataagacagtcatagcaatgagaaaaatggctgacatttattgagtgcttgctacatgccaggtactagtccaatgccattacctatatacatgtatttatgccaatgtttaatcttaatggaaaccctatgggaattaaacctcataacattcattattatctccatcctgcaggtgaagaaactgcggcacagggaggctaaataacttgagatcacacagatagtaaatgatagaacaaggaagtgaaaaaataattgaaccttttcttaggagttttctgataaactacaagtagaaggggctagtgaatctaatgagtaacccctattacagcaaagtacaatctgatgtatttttctgagtaaagtgataatatgtattgcggatttgttcacctgggttttcagaagacaattcctttaaattaatcttacattgggaatctccttttttcctcctttttccgttaatctcagagttaaaagtttgccttagcctaatatatatacatatctcaaatttaattaccttcaaccatactttccaggaaaaggaatgttttgcctttttattatttttttcttcaggcaaaaattagttccaattagttctgatgttttataaagaacaaagagctcaaatttctgttttaaatgcacttggaaacaagacgtaatctaaatttggggagacttttacatgtctcagagtttataaataaccagaccccaaactttttaaagtttcccctaggatattgcacttactgtctaaaggagttcctgttttgcaaataaaaaaaaagcttaacttttaaaaaatatattttactcagttaatatttagaaaactatatttatataggctccttaggtccaagagtaggtatactttgttctcagtaacatcttttaaaaaagaagttatcaatgtatacagcaagatcaaaaactcttattttgacatctagtaattgacatctaatacaatttctccatttgctgtcaactactagctgcccattgtattacaaagctcagtgtcctctagtgaagaatgccctaccttaccattttatgagacctaaatgtggtaaacagaatcctcccatctaaccacattcaaactgaagcactctgcatatgccgttgagacatttgtgttgcatattatttcaagatgtagatattgagtgctgagatgtccaagtaaatacttacatggtggttaaaattgcagtcttttgaaagaagtgagtaaactctgaatgacttttcatttaaaagaataggctgaagtaattaaaattcttgaaattactctcatgtacttatgtatcctctgtagagattaccccctttcagccttggaagtttagggcagcaaaatcattttcttcagaatatataaaaaaataactaaagggtcaatacctttatattactttcttatcgtactaccatttgcctgggctcctcttctttttattctccttcatgagatactgattaatagacaggttttatggctagaaaatacctatctctaaatcaagattagtattcattggcttttacaccataaggctaaatgtgataaaaaggaagagatggagtggaaatgcctgtgctctatgtgagatgattttcacctgatcaccatcataaactcctccccgtctacaggtgtgggcacttttttttttttctctccctcctgtttccactaagggctaattagagaggtagccttgaagaataaacttaccatttatataaaagggctactggactgatacacagctgaaaaccctcagttctggactgaactcccagcaggtaaacatttattcattaatataatacatttcaagtcatagtttataattgcagaaagggatgggaaaaatagagaagagatgaaatccaaccttatacagaacgaatacattgt

SEQ ID NO: 36371 - DNA, 2300 bp, Homo sapien
cagtttattgtgaagaataaatgtgtttaaatatatagagtgcttagaacaattcttggctaagacactcaaaaatttgagctcattgtgattgaggagaaaccagcccaaggtcaggcatgtatattttttggttgtttttgttgttgaagagacagaggtctcaccatatggtgcaggccagattccaactcctaggctcaagacaccctcccacctcaatctcccaagcagctgggattaccagtaggcgccgctgtgcccactaaggtcaggcttctaatcacccaggtctgacccagattttctcactcctcctctatcactttatttctttatatgatttggcagatatcaaaagtcctccctttccaaatatctcactatactactttgttttttacatatgggcagaatttttcaccattgcactcatttttctaaatcaggcaggatttagatttctctttctttcctttctttttttttctttttctttttttttttgacagattcttgctctaacacccacactagagagcagtggtatgatcttggctcactgcaacctccccctctcccgttcaagcgatttggtgcctcagcatcccaagtagctgggattacttacatgtgtgtaccaccatgcctgactaatttttgtactttttgtagagactgggtttcaccatgctgaccaggctggtctcaaactcctggcatcaagtgatccaccggcctcagacttccaaaatgatggggctacaggtgtgaaccaccacacccagccatcagtgggttttttaataaaacaaacagctaaggatgaactggaaaccacaaactgagctctttttctatgacctagcctccccggttaaccttaggcaaagagtagtggtcagcgggcctgcctatgggtaaattctaaaagcctcgccagagacacttaactttttttaacccctgtggttaaagaggacgggtgggtgcagagggaattttataaacgacacaaacacaaacaattttaagtcctgaaaaaattcatttggatgtttgttttgcttctgttttatagcttgttttaaatcaaagactacaccttcctgagacaagcgttgattacacacaaaatgaagactggccagggccgtggctcaagcctgtaatcccagaattttgggaggcccaggtgggtgtgtgggtagggtgggggatcctgggtatctcgtaagcccaggagttccagaccagcctgggcaatataggagagccccacccctaccatctcttagaaaaatataaataaataaataaataaataaataaataaataaataaataaaagccgggcatgggggtgcgcgcctgtagtcccggctacttgacgggctgaggtgggagcctggaaagtcgaggctgcgccactgcactctatcctgagctacagagcgagaccatatctaatgtgggggggtggggtaagaggaagggggagcggggagagggagagagaaagagagcgggaaaaaagaaggaggaggaagaggaggaggaggacacaggtgtgaccattgtcctccagagctacagattctggcattctaaaggaagaaggacaaagaaaccaaaaccagtttctccaaggcttcagcttttcagtctgaccatttgatctacattccattattttggcagcatggtgggagtggattcggaatggacaaaaacccttttcagaattagatcagctaattaaaatgcacacaaacttctttgttccttcacctcaaggagcgtccttggaaagcaaacatacttcggggcatttcagtgggggcgcagtgcgagggtgtcctttgcgcctcagctccggagaaaaacgaaaggtgggtgggaaactaggatagaggtgaaaagtaagaggggactgaatcagcgaatgacaaagggagcagggctccggacaggggtaggaggaagaagaggagtgactggggcttgtgtcaagcttcttctgaatggctagacagccgccaggtgggagaggcggagggtgaagaggcgggttccgcacgcggttagcctggggctgatctagtcttcagctttcaccggctgggagtccggagctgcagcagaggccacacccagggcttggtggtcccgcgctttccggagctcagcaggcgcttgctgcttgaaccggtcaaagaaggaacgaatgaatgacccttttgccaggatggagacccgggggcctcagggagctgcgaatcccatggactcctcccgca

SEQ ID NO: 36372 - DNA, 2300 bp, Homo sapien
gggaaacggccattcttaaaaattacatataaatacaaacactacataaatacagcacacacagccaactgtactaattgcaaagaaaagaccacaattcaatgagagataatagtggaaacctggttcaagatgggagatcaatgaaggcttttctgaggaagtatcattttatctgaaaactgaagaatgatggatgatgtatataggacagggagcagagaatatgtgggaagatttccagttacaaagagaagcttatgtgaagaactgaacaagagaaataatttcccagatggtagacaatgcagcttatttcaatacaaatgtctacattcagaataaggcaaaaaatctgaattcctcgaagttgaacaggctgaagtcaagtgctggcatagtcccatcacctatatgagtaaaatcctctactccccatgtgttgagtggttgctgagctgctggaaatgtcccagagaaagagagatgccatcggtcttggattgtttaatatactgtgtcactttttattaaagagtttaaaaccgcattggtttatgatattgtttagatgttcttgcaatttattatttgatacttggttttcacaagtttatgcatagtttattaacatatacacttttcatttaggatttgttggagttctcatgaacactctttaggctgctgcaaaaccaaaaattaaagtgtgagatgtacacatgtattttcatagctaagcatgtgaacccactcctcttgtactatgctgtaacgaataatggaaatagtcatttttcaaagtgtctgtatatttataaaatttcaaatatcacttagtcctaacatatcatgttctactgtggaaaatcataccagaaagaccaaaaaatcctgctgctttgttttataaatatttattacaatgtatgtatcctggcagtcagttgcactctctctccaaattctgcatagaatcttttggaaattgggcttcatgaaagaaattgtatttaactggtagctcttagttctcaaaaacaggtttattctgccatgagaacaattccaaagaggagacaagaattcctccacctatatggtagttttgaattgcttagcatcttatttacacttgactatctataaggatgatagattagttatgttcctgtttaagtttactctcttcctatttaagactaaaagatatatcacaactcatttgtgtatttccatattttcacttgcgtaaatcagagtaaggagtcaaaaacttcataagtacataaaactgcttacagtcctatatattccccattgctcatgggataatatttagcatctagcatcctcggtactgaatgtgagggtctttacaacacagccacctccatgacaacattatctctgccacttcctccttttctcttcatctcttttacattccagctttgcttgactgattgccgtttccaaaacatgccatgttcttccaagatttatatcattccctcttatctgttttacttgaaaaaccctatttatgttctagttctcacatccatattgttttatatgctaatgttcttggcctaaggcaaaaagtttcactgccttatttatgttttataatacttttataaccactattatatcacatatttgtttttatataatcattcacttatatttatgttttcccaactagattcttaattttctcaagaagttaacagaccaattatatatattgctttagattcatgccttctacaaagcctaccacaatatttggtatacaataagccctcaagaaatgtctactgaattaagttaaacatgattctagaggcctgtgcaatagattgttggcatcatccaggttctcacaatttcattgcatattcttcagatcaacatttagaacgacaattagattacagagcataattttccccaatgggtggggcattttaatcagtcttgcccattttttttttcttgtgatgtcattggggtgccttgaacatgcagtcaaattccacacacagagcagtcctttgttcttatcaacatctcacagcctgtgaagctctcagtgtgcctctgtcctttgccacaaacatgaggttcacattccctctcatggctatagtcctggaaattgccatgattgttttatttggattatttgttgagtatgaaacggaccagactgttctcgagcagctcaacatcaccaagccaacagacatgggcatattctttgagttatatcctcgtgagtaggcaattta

SEQ ID NO: 36373 - DNA, 2300 bp, Homo sapien
aggcaccaaacttacaagtcttctattctggatttgcccttcatacaaaatctatcaacactttttaaaaatctcttcatattccacccttttgtcctatttctactactacaaaattaatctggggaattgttaccacacttatttttgctgccatcaatttctcagctctgtaaatcaccccatgcagtgagatcaggtggcttttatgaaacattcttttgatcaaagaatttcccaaccctccaaaatgtcaatgaaattactttcccatgttatacagagaagcaaatctccttagacttctatacaaagtttccccaaccttttcaacagtctttctgtcttgaatatgccttgtgatataatgatttatctgcttttgttcttcaactctttctcccttcaaatcaagccatacgcattattcaataacagttcaaatgtcaaaactttcctaggttttacccagatcatatcaactcacagaactctcaattactgtatatatttttggtcgccctacttagcattaaactacactacctaatagtattctttacttattcatatacatactcctttctctcatagtactatgagtcttagaagaaagagattttatgtccttttttctgtattttctaagaatctatgtcgggtcaatatttactcacttaacaaatatttacaaactaccacctatatttggtattgtgttagttttggagatacagcaataatcaagacagacatagccaatttctgaaattcaggttcaccaacaatatctggcaccacagcgctcaagttgctctcattctgatatcatcaatgtgaatatgggaacaagtaataattacaggaatgactcttctccaaaaatgaaaaataagatattcacagtaaatgatagactattatagtgctgagaatgaattgttcggcactagaaagaaagaacaaataggtaggcagagattttgtgcatataggtatttgaaatgtccaattaataacttaagcaagatatggtgaaaacatgaatatagaagtgagggacagattgaggactagatttcataaatatttagaaaggcaaactgtcagtaatgaattttgatattggatgtagatataagcgttaagcagtctaaattccaaaatttttagtcagtgctgcatgaactgaaataagcagcaaaagaaaactaaaacaatgtctgtgtgctgatcccttgaaattaccttgtaacactgccaaaggaaaatggcactgagcaccaagtttgttatagtttcagttgtgcccaagtgagtctccagagttggtgaaatctcaagcctcttattgcatggcttacagagaaccaaggtatgacggatattaatccttggcttgacatcttttgacccatctctcttcctctaggtcataagcgaattcactccttttcgctttgaaaacaactgtgaatagaagaaaatgcacctattactcatccgccttctgagagagaaaacatgtctttaacccatgcttgatacgtatgctaaacttgcagccagtagccttgggtcaggagttctgcgtattttcataagagttgttcctgttactcttcgtgaattttctcaccataaaactgttgccaacggggaagagggacaagaacatgaagtgtttatgagggagcctgaaactgacaacctgtgtaactggagtgcgtcgttggcatgacactggcagcgcactgcaaacttaagcacctgtggactcctaattagctctttaaattgaactacattaattcaggcattcttgtttgaatgcgaacgcctcctttttcaagccaccccctgggcaacccgaatccttatatgacctccctcctcctcctagtacggcgcaggtatgcgaacagacattttctttcctcatcaactggtggtaatgagaaaaagagaactctgcttttcacaagggaaaacgtgcaagattttctccgtagtaggggaggcgggggcgatgggaggagagcagctcacgtaggcagatagcggcgatgaaagcataaagcccagtgacgtcgcccacacgtggcgcctggcaagtgaacaatcgcggtgagaggggcgcgccgcagctcctcaacgccgcaacgcgccggcccaactgcaggaaggtctgtgctctggagccagggtaaatgtaagacccggattggagactagaaatggctagggacggggaggtggggtgaagcacaggggagagaaccatcgttgaggtgaggggg

SEQ ID NO: 36374 - DNA, 2300 bp, Homo sapien
cactgtaaaaggaaataaaattttactctcctcttttgcacacatgagaaaattcaaccagctccccctctgggtacttgaatgatgagctcccgtaattatataccaggactctgagggcaagaaccaagtcttgttcacttgatcatgtgcagcaatattataacatgttatcctgaatagagtgtacaaaacttgataaatgtctcctaaaggaaagaagaatacctaattgtctttgacttacaaatgaaaataagaatctgtttttcctcttttgctctcaaattctgcaggagacgcactagagggcccatctctaaatacagcacactaggagttagggcatcaacatattgatttagaagtggaagcagggccaggttaagttatttctgagtgagtttcaaggtctataacactagtagtttgaaatcttctggagctccagatctgcattctggcaacatcatttttcgtggattctttttttttttcagacttcaagtgtatttattaatgcattggacaaaataaaaccacacttgttatcaaaagtatatctcccctgctcccattttcttgttcttccattggaaatatctttgaaaaagtgatacaaatggataccagcaaagtcccatatttgcggggtgattgtggggcgatgctgggacgagatggtttgtgacattgactttaatagcatgaaaatgggttttgcaagtgtatatcaggctgcatcccaatacttagattcacagtgggcggggtggtggggtgcagaggtgctggttaggagaaggaaagctgaatttagtgctgggaaccagtctggggtggaaagctcttcctctgggagttctgtggggatttggtgttagctaagttcatagtctaagggagacccagtcccagcccccagagctgaggttcaggaggaaccagtgaataactaagaaggaagagcttttgtaggatgagtcactacttctattaacgttcagtccaaatcagaaggctaaggatctaccatatactatttgttctgctttcttgtttttaaacttaacactgaagcataagcttcttctctgaggttacaaaacaaccataaatgtatagtggtttttatgtctaatatactgccataagaggatgtattctcatttacttagacattatatctccctattgctaggcatgtaattaatttacaatgttttaacccttataaatgataacatgatgaaaattttatgcttaaaactttttagtatagtttataatttcagtagaattctaagaagttgaattagtgagataaagaatgtgaacatattaaggatattaatacagatagggtgagtaatcccttaaacatgagaatcaaattattacctttttgttttaagatccagaggaaaaaaatgttgcctttttaaatttgaggcatggtattaaagaaagttttgagaggaaaggagttaggatgctggctgcatgggtaaacttgaagagagtagtttaaaggtatgcataaaaagcatatacgtagaggactttctagggtttgaagaatggcaagtatatgagccagatccctgacggaaaagaactggcacatgctaacttttaatttgaagaaatgttaataaggttatatttataaaagtgtagacagcacttaaggaaatcagcaagggctaatgcagtagtatcccagtaataaacacagttggaagctactgaattgttattgtgaagaatccactcctacaacctaaagacagtagttacacagagaagactgcggagctgcggaagaaggaggtagaaagtccttagcatttataggcatgcttcaagggcttcagtcgggaattttggtttgttctttatagtcccagttgaatgcatactttgaaagctgaatccactgtcattctgctggctccatgtgacaagtcttctcctgttacattaataatgaatttgggataatggaggtcattacgtttctcccacccccatgttactcaacagcatgtaccaatcattttaatgcagatccctgttccaccggttttgttttcccagcaatgacattattcccagtgctgttgttcctggttgctgggctgcttccatcttttccagcaaatgaagataaggtatggttgaagtcaaaaatcttcagaaaaattcaggcaaccatgagggatggcaagctactagatcaatcttcaaaagtgaaaaggtctagagtgtctggtacatcataaagtactcattagtag

SEQ ID NO: 36375 - DNA, 2300 bp, Homo sapien
acatcatggtgcatctagtggtcatttagtcataactcagtaaaaagttagagaaaaactatcaagtttgaataatgaggcaaaaatatttttcctttttatactgttttgtgtctacttatggtaatttctcacagaactgcctatagcttagtaagtcaaaccatgtcctaaaactcaagtgcaatcccacagcttacaaatattaggggtaggtttgtctagatacagaagaaaagtgcataaagtgggagagaattaacactggaaatacttactacatggcaggcagcttacatatattatgtatcacaattaaatacaattaatattattcccatttatgataaatatgaaaatttacaatcagaataataatttcctaataaagtaggtgctgtggctcatgcctgtaagtccagaactttgggaggccaagacaggaggattgcttgaagccagaaattcgacactagctgggcaacatagcaagactctgtctctacaaaaaaatttaaaaaattagctgtgtatagtagtgcacaccatggtctcagctccttgggaagctgaaataggagatcccttgagcccagaaattcaaggctacaatgagttctgatctaaccactgcactccagtttggatgatagagtgagatcctgcttcaaataaaataaaatatgatataaaataaaataataaaatataaaaatttcccaatacacattggtatagaaatttagcccatttccattaaaacagaaatatcaagcttttaacaacattctacaccactaagtagagaagagaatgggctgtggatgcttctgggtctggtccttccccacaaaatacattttgccacagaaagaggattgtgtagaaggttgttccatggtgattttttccacatagctgatttggtttattgagagcttccacttcacatgttcataaagtaaacagattctaggagttacttggagacatggcagcaaatggttaaccattttttaatggtaaaatctgacctgagtttctgagttctcaactctcttataacagacatttagaagtatccaattcttgaactcaaaattaactataattttaaaatgtgcctattgtgtagacattgatctgtgattatacattttgtcacattgatcaataaagctaaatataaaaatgaaaatgaacagaaactattgaattatgcaccacaaggtgcaatctatatgccaatatgagcatgcagaaatgtctgcgtgctatgtatatgctacttgtgatttattaatttatacttctttatttatataaactcaatatttaagattattgtattttagaatcagaggaaatctgaaattgttagtccaccccacttcattattgtgctatggaaacaagcctggaatgattgacatcttccatagatgaacagaaccaaataatgataatttagcttggagatcaatattatctttaattttatacaaccagaaaatacaagtaaatacagcacatctttgaatatagaaataccaatgagttatggtgtgtttggccattgagttctgaaagtcactgtggccttgtatttacaaacattaaagataaaattattatccaaaacagtaatgtccaatagattattaataaacattttagatagctgtaaaaaacattgtgttctctagagttcataaaaattatgagcttaatttcaatccaacagaaataattctgaaaactctaatgttgtgatgctaataattgggctaagaattttcaaactattgactggcaaaaacatggataaattgtaatatatgaacttcaaagaataaatgcacaattacaaaacttgatatagcaatttatttttaaaagccatttgaggaatcaccaaataatttcaaaatcatgactagaaaaccagcaatgaaatttgagactactggtatgacaaatcctgtttcaggccttgttgatctagagttacttgcacaaccagaatttgccaaaacaggaaataggtgtttcatatatacggctctaaccttctctctctgcaccttccttctgtcaatagatgaaacaaatacttcatcctgctctggaaaccactggtaagtgataactcctttatttcaaggtgaacattatttatttcaaggtgaacaacacatttataccttatcaatgataaagtgatatattcgtatattttatctacaattttccaaagtttattgataacttttaatgagagtaattatcttaatatattc

SEQ ID NO: 36376 - DNA, 2300 bp, Homo sapien
agaattattcacctataagcttgtgatattcaaacttaccaactagagtattatatttatggacagctgtttttgtctttagttttacaaactgaaaacctcttttgcaaagttacttaagtcatttcctttttttgtccacatcacctgtagtaaaatttccacatcacatgtagtaaaatttcctatatattacgatacagttaggcttatctgtcagaggctacattatataatacgattccctaacactctggatcatattttttatttgcattcattaaagtttactctctacaacgtacgattctatgaattttgacaagtgcatagaatgttgtatccaccactccagtacctcatagaaaagtttaccacactaaaaatcctcctgtgtatccccattatagttgaccacgctctcttaacctgtagcaaccactgatatgttttccatccctatagttttgccttttatcaaatgtcatacaaatggaattatacaataactacaaaatttttttgcctggcgtctttcagttagtaaggcacatttaagttttatccagggcttttgtgtaagtaaatagcttgtttcttttctttttttaaaaaataatattccattgcatggatatatcacagtttatttatttattacttgaagaatatacaattttggtaattattaataaaactgctctaaacgtttgtttacagaagtttgagagaatacaggtttttgatgtccttggatgaatatctagaaataggattgatgacttgtatggtaagtctatgcatatttctaagaaattgccaagctgtttcccaaaatgtctgtagcatatttcattcctgggagcaacaaatgagagtttctgttactatatattttaacaccatttaagtttgcttttaaatgctgttgactcgatgttcaacattgaggaaccgataaactgttttttaaagtggctgcaccattagacattcctatcagcaataaatgaggattccaatttgtccacttctttctcaacacttgtttttattttttattttagccatcttaataggagatgcctcaaatatatttctgtcaaagccttcattttacatatttagttcactcaacttatggagtagaatgaaaaaaactgtaaagccaattttcattactaaaccaactagccacatacatttgctttctccaaaaatagaatatcttactcactttcaattctaatatatgttttcatcttcatgaaaaccatgcatttatttttcagctcaatttctaagttgtacaggtaggaaagcaaacagagaggagacaaaaaataaggagcctcatcataacattgtagtctgaaagaaatgtcaccattactttcagcacttgttactgatactctctttgctatgatcttatgggattctcctgcagaagtgaccaaacattctttcatggtagtctgaaaatggaagaagcaaagtaatgaaaatatgacagcattcccaccacgtcccagaatagatctaaagatgaagactaacaacaagccacatcctcaaagaaatatttatcaagacaaggaaaaaacagaactatactatcctgacttgaataagcaaggtttcatatgaaaatcattatttcaaatattccttttatttggcactgcagaggtttttacatatcaaaatggttaagatttgacatgaatgaggtgtatgtaggtttgcgggggtgggggtggagttctttttgttttgtttttaataataaaagcaactgttaaccgagctgtggggtgggggcaaaaagagccagaaggcggcgcacacctcaggactattcttgtttttttagaaccattcttattctggggtttcttcacctacccaagtctcgcctgaagccaggtacagctctattccactacatgaccctctgcccaggaagttggaatcttcacctagcaacacagttcagatcgagattgacaggaccatgagccaatcacaaagctagatttgctttccagtctaacagtggccgttgtgctggagacagtgaggagaagaaaggggcgggacaagggcaaaggcgttagaagtcaccaccgacccagcccctcaacagcaagttggttcttcagcattaagatccaggtgtcagcctatgtctttatattgtcaagatgtctctttctaagaagttgactttagacaaactggatgttagagggaagcgagtcatcatgagagtagacttcaatgttcccatgaagaag

SEQ ID NO: 36377 - DNA, 2300 bp, Homo sapien
agaaaaaattctgtcaagaagttgctctcaactgaacaataaagaactaaacgtttgaggcatccttttattagtattgtctatttctatttgttatgaatctttgttattttctttaaaacaattattactctgtcaagcgcatttgcaaactacttatatggaatgttatagttcagcatctatactgtataaaaattgcaaatatacgaagaagaagcacctacagtatgtgatcattcgcgagtcaagctcctgcttttcagttgccttcagaaaattctaaaatgctgaaggtagcgtatttattgatggtaccactaatataaatatggacacagtctattggaaaagataacttaaaagataaaacaatgccacaaagaaacaacaaaggatttctccagtataatctgaaccatggtaatattttcaacaagcaatatctaataatatctgtttaatgcacaaaccattttgttttgaacaaatacaagtaatttgagctttttttaaatatggtcataagttacccatttgctattaattgtatattaatattcatctttcaggttttcacctcctttagtagtcttcatctgtttgttaaaaatgtcttaacttttcttccataaacccctttacatgagcatgtactcgtagaaactcctggacctgcagttttctttgctcctgaattctttcctacaacatatttcatatattataatatttttaaaaataatttaggttagctgaggatctatttttctacttttccccttacagtaagataatttatcaaatattatttaccctataaactattttctcttttcatttatttatttatttgatttttatgttttgtgtatatatagtaggtgtctatatttatggggtacataagatgttttgatacagacatgcaatgtcaaataagcacatcatggagaatggggtattcatctcctcaagcatttatcctttgagttacaaacaatccaattacactcttttaaattatcttaaaatgtacaattattattgactatagtcactctattgtgctatcaaacagtaggacttattcattctttctagctatttttgtacccattaaccacccctacctgctccccaacccccaactaccctacgcagcctctggtaaccatccttctattatctatgtccattggttcaattgctatgatttttagatcccacaaatgtgagaacatgtgatgtttatctttctgtgcctggattatttcacttaacataataatctctagttcatagaataatcattctatgcctttttctctgtgatttcaatattcaagcttcatatttgtcttaatatctgatagggtgaggggcttcttttattatctttcttaaatttccctattaaaaagttcttattttcccatttaaaacttacaatatgttcatctatccaccctctaaaaatcctatggattatgattgtctttgtatttatttatagattgtttgagaaaaatttgcttctttcattgccagaccatctcacccatgaacatgtatgtcagttatttttccagattttttaaaaaatctgtttaatagagttttaacgtgttcttcattcatactggctaataaattttaattggactaatctcttgatatttcctaatatattaagaatggaagtgaaattattaaacctgataaaaggagctgctaaacaaatataaaaagtaatgtatattatgtacaaagaagccattgtaacatgcctgtcatgactgcaatcattcaaagtataaaatatagctgcaattacttaacaaagttgtttaaaatacccaggagtattttgaaaactagacatccatctaggtcttttctcttatatgtgacttatttttcctttctgaaaactttaaacaattttccttcttgctgtgttatttaaattcattgtgatgtttctaggtatgtgtcttaaatcttagctgttttgcataatgcatgatcctctctctctctctctgtctctttctctctctctctctccctctgtttttcagaggtgagggtcctgctgtgttacccaggccggagtgcagtgactacttacaggcacgatcatagtgcactagagccttgaactcccgggctccagtattactcctgcctcagcctcctgagtatctgggactataggagtgcaccaccattcctggcataatcctctttttatgtgagatcttatgttacttttcatgatacataatcattttctc

SEQ ID NO: 36378 - DNA, 2300 bp, Homo sapien
atgattttaaaatcacatttaacacatgaatgcttccttcaacatgtattatatatctgggctttctaaaatttttgttagccaatctctgagtaaatgattgatttaaagtttcttttaaaaatggatatattcagacaaacatgatgtgattgtaaacacattagcctttatctatctctcaagatttttctgggataatccagttagaaatattctatcatgttatgatatgctagataaatgtgtcagattattattttagggaaaaaagttattgtagatagtttcctactatgctaaaaagcttaaacagaaagagaacaatctatgaaaataggaaatttatgaacagaaacagccaactggcacccatgtttgggactcacatgcaaatcaagttattccttgctttccaacacttcccaaattcttttaaaaccatatatgaagctggatagcaactctatatgaagacatcagtgctataaatacagacagcattgtgttgggtagagcaatgccaggaattgccaggaccaacagataaaaccagagcaattaagtttccataaacacttgacttgatgttgaatcaacactctcctttataaacagcagtttagcaagaaataaatgacaattatacatttctaatatataaaccatgctggtttggtgaagtaatagcattcttttgcagctttctttttacaatgtagtttgttggagaaagttgctcaataatttggaagtgttaatttcaagatcatgtaaaattctttaaagccaattaaagttaagctaaagataattcatcttatctatgaaagagtttacagataagcttttctatgtttttagattaacaccatctccctcaaccaaaagagaaattcttctaggtataggtgagcaatttttagtgatgtttagttctcctttcctgcagatggttttctggacattcattatatactttaacaagaccagaaagttctatcttaagagactctgatctttcttttaatttttatttcctaaccctcaccccagaactaacacaaaataacttatgactacacaattcttaccttatttttactctttccttttagatattcaattgccctttcttaagcaagatacaagaaaaatattttttattaaataataatgtattctttcttacaaagaacaaagacttaattcataattttaaaaagaggccagcaagctatgacttcaatataagcgaccatgcactcacatatacaaacatttcccaacttttcagaataataagacaattcaaaaacatctgattacacctagtttcagagtaaattttctattctcatatgtgatttctgtctgtgtgatatttctttctttgttctaagtgtcctgtgatatttctcatcatgtgactcaaatgatttctggaatttttagtgttttacaatttagtgttcagtatttctagacctctcaaggtagttagttgcttccacattgtttctggacaaatctctattagaattctcccaaattgcagaagttttccttttaaccaggaaggtcttaggaaaatggactacttatcttttcattcccagagcctctccaagtatgtgacacattatagaacagttaccaaactccataagattgtgtagtttatatgtttggtgattctatgtatcctcagcatctagaagagagcataaatcatcttaagacctcaataaataattactgaatgaatttaataaagttgagaagtttctggaccagcaagtcattttcccttacagtgacctttgttatctgattgtggctctgctgaatcatgcaactaatctttgcagttagttcccagggtaaaagtttaaaattggtgagttccattgatgatgttgccttggttacaaactagaaatgtccccataatcatgatttgtaatcttcacagactctagatttgttctgattatcatgtattcatgcctggtgtccaccgtaaatcccttgatctgttataggcatttaccttgtactgactacctcattgaacaaatctcccctgtggactgtcatttaaaagcacaaatacactacatagagaaaggcttggttcttatcaggacacaaatttaaaggctgtgtggacttgggtaagttatataatatctttgtcagtttctttatttgaaaataagattcataagtgactacccaaaagcattgttataatgttaaatgagattacatgcaaagttttattctaatgctattgt

SEQ ID NO: 36379 - DNA, 2300 bp, Homo sapien
gtggggcaggttgggaagtgggggtagttaagggatagagaaaatttacttagatagaataaataagatctagtatttgatagcacaacaggtgactatagtcaacaatattttatcacacatttaaaaattactaaaataatagaattagatttttaacacaaagaaaggataaataattggggtaatggatacttcatttgccctgatgtgattattatgcactgtatgcctgtatcaaaatatctcatgtaccccataaatatatacactcactctgtaccaaaaaaataaaaataaaagtaaagaaaaggataaaaaacatgggagggagaaaacacagaggaagttaaaaaaatacagtgtgtagtaagcttttaatcaaaacacattataggtggagactaaaaacttgctgttgtttgttgttgctgtttaacagcagatacaggtattctggtgatgctactctattgcttagttagcctaaacacatgatttttcactatattaatggtatatcataattgttttctgttaagtatttatgtgtgaataactgtaagaaaattgttggttatagattgcatatatatttagagtcagaaataatggcattgccaagcaaccacagattgtccaagtaggtggctgagatagtaacacctttgctttctgatggttcaatgtacacaaaccttggttcatgcacaaaattattttaaaatattgtataaaattatcttcaggctaaagtatatatgaaatgtgaataagtttatgtttagacttgggtcccatccccaggatatctcattatgtatatgcaaatattttaaaataaaaaatttgtaatcccaaacgtgtctggtcccaagcattttggataagggatactcaacctatgtttcattaatatagccacatcaaacacattgaactctgaatcgtgttcacattatttcatctgagttttcaccacaaaattatttctctgtgcaaaatgtcttcctagtttgctgaagattgaccccattgtttgttcttggtgaccaatttatgaattagtagaaatatcaccctcactaaaactatgcaagagagaaagggcatttttaattttgtttcatttacctcatctgttttaaaatgatgtaaagcagaagacagtattatttaaaaatctagactcagaagctatggggcctggatttctatagttccgagattttaaattgcttctcagaaccatactccattcgcatataagacagaaatgataatatcttctattacacaggaatattgtcattttcttaactgcattaaggaagaattgtaaatggattaagaaaattcttcctcttcttatattagtggagaaaaacgtccccttagcagacaaggtgagaggtaaagaaacagaacctggaacaggtacaattaaacatatgcctttgtgagagactaaggtagcatccttgtttttgcttgcttttgaaaaatattcggataatatacagcatactctggtagatagttgtatacatcattttatttatttgtgcactgtgattactagatcagagatttttgactattagtttgactgttgaggtttttctccaggtcatgttgatggaagtgattttaaagtaatatcacatggaacatattgtctttctgctcgtggtctgaattaaaaaattggctcccaaatttatataaggccacgacttttcatctatattgtcaataaacattccattctaatagaaagagaactttgtgagagagtaatttgtgggactatataaatccaatgtcatgattcactcctacccatttgctctctctccttctgatctgcttggaatttctggaccagaaagaatcactgaacatatcgcttgtagtaggctatcaggttcatactatgagagtaggcctatattgattttatcttaaataaatctgcaaaagcctaaaggcaagatctaagctttaaagggctcgaattttcttaaagttcaaaaaaaaattggaaagttatttcgtgtgtgtctgtgtgtgtgtgtgagctttacgcattcatagtccagtttctttgcagctaccaggacagagcttggtgagataattcttttattcttcaacttttattttaacttcaatggtacatgtgcaggttagttacataggtgaatgtgtgccatggtggtttgctgcacagatcattccataacctaggttttaagcccagcatccattggctattcttcctgatgctctccctcccc

SEQ ID NO: 36380 - DNA, 2300 bp, Homo sapien
aggattgcagaaaatatcataaggaataggaaaagaagaaaagcacacctaagaaattgataataccaaggtagaatctgtttttaaaatcataggagcatagaataaaatatagaaggacaaatgccacctcataagatccctatcagaagctggaggcaatatgtaaatgaagagataaagagggggagagatatttccttagagttagtaattacattgaagtcaagaaaggtcctgtctttaaaagtcaaaatgcattttggaatgtcattctatagctaagtcataaccaaagtgtaattttgtaaaaaggggctctatcacttatgcgatcacttgtgggaccacagcccttcatacaaagtgggaagtgtgcctccatgacagtctataaccatacagcctaaaacagagagatatgtttaaatttcttcatgctgactcccataccacttgcaaatccacaaataaacaataaaaagacctatctgaggggagagggaaaattgtctttaaattttcttgttaatgggatcactccaattaaaaccagtaacaacaacaacaacatacaagttaattctatattaacttatgaataacatcatctgctgcctgttcatccagtgacaccatgccccaggcatcatggtaggtgccaaaacacaacagtaaataagaatgttggacattctgcttttacagagcttaagctctagtgtagaaagaaacaataaaagcagaaaaataatgataattgcgggtcattttttaactttgtacacttgctccttaatcttggtcacctcattcattcttataaattccagtgttagtatagtggtcaaatatatatctgtttttccaatgtatctctttcctgaacttgacattgctgattccagctgtgtgctggatcaatacataagcatgtgcatattctgccattatcatagctgtccaaaactgattcaatcatttccctagttaaacctttcttataagtctttatgtgtttaagtttattgccattaactctttttaagctgttcctttatctaagactatattaagcaataatttttcagacgtgtgctattccccataaggaataactaggtggtttcttttttttttcatggattgttacacacacacacacacgcacacactcacaccacattttccttcaacatttattttcatcttctctttgacatcagatctgggaaactcaacctcatattttaatttgaaagaactgaaaagaaaggaagaacaaatgaaagtcaaataagatgtttgaatgcatacgttttttgatccattttattattgatttcgtaggttgttaatctacaatcttgaacttagcaagcatagtattaccaggcaagagagttggcatatcttccatttctggttcagatgctagcttgcaatagtttttggaaatccacagaggttggtttggagagaaactgtgagacaggtaatcacaaaaaagatattctaatgtttagttatattacagtgtagcaagggctcctagggaatatggcacaagccccattggttgattcattctaacagggttgaaggaagcagagaaaacaattatcagaggaagtctcacactggaaattcttgaaatatccttatatatgtgtttcctaagttttttttttttgaataattcacctgtattttactttctttcctcttttcttttttagttttaaatttcatattcaccagcatctaagatttattttattttcactgtgagtactgagatataggaaacagatattcagaaaatgctagtaaaaaaattcaggttaagttccttaattccccctgtttacttgctaggtgcaaatagatggcatgtatatactaggccttgcttttagaccatcacaagccagaaagttgccatggcaacttcagccactgataacctccatgagaaatgaattcccaataggtgtggagttcttggcagtctacgcagcactttcaaaccataaattcactcattattattataatcatgtaattaagtagggctgttaatactattcttattttcaggtgacgaaacttcagctttaagaggttaaaagacttgtccagagtcatgttaacaggtaagtggcagacttagaactcaaaggcacactttctgatcctgagtcatacattttccagagtcagcctaattattgaaaataagatctatatttgcactagacaattttaaaatgtagaacttttggaataatctgcctaag

SEQ ID NO: 36381 - DNA, 2300 bp, Homo sapien
aaagggtcttttctcactcttcaggatctttagtttcccctcatgtccacaagagttcaacaagcatgtaagttaaaccctggacactctttgtttggatacctaaaagtcactcaggaaagtgaaccatgaaagtggggttagggggtggaatgcgatgattgccagttagttggtgatgtcctgatgttcacagggtccaggctactggaggtcattccatggggtgtactcagttcaaggccagagctcattaccgagagtatcataaagctatatcttctgagtgcggtggcaggggtgaggggggctatgtgtggctcttattccagacagggacaaacatgtggaacaaacactctgggccagcaggcagagcaggcggccacatcttcctgagcttcctcattgttgttccccggggagagggttttgtgtctgctgcctggacctaaactgggaagagaaggtaccgtcaccttcaatgaaggtgtatctgacagtaggggtgttggaaaggagattgcaacatgtctgagaagggctatcctcttccatttgaccgggactaactgggaagccaatatcatccaccaggaaaagcgcacctgggcattccccaagataacctgcaagtcctacatattcttccagggaatggtctgcactttcccaggggcaggggtgcctgagttaaggtcgtgggggcagtctccatctcccagagatgattagttattttctccgtgggtaagctatggaggccccactcagacctggtaaacaaagactccactgcaaacatttttgggattcaacccctagagccaacagcactcattttaccccttttacttaaagattaagttggatattcttcctttttgtcatcattggtctctcagtctccttacttcattaggccaaaatatggaatttcaaggaggggtgggaggggggcagcactggcacaccttgaaatagggaacaagtgttggctgctgaccccatgtggggctgaagaatcgtgtatctccatttcagacaatgcatttcaattcttgtcgtgtgcctttgtccatttgtataaagcaaagagctctgagtgacagccccagttagcctgcatgagcagatcctaataaaccctcccaaaccccaacctaaaaaaaaaaaaagccacatgcctgtttgcctgaggcttattattaagacaccttctcagcttaaacacttaaaagcaaaccaaatgaaatggcaattaagactgaattaccccttctatctatgagatgagtctgtggggccagccagttctttcttataatgtagacactgaggagcaaagcctcagtatttcaggtttatagctaccaccaccccctccaggcactaaacaacttggtggaggaagctgaattttgaaggaaggaaagctcaaaaactgtttgaaagtcaagaaatccactgaagagatggaaatatgtgtgcactgcttccttcctgccctctatttataaaatataacttccaagcatttaagggttattttgggggtaatagtgttcaaaaacctaatgctactgctgaacggtctacaccccaccaccaccagcagtgtttccaaaagggaagaagaaaaacacaaaagaggggggatatggtttggtttggggagtgaaagacaacagtttacctaaatgtagaatcttgtcttacatctttattcccttgcatttttcctaaatgcattgccagttacaccatttcctgatgatggaaacttgggactgtccatcaccattatttatttttaaagctgctgaaaagtgtaagccaccgcttgattttgcctttcaaaaaaggggaaagaacccaaattcaatgtaaatatggaaagaccagcattgtttccacttgggcgaaggcagacaccccaatctgggcaaaattgattcgggtggttgttggaaaaagcagctttcagcatccagggagtggaaccaataggaatgaacacttccccatataaaaggaagctttaattaatatatatttctatctctaatatacatatattggagctagagctctagcttcacaataaaatgtgtgcaaatactctccacagagataagtccccacctcagtcggtatagaaaagcatgataaaggttggaaaaaatggataaaaatgttgaaagaacctccagttccttattaggcgaagatacaatatttattccttgtctcctgggataaatctcttctgcctattgtcctcccagttctcagtgctg

SEQ ID NO: 36382 - DNA, 2300 bp, Homo sapien
aaaaagtgagatttttccaaatgcattttatttgggttgtaatgatctttaggtaataacaatgacagaattattgatttgaaagggagaaaacaattatttccattaattaaatgtcttgtgcctggagaatctgaacttccaagtctataatatttatctttcagattattgatctggcactgattttagttctagaagtcagggggtgtggaacccgtttcaagtcccaccacacaataagattaagaaaaatcccttctcatctcctaactagctctggaagcaaagaagaaaatctttgctgatgctcctagtgaaaaatctgtatagattgtgtatgatttaaggttaacatttaaaggggaagaaaggaatggagagagaaaggaaggaacgaaaagggaaatgaaggaaagaaaaaaggaaaacaaaaaggaggaagaggagaaaaggaaagacgaaacataaaaaattcaaccggaaataaggggtttatttctgaagttccttctgaagcaccttctttgtgttcttttcctttgacttatctttaaaaattaaattaaaaatctgcagaattgtttattctgcagttcatgaagcttctccttggttttgattgaatcgacgtccaacaaggttgtccggagccctgtactcaaacagcgtccatccctgttcgcgcagagctgcacacagcagtcctggatttaaagacaatcaccctttgcagattcactctcaccaggcttaataacttccaccccaaattgccccatccctcctcggtccctcctggcatttcttttctgtcccaggcgcagagatcctcttctgggcgtctgttccggctatgagaagctctccgcaccctgaaagggagtagaaaaacagaggggatgggaaagggggaacaggggaacagatgagtattcatttcatgataaaattcagaatccctgcgccttaaatggtgcccattttctaagtctggttaatattgttcttgttgctgatgatgttttcctttttaaaaactatatgaatcatcttattaagaaaaattatacaaaaaaaagaagaaactccacatgcactaaaatatttttcactatctctttgaagacattctgcttaaaccttttcaaagattcgggtggccctttcttgactctccatgattaaaaccacttacaagtcatacacaacagatgcaaatataaaatgtccttggcctctgcaaaaaaggctcaaaattaaccttgtctgaacgtgtgcgtacgttgcttccaacatctgaaaaaaacttgataaaatggagactccagccaagaggaatggtgcatggaatccgttgaaaatgcatacaaacaacacctaaaataacaagcagcacaaactgaggtgtatttaagtttccaaaggttttaggtaaaatgaccagaaaatattagaaatggtcatcaacggtggctagcttttttgttctatggtgacagagataaagttaaaaaaaaaaaagttgtgtagccatcaacacagagatagtccttaaaatcccccatatccagcctttcaaaatactctcttccggaacatacatgaataggagggagcttttgtgtttaaaaatcttggtaagtgtccccctttaaaatctacatagaaaataggggactgatggcccctggtttctcattatgaattgcaaagacttcagttagtggctacaatgatgtgtcattttcgatatagaagttataaaatgtatatattatattaatcaccctgaacaactctttgttaaatgcacatttggagtctgcagactgtgtgacccagaggtgcttatataactatatgtgggtgtctgggtgtaaatacgggtttatgatttttatagtatatatgtctgtgggttgcatctaactcctgtgtgtgcaataatgttttttctctttgctgaggcttacttgtccagcctattgtttgagacaacagatataagttgcgatgggagaggagcgtcggatttggtgtgtatcccccatttccaattatagatggatcattacagacagcggagtcctgagaagccagacatctgctcctcacatgaatgcactcacctcctagagaccaggctgccatcatgctctggaagcttgtggagaatgtcaagtacgaagatatctatgaggtgagtcgacacccccagatgcaccttagagctttgcagatagagaatttgagcttcttgataccccaaatgatatatatttttaagctatttactc

SEQ ID NO: 36383 - DNA, 2300 bp, Homo sapien
aaattctttattgaaagataaaatatccctatggattcaaaacaagaactattctgggttcatataggaggtattaggaatggtagaaataatgaataacgctgttcctttaaatgttttattaaccctcaccatcctcaacttggactctttaatatcaacaacttccgaagttactactttcttctttccttcttcttgtatttctttactttttatgtttagggaaaaatagagtatgagaaaattatatagtttgacatccaaactctttcacaatctggtcagacacacctcttcaattttaatatgccttcataatttctctgttccacccattcccctccatctacctcttctcccattcgcttggatgttactaccccttctcttataccctatttctattatggagctatgatattgtgagattctttctatatctatatctatctaaatctgtatctatatctatatatctatatctatatctaatctatatctgtatctatatttctggttcctgaggcagagctactaaaatcagtagtgctaggagactcttttgttcgaatatttgatctttgactctggttgctgacacagaagccctaagatatttgtaattccctaagtgacagaaacattggatacacagttcctaaatcccttggaatttcctgggtgataggaatatcttttttttctaatgagctaatgcctcaactactggatagcctcaggatggaggctggttgccaggggaaccaatcacgtgactagagggttggaacatcaagcctcatctcctcaccatccccatttcaggggaagggagagagtctgaaggttgagtcgatcaccaacaaccaataacttagtcaatcatacctacataatggagcctccatgaaaggctgaaaggacaggattgggagagctttcaggtggctgaacgcatggaagtgtcttgagggtggcacatgcagagggcatggaagctccatgcccttcccacatgccttgtcctatgcgtctcttccatctgtctgttcatctgcgtcttttgtaatatcctttataataaatgaaaaaacataagtaaatgtttccctgagttttgtaagcctctctagcgagttaattgaattcaaggatggagtcctgagagccctgatttatatagccagttgttcagaagcagaggtcacagcctaggacttgcaattggcatctgaaataggggcatgcttgtaagactgagcccttaccttgtggagtctgcactaactttgtttagtatcagaatttggttaaattatgtgacacccagtttgtatccactggagaattggttgctggtgtggtgaaatacctacacattttggtgaccagaggtgaggtattttgtgttatatggagtgtgtgagagtagtaaaaagcagtttatcttgcttttctctcaagggcccttaatgattatttcattgtcttgattcttttacttcttcaactccttttctcagttattatctccattattaactttaaataacatattatgtaacatatacttttaaaatatattaaagaactattatttaatttttaaaaatattttgccgcaatcttccttgcactctcagtatctggcacaattagatgtttaataaatattttatccagttatagatgatggcaagagtgatggattacaaataatcattgacagattataattcatatatcacttgttttgcttcttttcttttataggtacatttagagaagaacagaaatgtacataccaatttctgatgcaaggattcatctgcaaacagactgaccaagtggtcctaattcttgatagcgctgatgccatttgggcaattcagaagttatatccagttgtatctgtgactagtggttttgttgatgtctttagcagtgtaaatgccaatattccctgctctacttctgggtcagtgtctactttctattctatcttacccatcaggcaaatcaccaaagtctgcttcatggatcaaactcctcaagttttgcgcttttttctattggggaacaaaagtacctccaagcttctcttggctgtattctaccatgagctccagagcccccacgtcttcttaggggaaagttttattccacccactctggttcagtcagcttccttattgctgaatgaatctattggtgccaactatttcaacatcatggataacctcttgtatgttgtcctacaaggagaggagcccattgaaatacgctcaggtgtttcc

SEQ ID NO: 36384 - DNA, 2300 bp, Homo sapien
ttacaggtgtgagccactgaatctgagtatcttaaaactattcagcctcaagaccagaaggagctacaagatgatggaatattgccttcaaaatttcaatgcaaaatgaacttcaacctggtatcctgtaaccaacaatctactaataaaggggtctccatatatagctcagaactttcaccttccatcgtttccttttttttttttttttttttttttcagaaagttaccttagggtatgttcaaacaaaatgaggaattaagccagaaaagaagaagatgtacgaatcagaaacaagagttccaatactagacagacatgaaggaaatctccaggataatgttcaagggagattctaagatggagctttgaaacccttcttatacattgctggtgtaagcataaactctggattgttgcttggcattatccactaaagttacacgatgatccagcaattttacaacttggcttatattcaacagaaatgcatgcacatgaagaccagaaggcatatagaataatgcttatagcattattatttgtaaataaccaaacttacaaatgatgaaaacaaccaggtacaataagttacatgctttatgattccatttagaccaacttaaaaaacaggagaaattaatctatatcgatagaaggctgaataatgcttgccctttggctagggcgtgcggagtggggttgaatggggggacaagaagaggctttagaggagctgataatgttcatttatttattattagtttttattttttagagacaggatcttgctctggcaatgttctatttcttgttcttagttgtatacatatacatggttggtttgctttgtaaaaatccactgagctattcccctatgatttgtgcacatttctccataaatgttatatttccatgaaacatttaccttaaaaagtaggacaaatactagagaaaggtaacatagaagatgagagggtaaggaaagaagctaaaggagtttaatgtccttgcattacttatgtaaagtttaacagtgctgatgtaatttagactttgttaagacaagcaggcacattaaaaacttaaggccaatagctaaaataatcataacagaatggataactttcaaatgagtaaatataaaaatatgcaacacaagacaaatcaaaatagaaaagaagaaaaaaacagaaaccaaaaacggattgcaaattgaaagtgcaaaataagatggtagaaataaatgcaaatatatgggagacatcagcatgtggaaggtaattgaaaccactagagaaaatgagatttctcccagggagagctagtatattgagaagaaaaggggccctacaacagaatttagggaaacaaaaagatgaaaggtctaaattgaagaagacaaatccacaagtgaaaatgggaaatcacccctagagaaataggaggaagaatgaagcaactccatcagcatctgtctgaatacggtattttttaaagtagcatcatctgctcaaattaattacaataacaacgaagacagccatcctacagatacttcgataagtagggtgaccgtaatttaaattaaaattagacattttttttagtgtgaaagggtatgttaattagacagaatgctgggacaataggtataaacaaactacgcacccaaactaggatatatcgtcatgctatatagcacatgtctttcttgtatatttaagtcattcgtactgaaaattattctattcatctcaatacaaaggtaacattggctgtgagagtaccaacacacgtacaggtatgcttaaaggaaaaaaattccttctgatgataaaaagttcttccagaaagtaatgtttattttaggatgtgactcacagataattgtatgccaccaattatatatgagtggaaagtctaacaatggacaggccaaattctttaaaagtcttaattcctggccaggcgcagtggctcacgcctgtaatcccagcactatgggaggccaaggcgggcggatcacgaggtcaggagattgagaccatcctggctaacatgttgaaactccgtctgtactaaaaacacaaaaaatgagctccggtctacagctcccagcgtgagcgacgcagaagacgggtgatttctgcatttccatctgaggtaccgggttcatctcactagggagtgccagacagtgggcgcaggccagtgtgtgtgcgcaccgtgcgcgagccgaagcagggcgaggcattgcctcacctgggaagcgcaaggggtcagggagttccctttc

SEQ ID NO: 36385 - DNA, 2300 bp, Homo sapien
ttccaatactattatgctataccaaatcatttttataatattcagagaataattatatttggaaccttttgaaaaaacaagttgcttagagaggtgtatcaaattgcaggctggtcaaaaatgagattgggtcagtgctaactgaactttgataaagagaaagaggaagattatctgaatgaacttagtagctagggggatttttacatgcttggtacagacctcgggaaaaagacgattttttttttgtcttttctatttctccttagaaatagctttcttcttgagattttaagtgactttttagaaagccatggaacagctgaaggccttgagcacttaaatgctagaagctttgttgataaaataagtcatggttttctagatgtagaaaggaaatcaaagtttagttaggtagtaattgataacagtagctataataacaaaggcatttacttatatcttagtgtttgagttcctttaaatatttctgtgtagtttgccttccacagatatgtttacactctgtaattagtacagagttaatacagttataaggttaccttaatgagtttcatattttgtagaaaaagtaaagagctgagtcacagtctttatattctcttatagtcatctctaaagtgggacaattcactaaaaccaacacatttccattcacccggaggagcaattcaacttcaccgtgaccttcagaaactggagactctattttacatttttatttcggtacctagcagaggagctggaaactagtggtaaatgttggttgagtgactaagggaattattctataattccaggcttgtattttctcagcctgtttcagatgatgccaaacatcaccagcctacggacacctagaacaatcacttaatttactgatagtagtgattctcaaagtgtagcccccagtcagcagcactggcatcacctggtaacttatacaaactgtaaatttgggagctctacagtaaacctactctgggaatgaggcccagtagtctgtgttttaagacatccaagtgattctgatgcaggttcaagtttgagaactactagcctaaaacaataaaaggagccctatggaattgtgaggaccagaagccaattagcctggcccaactactcatttcccaaaggctatgagacctttagcaaagaacagtggaaacttggctggccacattgaatgggcttatcttgagcacagcatttttagttggatgcacaggtccctaccccgccagggaaatctgagttgatgaaaatggtttctcccaactgctattgtttgcagctctgagtcagtgattttatttcatatatatatatatatatatttttttttttctctatattgcccatttgactgcagtaccaggctaattaaggaattagtatgtggcatccattctggggaggtgtctgattcttgtcctgcatcctgtgaacatttttgcaaacactttctagttcatattttctttttttaatcaggcagagacattacaattaaaataccgttaaagtgattctggcaagtattgcaataagcatgttttttaattaaaggaagaacagggagatgcataagcagtatcagctaaaggggaaaatttcttctgatatctattttaattgaaattttgaaaaatgggaaaaacagcagcagcagcagcctctgcttctgtgtgtgtgtggctccatcccaggttgctaggtttaggtattctgtgcttgattaattagtagccagccagagagtccattccctttgcccccaatccttaaagcctgatttatgcctcacatcccccatgaatatgtgagggctcaggcatctatttcctgagctgctagtggataggattatggagcgtggactaagctcttgggggctctcgtttgccagccaaattgattttccgcctctctggctggggacaagcccacctcgaaggcttcccaggctctgctccagtggatcaggcacaagtctaatccggatcttgccaacaaaggaagctgtgtccatccgtgtcacaatgcaggtttctttgggctgtgggtgccttctctaaatgctcctctttcctcctcttcctcaccttctcctggctcctgctcccagagcagcacagtgcagtaaggtacagggatatactccaactctgcccagatcactcagccagctctccttacccaggcagagcaggatttgtccatcttgaatggatgattccttttctccagggaaagggaattccacaggcttcctc

SEQ ID NO: 36386 - DNA, 2300 bp, Homo sapien
ggagatctgcaaggtgcattctcatgggcccccacagttttccaggaattcagagcagtgttagaatccaagagaaaggggtcagagattaaccctctctcctgacctccctgagtttgcatcataggcctgagtaacaatttttgtgctgagaattttataagcactcataggaattacttcttgtagagtgttgtcaatgtctgtggtgggcatggctaccctccttggaatagcagagaaatggtgctcagcctgcctcctgagaagcattttcagagacttgagctcaaggctttagaatttctatgtgaaagaggctttggagtgtaaggggcttatattccatggacatatcccaatgacaggaatactggaggctccccaaagcttcatgtggtatagccactttctctagagttctacaacatttccttttaggcctcaaggcaagaaatgattcattgtcctttatttcttttacaatagagcttgattgtccaccacgaaatacctataacacagagcacagaaaccaaagtcctgggtgtcattaggattcttttagtccatagtagagaggtggctgtctcctcataagaaaattggggtgattttaggatgcggccttgatagctaggctgccaaaaatacttataaatatttattataggccttttagccaaggatagatgtggggctaatttatggaaacctcttgttgaaataacaagaaataaaacataagtcttaggaaacttatcaggagactctacaatataataaaataatctgattatatttctgtctcctctgccagatggtaagcagtttgaaggcagaaactgtgtcatactctttaaaaatataactttgaattatctaagtgattcatatcatttttataaaaataaaagttactaataatgttgaaatctcctttacccccaaactagtcttccccctccttcccattacccacatgccaggcacacaaatgtggttcaaatgatgcttgttgacctgcatggaagagatccagagtggaaactgagagaggttcagcaggcaggcagggtggtggggtgactgaccccctacctgccccaatctggccaagcaccctctctctacaccactagcttcagggctacaaaaatttttcagcttgtcacgggttgccaaactgtgatatacagcagagttgatgtaaacttccacactttctagaggatagttttactactgtcatcagagttgtggtcgtatttccatggctttaatctggttttgctggagatgcttctccaggtctactgctggtccttgaaggtggagactcagggctatcaaattttaccaaaatgacttctccctcaaaggaaagggagaggatagaagataaggacgtcttctggtcaggtatcgccagacgtagacaaacatgatcaggaattgggggatgtgaatcagaatgggcagtgggacaggaacagagaagtcagacatggaccaagtaagaaggtgttgttgaccttcctaggcccaccagttcaaccgatgactgaggcccatggtctgggtacgactggagggtgatgagtacaagtcaaggacctcctcttggttaaaaaagcaaggtcaagagggaggatgaggagtagaaaaatgaagagaatcaatcaaccctttctcagcaagacttggaccaagttacttcccttctgtacttctttagacccatacccctacagtgggtatatgaataacagcccataacctggtatttacgagtcactcttcgggatgaagagtgagagactgttcatgaatggggatctgccctctagtggtcctttctcttgagccctctgttcaatcgctgatttgctggcaaattctttcaatgttgaatgcctgtttgtctcactgggtggacttttacttaaaattcttatctggggcacatgcagtaagtggagaaaaatgtaagacacttttcctttggtcattactaacaagccctgaggaaaaagcctgagtggcttatgttaatcattaaacttacccatggtcaggtctgaacttttactctggtacacatttggctgggacacaaacgagttaggtgagttatagtctaacgtgagtgagttacctgcgtggtggctgcaggctgagctctaaccagataacatgtccacggattcttgacagagagaaataagatcacttagaaagaaaggatcatttctcccttgagtcacaaggagacagaaacagaaaaaaaaggtactgtt

SEQ ID NO: 36387 - DNA, 2300 bp, Homo sapien
actatttatttcaactgaggtaatcaggccagacctgtgagatacatttaaacaggattttgaaggacaagtagcattttgataacctgaggatggggaagggcatttcagaaacaataccttaacaaagggtgggtaagctttgaaagaaggcctggagaaaaatcaggaccccatcatcccaggtcctggagcatggtggggggtaaggctagaaaggaagttgtacgaactcaaatattaattcaaatgctaagaggcttacccttcattctgtatgcaagctaatggcagaagaaaaggcacaattagagccatgctttgagaatcattattgaaagcatgtcgaagatggtctgaaggaagcaattgggaaaagcaagcatagctcatccaagtgggtgagagtgtgagttagaggaagcttggaaattggtgatgtgagagatgctgcagcttctgggattgctgcctggtcgtgtgtagaggaggggcagtagggctcattctgaatcttgtcttgaaaagcacatagatagtgatgccaaaaccaggactacggaaatcacttgaagctgtatcctacctcctcctccatctgtatctgcttcacctatcaaggatatctactattgccactaaaattcaggtgcttatggcctccctcattcatcagccagggtttatctggccaggaaagagaagccccttcaggcatttgcaacagagggagtttaagtcagagaactagtcaccctggtagttgagattgccatcagcaagaagctgttaccatttgaaggctgcagggacaaagggagtgagcagtcctctgggagactgaggaaggaagctcctggcttctccccactttccactttccacttcccacttttactcatctgtcctccaattcccttttggctgagcctagctgaaacccagctgacaggggagtttgagcaagcagcctccagggtcagccctctgagttacaggtagagcaggacagggaggaatggatctcaggacaaacaggttcaggatccggcaaactaattttacactccagccattgagttggaactactggccagcctccccccgagttagcatgtagaatatgggataccagctgagtgcctgagagttatcattcacctcagtgggggtaggggcggagaagggtgacatatagccagccacatctatatccactggcccttccttgtcctagtcctctgtattcctgagaaggaactattctcaaggacctgagtccaagttcatcttacttagagtacagagaaaagaaccgctaactccttctctctttcccccatcatgtctcctctcctttctagttctcatcactctctactcccccctgccccccttttctccatctccatcacctttgtccagtctctatccccattttcaattccttcctcaaaacaccaagttgcttggtagcatgcagggttggaacatgcctttaacagaaaatctcgtgtctcttgaacctagttatttattccttgagcagagtagatattcaacaaaagaattgttaaattcaattaaataggatatatcttattattaaatatttttttcattttttgtttacttatatgatgggaacttgagtagtttccggaattgtctccacaacacctggccaaggaatctgtgaggaaaagaaagatcaaatggaaaatcaaggtacatgacaccagaagacctacatgttacttcaaactttttcttcctcatgaaccattaaaatagagcataactcttctggcagctgtacatatgttcataaatacatgatattgacccatagcatagcagctctgctcagcttctaacaagtaagaatgaaaagaggacatggtctttaggaacatgaatttctgcccttcccattttccttcagaaggagagattcttctatgacctcattgggggcggaaattttaaccaaaatggtgtcacccctgaacccactgcgacacgccacgtaagtgaccacagaaggagaaaagccctataaaaagagagacgatagcgctacattttgtccatctcatagcaggcacaaactcatccatccccagttgattggaagaaacaacgatgactcctgggaagacctcattggtggtgagtcctgcactaacgtgcgatgctcttgctgatttggaccagatagtatttctggaccgtgggcatgaaacgctgggttctgactatggagatccaggaatactgtatatgtaggataggaaatg

SEQ ID NO: 36388 - DNA, 2300 bp, Homo sapien
tctaggcaaactcggtggctgtgtctgcagtcggaccttgacagtgtccagagggtgccccatgaacaccaggcacatgccaccaaagccactggccagcaggttcttgagcaggctgatgggctttggctggtcggctatggtcagtctgcctatccctcagtctgtcagttcctgggccgtcctggctctgctgccccagctgcagtgccagggctgccaatcttgcatttaaaggcttctacttgctaattaattttggttaaaaaaaaccattcttagagatagccaaggtaatgggcatttaagtgttgcatcaatgtgattttacatatatgtatatttgtccatggctcctggttcataactcccacagccctcgttatatcctaagtgataaaaataataagcatatcttttgttagggtatttagcttttttgtctttgtttcctgaagcagcttcagacagcttcagagcaataaaggtgaaaaagacagtcttttattgtaatgttggggcactttaggcctaagaaataggcctcagaaaaaagaatctccctctctgaacttctcctgcccaccttttctccccaagaccatagaaacagaaaatatcctgtcatctaacatcaccccccacaccttttgtcttggagctggccataaagaaattctttgatttaccttgtctaatcataggccataagaccctcaattcaggaagggtcctcccctctacccaggaggaaggaaggctgctcagagaggccaagaaaaatctgaacaggcaggcctggctgaatttcctcattcaacctgttaatatcaggttataccctttttatccaatcacatttgtttacagttttccatgttgtaatcatgtctgcccaatgaagactccataaaaggcccaagaggatgggatacaaagagcctttggaccgctgaacttgtggaagttctaagaaaggtaaacagtaactcatccctgtgctgggagggtggtgcaccccagctccatgggaaagaacacttctgtgcttgtgaccctttcaaaccttgccctgtgtaccttttcatctggctgttgacttgtatccttaaaaatatcctttagaatatactggtaaatataaattagtgttccctaagttttgtgagctgttctaacaaattaatcaagcctaatcaaactcaagcggtttgtgggaacctgaacttgaggccagtcagtcagaagtcccagaggcttggacctgtgattggtgcttaaagtgggagcagttttgtgggactgagccttcagcctgtgggatctgactctacctacctggagatagcgtcagaattgaattggattagaagatgcttagctggcgttggatgcagaattgattgcttgctggttgatggagataaatgcccacatacatggtcatggaaatcttttgtgttgctggttgtggtgtgagagcagaggaaaacagtttgttttatcaacacaatgaatagtgattatttattaagcaccagtaggagtctaaccatggggttaaaaaataattagttcagggagataacaaaactaccagggtatatcatttctgaatttttcacttatgtcattcatttctttagttttgttttcccattcataaaatggaggtaaagatagtttagtaccaaggctcctctaaggatgagttttctcccatttaaatcacgattcatattgcgtgactggaaagtagaacatatggtccgtgacaagggtgttggcaatttgtggaagaacaaaaaagatttgacaacaatttctaacttggttcatctctgtagtaaattaaaaattttgctctgatttgtgggcaatgggggtggaagtagggtagaaggaaagaaaaatttggtccttttcctgtcatccctttctttagggtcccccttttgttccccttcgggaaatggaataaaaaaaaaaacccctgcattcgtcagtaactccgggtcaaccacaacttaaagacagtaagcaggtcaatcgaaacaggggcaatgattgctataaaactaacaggtactctcattgatagaacacaggcatacacaggaagatacattcacagaaagagcttcctgcacaaagtaagccaccagcgcaacatgacagtgaagaccctgcatggcccagccatggtgagtagcagcaatcattctggtttaaggactgtcatgcctaggatttcagaaaacagaatcctaaggaattaggtttgattggggtctttttgg

SEQ ID NO: 36389 - DNA, 2300 bp, Homo sapien
cagggagagggtgggaaacacagaacaaactctctcggcacaacccaagttcagagacgaggcctcctcagatgaggaagatgatgccctcagacaccatgacctgattgtcatcctgcatcttgctcagagcagcctggatctcaactgaagagaagggctcttcgctgtcccggttgatggattctgtgaggcgattcatgccgattgactgcgcatgagcttcccggaacacatccaagagggccaccttgaatgccttcaacctgccccagacagaagaaagggggaagaggagtaaacaaacccaaatgctctcaggaaacagctatactaggaaaatccatagtattaatacagtagaggcgtcccctcaatattctttctcacacacacatctgcctctgatggcagtgctacccttgaggagccccctttaaagctaaactattgtactagcgtgtgggaaattggcattcccattcactgtaaaatagtaacccggtcagcgtcaatgcgggacaatttaacagcacttactaaacccttaaaagcgtatatcctttggcccagggagcccatttctaggaactcaccttatagctatacttgcatgagtgcacactgataaatttaatactgttttactgtaaacagggaacaacccaaatgtctatcatcagagaatttcattaaatttttacccatccataccatggaaaccctgcagtcattaaaaagaatgagatcaaacaagcacagtggcttatgcctgtaatcccagccttttgggaggctcaggtagaaggactgcttgaggccaggagtccaagaccagcctgggcaacatggtgagatcccgtctctacaaaaagtaaaaaataaacactgtaaaaaagtaaaaaataaacactgcactccggtctcaaaaaaaaaagtgagatctatacgagctgattcaagcattttaagatacagttgatggttgtccttgagggatagagttacaattgattttaattttttttctaaatacttttcaatgtgtttcaaatttttttcagtaaatacactgtattatgtgtttaaagtataaaaagaaaaaacgtaaaacttggctatggagtttcttggtgtccagtaaacaaaattcatagataaaaatgtttcctaaaaccctggtggtaaaaattcttcatttcaaaaacaaatggccaaaatgtatctatcccaccaagaagaatctgaggttacagtaagacattaagttttatccttattgtaaaactcttctctctcagaaagagagaattattaatttaaacaactgaagattctgggtaaaggacatccagaagttcttcatgcttttctcataacttttcagtaagtttgaaattaaatgagaatataaaatgttaaaagctgcaggcctctagttttgagttctattgatgaccagcagtttgtttcccaccctctccaagggaacaaagtcccttcctcagcgatacacagaattcttgaaggggcaggagcaacatccgtactcacctggattcactcaactccactttctgggattccttggtctcctgtgagtctgccgtctttggagtgtgtacttcagagggttgatggttgtagagatggggaagataagcaaggtgaagccatttccacaaacactagagaaatcatctccactcccaatctctcactcagcctgctgaacactcctatttcctagggttcttatggggccaggcagaacaattaggatatagggaaatcttcattggatgatgaaggaatttagtcaggcaggagaccctcaatgtatatattatctgaaatgcttataccaggtgaaacagcacagcacagttcatcaaggaggtgtatataatatagcaaagctttttccaaagtttcccctgaagctctcttgggacaaacctcttggacataggccccaagcagggagccaaacaaacaggagtccacaagaaaataaagtgcacagagcaactggaaaagtccaagagtcacaggaacaacctctttcatcagtaagtgggctcactcaccttgaggcatttcctcctctgtgtcactgaagtcataggggtcgtatgaatccccatctttggcatctggctggcgagtcttccttctaaaatacccacagcagttaagagagagaaagagtttggagacagaaaggcaaggaagccccatcacgtgcctctaactacggagaaaaggaaacagaaccactaagtcaaagtgaagcacta

SEQ ID NO: 36390 - DNA, 2300 bp, Homo sapien
atatgtgctttttaattttgaatcaggatagaggaggactacgggctaagctcagctggactttttatgagatatgtacaaatgcccctaatttttctgtagcaacaacctgattgattttgggcagtttgcaggtgtcggggataacaaaggaaatacatttcctctgcttaaagatttcatgccctaatgaaagaagggagaaacaccaattaaatagcggtgtgtccttcacagctgaagatgattatattgggacaaatcaagtctttatcaaagaccatggcatgattaattcattaaatagaattgtctttacatagtttccaaatttgccattagctcatggaatgttagagtaagacagattatcagagatattctaattcagtttcttcatcttatactgtatataaggaaacaagcccagaaaaaagtgtgagaatcaaagatgtggttttcagatttccactcttttggactttctactacaaatgactcgacttctttgctagtttgaactaagcttcccggttcttttagtgttaatttcaaattgtttccagagcagaggatatctcagtactctgtccaataagttcataaaataagagttatgagtaaaaagtcttaataaatcagtaattacctcttgctatataacggcaaacagtatctttattctagaattttcttttttttttgcccgttaataaacataaaagcaagcagtcaaatgacagcctttttgctttggctaaggatcgatttatctgcccactaggatggcacaaaacatacagtaactataaactgaataataactagaaatacatatacccacacaaatagatggcctatatattttgtttaggcagattattcttagaatatttatcagtacatagtgagtcctgaagactttaaaacataagctaatagttggctgaaatttcagataaagaattatcaaatgtctgatgttgggcaatccagtatttcagcttcttgttcagtaaaattaaaaacacatgctggggcaatgggcttgctctttattgtgcagagtggttacatgggtgtaagcacaggtaaaaattcactgagctgtacacttaagatttgtgcattttactgtatatacattatatctcaaaataaaactagaaatataagaaaaagccaaccacgacggactgaaaacaaacatacaaatttggacgtgcgatgatcttttagtcattatggtttcagatttgctgttagttactgattgatatttaatcaaagtgacgtgaaacactttttcccctcttgagctgatcgttcagtaagctaagttacttaaaaggatcttgtgatctttttataagaccagaaagcctttaatttacctgttattaagtaagatggagtagtaacggtttccaaaatttgtataacacacgatgaagtctctagggggcagggtaaacacagattttttttttcacttcatccttctctgcggcgatgtctttatggagttcgtcaggcaacggtatcagatagcaaatgggtttttaactaatctttccctaaggtactgtagttctatattctatcctatagattctcaaaatccacttttacactaggatgccactggagggcagttctgatttggatatatcttaaaaatgatttgcttttatgttttcatctccctgcgttataaagcaccatcctctgaatttggtcgttgcatcgggtcaaaagttctgcagcttgaaaaaccctgcaaaaacatccggaaaggagggagaacactacaactcccagaacgcaatgctttccctctcgccagcctgtcccctccagctgctcaatgaccagcctctgtgagcctcctctcagccctattggtcagtttgctcgtcagtgagtgaggcggagggaggggaggaacagagaatcccggatggtacgtttcccgccaccgcggggcgcgcagcggaaaacccgaagaagaagaagcttttgattggacagtcgctagtccgacctcagagaactcagccaatcataatgcttatatgctcccaaggtccccgcctcttcctcgaggtaacctttggtggcgggaagagttcggaagttttcgcgccggggtggagtcatcctgggaacctccacgcgactttggtggaggtagttctttggcagcgggcatggcgggtaccgtggtgctggacgatgtggagctgcgggaggctcagagagattacctggacttcctggacgacgaggtgagggaggcg

SEQ ID NO: 36391 - DNA, 2300 bp, Homo sapien
tcaaaaatagccaggtcaccctaggactttttccagtgttaccaaaacatcacttttactgcccaaacggaagtaggccattacctcacagtagaaaataaaagaagctagcttgagaccaaggtagttttaaaaggcatgaaggatgagaaccaccattcttatttagtggctctggacagcgtcacttggaaacagaactgcctcatgcacagataacaatgcctgacacccattacactttacatgcacgttcacatctgccttttggataaagggcaagaagaaaggaacatttaccattgagaaagaattagaagccttgttagtctccttttaagacttcttcacattccacatggattaactgttagggagaaaaacactgcaaaaataatcagcaatgcatttcggaggctcatcagctcccggctgacagctcacgttagttggatgaaggctgtggataggcttttagatgtgctaacctgtaattttgtttctagagtggcccaaagtggaaggagttttcactccctctcaataagccctcttgtacggttgtgacctctggcctatcataggtttttgacgataaaggagagcccgggtttttgaggttaagggagagttccctgacatctttggggtgaagaagagatggagggagcaaagctgccaaagacctcctgtgacatttccactagtatccacctataagtaagtgctggactatgattccctggggagatcagtggctctaaagacaggcccctgggctctttcctggctctgactcagcttcaaacctgccgtgcaactgctcagagtctaaatgtcttcatttatggaactgaaataatcctgctaagattactttctttgcttcgtgatgtttgcctgagaataagtagctgggactacaggcgtgtgccaccacgcccatctaatttttgtattttttgcagagacagggtctcaccttgttacccaggctggtctcgaactcctgggcttaagcaatctgcccactttggcttcccaaagttctgggattacaggtgtgaaccatcacactcggctaaaatgttttgaaaaatggaaacattgtacaaatgtgagatgttgtgcaacatgtcactgaaacacggtggtataagagaagttttgggaaccagcagaccagaattaggcctgagaaaatcttacagtaagcagaccagaattaggccgtctgagaaaatcttacagtaagcagaccagaattaggcctgtctgacaaaatcttacagtaagcaggccatcttcccaggccttctcttttctccagataatgaagaaggctttttaaaagcaaagccaacttgatttgttaattgatcatccaacttcttaactgtctttttctcatggtaaaataccgagaacattgtgggtgaggagcaagtcgggaggtggaacccacccccgcaccctgcctccaatagattgtatgtgtgggtcgctattgctgggacccacgaaggctgtggattgaggacacagggtagaagtgggatcttctgcaggtcagtgtcagatgtgtctgtgtgatgtagtcatgggagaggcgcgagtcttgggcgggtgtatcttaggggtgtggaagtgtctgcaagggcctccgtggtatgtcatcacattatttatatcatgggcatgaccctgaacgttcacccgagagtggtgagagaaaggccaggatttaaatcagtcttgacagcgcagatgaagtttgttattgttttccgcccttcccgagggacttcggaaatggccccctgagaggtgaattcttggaaagaatatgagggcggttaaggcgtctctgtctcaaactctccggattttttgcagctaccagggactgcgagggtctgcgtcctgggtggaaggaagcggcgtcagtcaacttcctcgcagcggcggcagcggcgcgggctgcagcggagcgcgcgggtctgcgcatcccgcccccgggtcgggaaggggcggagctgggcgtcacccgcccccggcggtctcctcctcccggccgctcccccgagccgagcccgccgcggtcacagccacccgcgggaagctcgtggccgggaccccgaggcgggagcgcgggctgggccgggctgggctacgcgcacgggctcggccgccgcccctgccggtgagtcccgccgcgggaggcgcggaacgggtcgagttgggtattgggaccgcgaggtcggggagccccggggcccgagctcgggaggcggggacgt

SEQ ID NO: 36392 - DNA, 2300 bp, Homo sapien
ccattgagaaagaattagaagccttgttagtctccttttaagacttcttcacattccacatggattaactgttagggagaaaaacactgcaaaaataatcagcaatgcatttcggaggctcatcagctcccggctgacagctcacgttagttggatgaaggctgtggataggcttttagatgtgctaacctgtaattttgtttctagagtggcccaaagtggaaggagttttcactccctctcaataagccctcttgtacggttgtgacctctggcctatcataggtttttgacgataaaggagagcccgggtttttgaggttaagggagagttccctgacatctttggggtgaagaagagatggagggagcaaagctgccaaagacctcctgtgacatttccactagtatccacctataagtaagtgctggactatgattccctggggagatcagtggctctaaagacaggcccctgggctctttcctggctctgactcagcttcaaacctgccgtgcaactgctcagagtctaaatgtcttcatttatggaactgaaataatcctgctaagattactttctttgcttcgtgatgtttgcctgagaataagtagctgggactacaggcgtgtgccaccacgcccatctaatttttgtattttttgcagagacagggtctcaccttgttacccaggctggtctcgaactcctgggcttaagcaatctgcccactttggcttcccaaagttctgggattacaggtgtgaaccatcacactcggctaaaatgttttgaaaaatggaaacattgtacaaatgtgagatgttgtgcaacatgtcactgaaacacggtggtataagagaagttttgggaaccagcagaccagaattaggcctgagaaaatcttacagtaagcagaccagaattaggccgtctgagaaaatcttacagtaagcagaccagaattaggcctgtctgacaaaatcttacagtaagcaggccatcttcccaggccttctcttttctccagataatgaagaaggctttttaaaagcaaagccaacttgatttgttaattgatcatccaacttcttaactgtctttttctcatggtaaaataccgagaacattgtgggtgaggagcaagtcgggaggtggaacccacccccgcaccctgcctccaatagattgtatgtgtgggtcgctattgctgggacccacgaaggctgtggattgaggacacagggtagaagtgggatcttctgcaggtcagtgtcagatgtgtctgtgtgatgtagtcatgggagaggcgcgagtcttgggcgggtgtatcttaggggtgtggaagtgtctgcaagggcctccgtggtatgtcatcacattatttatatcatgggcatgaccctgaacgttcacccgagagtggtgagagaaaggccaggatttaaatcagtcttgacagcgcagatgaagtttgttattgttttccgcccttcccgagggacttcggaaatggccccctgagaggtgaattcttggaaagaatatgagggcggttaaggcgtctctgtctcaaactctccggattttttgcagctaccagggactgcgagggtctgcgtcctgggtggaaggaagcggcgtcagtcaacttcctcgcagcggcggcagcggcgcgggctgcagcggagcgcgcgggtctgcgcatcccgcccccgggtcgggaaggggcggagctgggcgtcacccgcccccggcggtctcctcctcccggccgctcccccgagccgagcccgccgcggtcacagccacccgcgggaagctcgtggccgggaccccgaggcgggagcgcgggctgggccgggctgggctacgcgcacgggctcggccgccgcccctgccggtgagtcccgccgcgggaggcgcggaacgggtcgagttgggtattgggaccgcgaggtcggggagccccggggcccgagctcgggaggcggggacgtcaggatcgcggcgttggggagtcctcgcaccccgagctcagaggggaggtccagagtcgcagcgttgggaacctgaggccaggggccggagtttagggccccgatgttgagtctccgaatccaagcccggaaggggggacgacgggttaggatgctggggagccctggagctctgaacggctgtagtggggtggccaggactgcgatgctggggagtcatggagcctgagcctggagagctggcgggggtgtggggaccgcgatgttgggaaggctgagcccggagggcgggagattca

SEQ ID NO: 36393 - DNA, 2300 bp, Homo sapien
aacagaagttgtcttcatgcatttctggggtccgaaagtagttaaaacacaccccttagccatttaactggcgtgcttttctggaaagaaaggcatgagcagagggcactcctcaaatagaaacagatgcgataatggacaataggcttaggcatgactcagcctttccagctccacacgctccttccctacccaacccaggaatatagatccaagtgcaaccatgcacttagtcaagaagagctcttcaaagtgtgtcctaatgccatgaaatttacttttaataagagagtgggtagggagggatcatggaacttctaacagtttaaggttatcatgaagagtcagcaaaaattacagtaaccagtgattctgggtaatcagcgtcaatgaggtggagagaagtgggagaggtgccttatctttgaaaggttaaacttgccatctttttttttttttttcctttttttgagacggagttttgctcttgttgcccaggctggagtgcaatggcgcgatctcggctcactgcaacctctacctcccgggttcaagcgattctcgtgcctcagcctcccaagtagctgggattacaggcatgcgcccccatgcccagctaattttgtatttttagtagaggtggggtttcactatgttgtccaggctggtctcaaactctgacctcaggcgatccacccgcctcggcctcccaaagtgctgggattacaggcgtgagccaccgcacccagcaaacttgccatcttgacatattcctccagtgactggcatccatcctcagttggtgtctaaggtataatacaacggacaggtactttaaaagttttcagtaacttccacaatgctaaccaatgtttgaggaatatgattacatttatttttttaaaaaataagcaagttttgtaaaaagcaccaaaggcaaaaaaacttcattgaagtttttaaaaaatgtattaaactgctgcattaaggtaatgtacttacagaaaaagaaaaagaggtttaaaaaaggacaagaacaggaaacagatgtagtaaggggagaagagttagaaaggaaactctctgggcagggtatggtaagcaggcatcaataactgcctcaggtgccacttaatgcattcatgtcctgggcctcctgagcgtcacacaaattagtgaaacccaacagggggatttgctctgacaagcagcaataaaagtaaagctgctgtctgtattggcagtaaactacctgtgacactgagatatgccttctgtgtctggcttattactctatcatgttcctaaactggcttgtcacaaacgcctgttacaaaaatcagattcctggcctccatgtcagacctaatgaatccaaatctctcggcacgtgggttttgattactttttatttttaagctcctcagcaatgatggatagctttctccccccccccccaaaaaaaatgtttcaggaataggattatgtttcttttaagaaaaaataatttaagcaagttttgtaaaaagcatcaaaggctatacctatgatgctgacaatatttcacctcacttatctgcttctttcccaagacttagtctttctctttgaaggagctgtgttcctcctagtggttctgatctttttcattgcagctgcaggtacaaacgagggattgaggtgaccacccttcaacctgcagctcttcagtcaacaaaaatcaagtacctatcagagtgcaccctgccctgcagcacatattcaaggctttccctacaaaaacaaaggtgtttaaccgaagggattgatggtagaataaagagagctgggcgcggtggctcatgcctgtaatcccagcactttgggaggcgaggtgggcggatcgcttgaccccaggaattcgagaccagcttgggcaacatagtgggacactatctctacggaaggagggaagtagggaaggaaggaaggaagcaaggagggaaggagggacggagggaaggagggaaggaaggaaggaaaaagaaaagaaaggaaagaaagaaaggaaagaaagaaagagaaagattgattttaaaaaagagttaaaaggggaaaaatacaatgtggcagtgggagaattaaggatgagatgattgcattagttcattgaccatccctgagcaacagaaacacaatcatgggtaatcctcggcccctgcctacaagaagcatgggtctagtttagtagcactgccaactggaccgaccatttacacttctgtgtgaaatggggcagaggggggagaaaagagtgcctg

SEQ ID NO: 36394 - DNA, 2300 bp, Homo sapien
gcctcccaagtagctgggattacaggcatgcgcccccatgcccagctaattttgtatttttagtagaggtggggtttcactatgttgtccaggctggtctcaaactctgacctcaggcgatccacccgcctcggcctcccaaagtgctgggattacaggcgtgagccaccgcacccagcaaacttgccatcttgacatattcctccagtgactggcatccatcctcagttggtgtctaaggtataatacaacggacaggtactttaaaagttttcagtaacttccacaatgctaaccaatgtttgaggaatatgattacatttatttttttaaaaaataagcaagttttgtaaaaagcaccaaaggcaaaaaaacttcattgaagtttttaaaaaatgtattaaactgctgcattaaggtaatgtacttacagaaaaagaaaaagaggtttaaaaaaggacaagaacaggaaacagatgtagtaaggggagaagagttagaaaggaaactctctgggcagggtatggtaagcaggcatcaataactgcctcaggtgccacttaatgcattcatgtcctgggcctcctgagcgtcacacaaattagtgaaacccaacagggggatttgctctgacaagcagcaataaaagtaaagctgctgtctgtattggcagtaaactacctgtgacactgagatatgccttctgtgtctggcttattactctatcatgttcctaaactggcttgtcacaaacgcctgttacaaaaatcagattcctggcctccatgtcagacctaatgaatccaaatctctcggcacgtgggttttgattactttttatttttaagctcctcagcaatgatggatagctttctccccccccccccaaaaaaaatgtttcaggaataggattatgtttcttttaagaaaaaataatttaagcaagttttgtaaaaagcatcaaaggctatacctatgatgctgacaatatttcacctcacttatctgcttctttcccaagacttagtctttctctttgaaggagctgtgttcctcctagtggttctgatctttttcattgcagctgcaggtacaaacgagggattgaggtgaccacccttcaacctgcagctcttcagtcaacaaaaatcaagtacctatcagagtgcaccctgccctgcagcacatattcaaggctttccctacaaaaacaaaggtgtttaaccgaagggattgatggtagaataaagagagctgggcgcggtggctcatgcctgtaatcccagcactttgggaggcgaggtgggcggatcgcttgaccccaggaattcgagaccagcttgggcaacatagtgggacactatctctacggaaggagggaagtagggaaggaaggaaggaagcaaggagggaaggagggacggagggaaggagggaaggaaggaaggaaaaagaaaagaaaggaaagaaagaaaggaaagaaagaaagagaaagattgattttaaaaaagagttaaaaggggaaaaatacaatgtggcagtgggagaattaaggatgagatgattgcattagttcattgaccatccctgagcaacagaaacacaatcatgggtaatcctcggcccctgcctacaagaagcatgggtctagtttagtagcactgccaactggaccgaccatttacacttctgtgtgaaatggggcagaggggggagaaaagagtgcctgagctcacagcgttggcggggcgcagtgaggtccgccaggactaggtggaaggagagaaggaacgtccctctctgcaactcatctaagggcctgctcggaccccggatctcacagcgagaactaccgcctcgctacacccgcctttccccgcgccacccaacagctcccacgtctcatcctccgggagcggggcggggcgaagcggaagaggaggggccgacacaaccacgcccactagccgcgctccaaggccgcggcccacttaccgcgagaacgcggagtcctgcggatggcgcacgcgcaaacctcctgtgatgcctgcgcctcctggccccgccttccgctcgtgggagttccggatgtttagcgttaccatggatcctggaggtgcccgcgaacactgcttgtcgcctgggcaaccggagaggacgaagcaggacctaggtggcggcggtggtaccggctgcaatggtgtccaatcccgtgcatggcttgccctttcttccgggcacgtcctttaaggactctacggtgagcagttatctgccagactcccacctgtccccacctt

SEQ ID NO: 36395 - DNA, 2300 bp, Homo sapien
ccctgtgacgaagaccagttttatgaacgtctttaatgatggggaaactgaggctgcagtcagttttcagtcagactagtcacagaacagggactgagacacacggatatgactctgtgtgacaccacacacttccaggggagaacccagaacaaggtggagcaagcccgacccaatataccactagagagagctgtgagagggagaggaaggagagagggactgaactaaaggagcactatcaaaaagtggagtggagaccccagtcctagcaccaccgtttatttcctacagaccctaaagctcagccacggacacattcattcatccaaccctgacttggccaccacaagaacgttcccagcttgagggcagcttcgccagccaattagggcccttgtcattcgtagagatacagggaacccgagacagagggacagggaaggaaatttagccaggcaagccatcctccatctccaaggaagtttgtaaatgatcacagcttcctaacccaaccgtgagaatgcaataagcaagctgacgcagaagggaggacaaggagtctcaggaaccagaggagaccacggtgagagtgaggggaatgtcgctcacatatctcacttctgagacaagatataccgcaacaaacccatgccaagcttcctccagttcttcccacttttgaatatcacatttttcttgctctgcaagagtagggaatccttcccatcagtcttgtgaattctgaccccttgctggctttctacaactccctgcctgggaggccgacaccaggacattgctgttgggggtgggatccccatcctctgccccccactcctacactataagagaatcaactttccccaaaaagtggagggtatccctgtctctcttcttgtctctgtaaagggggtgaagctctgggtcgccgcagatggatctaaagggacagttcacggagtggtaaaggatatccaaaaattggccttctagagcacagcaaaaaagtgggagcgagacgagagcagaaggccactgctgggatggggccagggccacacgtgaacatccgagcacgttccagagctgagatgcaaaacacccagaaaatcacataggaagtggaaaaggttctgggtctctcccactggaaaagcccagaagagctagtggccaccccttggggcaagagggggttgtgcaatgactgcgggtctgggagtctctgggcttggctcctggacgccagaaagggaaccccacgcgtcaagccatggtggcagcgcggcggttggttcgaggccaggctggggtttcagggctgcagacagagctgcaggatacgatgagtgcccaagggggcggcagagcatggcatggctggcacggcgcggagctgggggtgctgtctgggctggccggggtacaggccggaggggtacagtgcacaaagccggggtgcagataacgtacacggcagccaggagcctccgatcagaggagggcccgctgacctgcaggggtgtgccgggcggtgcacgacagggggcactgtccctccagctccctcctccccaggctctcacctcgaacataagcccgatgaggacgcagagcaccaggcagaagccgatgtccgcatggttgtggatgacgaactcctggctgaagagcgggtaacttttcgtcctcctgcggaaagccatggcagcgggcgcgcagcggccggcggggcccgcaccctgcgctcacgaaccgcagcgcaaacttctccagcaccggcccggtccgcccgccggcccgccgcccgctctcccacagccgctcgcccgcccagcgcggaacaacttcggggcccgcccccttcctccgcccgcccccggccgcccgtaaccgcccccggccgcagcccccgcccagcccccgcccagcccgcggcccgcactcggcgcgcctggccccgccccccgcgggcttaaccctctagccgctgggcacgcgcgggctaccggggcggaggcgtacgggggcggcgagcggggctcggctcctcctcgtcccgcgccagcgccgcgcccggccgcattctcggggcccgaggctcagccgctcgcggtggagaaagcaggccgcggaggaggcgggcgcccaggcctgcccggacaggaagtgggcccagctttcccactcctcgctccgctccttcctccgcgggaagggcaggccccggaggcagcgagcgccccgggggtggccgggcagccggatgctcccggggttgcgggctgtggccccgg

SEQ ID NO: 36396 - DNA, 2300 bp, Homo sapien
gtcaaacaacatataaaacagttgtttcataagatcttaatggagctgaaaatttcctatcacatagtgatgtcgtagccactgtaacattgtagcgcaatgcattaaccacgtgtttctggtgatgctggtgtaaacaaacctactgtgctgccccataatatagtttagtataaatgtgtagcaaaaggctgggtgcagtggcctgtaatctcagcactttgggaggccaagacgggtggatcactgaagatcaggagttcaacactagcctggccaacatggtgaaaccctgtctctactaaaaatacaaaaattagcagggggtggagggcacctgtaatctcagctactcaggaggctgaggcaggagaattgcttgaacctggaaggaggaggttccagtgagccgagatggcgtcactgcactccagcttgggcaacagagaatccgtctcaaaaaatggcggatcacttgcggtcaggagttcgagaccagcctggtcaacatggtgaaacccccacctctactaaaaaatacgaaaattagccaggtgtggtggcacatacctgtagttccagctacaggctgaagcatgagaattgcttgaagccaggaggcagaggttgcagtgagtccagatctcgccactgcactcctgcctgggcaacagagttaagactctgtctcaaaataataataatagcagtgggggtaacttaaattcaaccatctaaacctataaagaaaccaattgtataaagttcaacctcataggtgtggccgcacgttgcaaatttgaacacatcttcacaggtggaaagtcgaggtgcttcagagttcttgatctttctgttcctcacaagacgaaggttcaactttgagaaaggtcagccttgaagttaaatgaggtttagtccaatctaggcattactttgtcatttccttgagagtcagataagggaattacagacccaagactgtattttaagtaaggtggagtgcagattgaggaagtaaaatttctctaggaactccatcctgtctcaattacattccaccgcgtgccacttttaaaaaaccatatttatttagaagtgaaataactgtggacctaataaaaaatggaataggaattagttttttttgttcattacgtatttctgcacatctagaaagtaactgactgcttcattactggtaggattaaatccaatatttgcgaatataatttattaagaacaccttttgtccttccaggagtacttttaagacttaatattaaatagaaactttcagtgagaaagttccttccttttttgcttcttctgtgtttattcttccacttcttctgattaatatgtaaggtagactttcggtgaaatgtgtgtagctaattaatggtggcatgagggtcccaaaaattactgggcaaaactgcaatcatccaccctctccccgcattggagcgaaagctcccctagggcagggtctttcggtttgttgatctacctgaactgtgcctagcccactgcaagttctcgataaatacttgagtaatctccattcactgatcgtccgtgcagggcgctgtggccagccagaaggccggttcgcggcttccctgcttccgccgcacccgcgccgccctcagcccccggggccacagcccgcaaccccgggagcatccggctgcccggccacccccggggcgctcgctgcctccggggcctgcccttcccgcggaggaaggagcggagcgaggagtgggaaagctgggcccacttcctgtccgggcaggcctgggcgcccgcctcctccgcggcctgctttctccaccgcgagcggctgagcctcgggccccgagaatgcggccgggcgcggcgctggcgcgggacgaggaggagccgagccccgctcgccgcccccgtacgcctccgccccggtagcccgcgcgtgcccagcggctagagggttaagcccgcggggggcggggccaggcgcgccgagtgcgggccgcgggctgggcgggggctgggcgggggctgcggccgggggcggttacgggcggccgggggcgggcggaggaagggggcgggccccgaagttgttccgcgctgggcgggcgagcggctgtgggagagcgggcggcgggccggcgggcggaccgggccggtgctggagaagtttgcgctgcggttcgtgagcgcagggtgcgggccccgccggccgctgcgcgcccgctgccatggctttccgcaggaggacgaaaagttacccgctcttcagccaggagttc

SEQ ID NO: 36397 - DNA, 2300 bp, Homo sapien
attttaaatgggtgccacattgaatacctgaccactctatttcagaactgttcctcctctggatgcttatatgcatttattatctattccattcacccatccaataagcactactactgctttaagactcttatgaacctcttccactaaagtttaagcttctggataccagggacaactctttttaataataatggcaaatactattgagtatctcttacgtgctagtcataatgttatgtattttcctgtattaatgtatgtggtggagctttgacttaaacccggacagaatgacagcagagcctgcacacctacacttttcttaaacctggatctgggccgggcacggtggctcacacctataatcccagctctctgggaggccgaggtgggcagatcacttgaggtcaggagtttgagaccagcctggccaacatggtgataccccatctctactaaaaatacaaacattagccgggcgtggtggcgagtgcctgtaatcccagctactcgcgaggctgaggcatgagaatcgcttgaatctgggagacagaggttgcagtgagctgagatcgcaccactgcacttcaacctgggagactgagtgagactccgttctcaaaacaaaaacaaaaacaaaaaacaagcaaaaagcctggatctgacacttcttagctgtttgcatgacctttggtgagttgcctcagtttccacctctgtaaggtagggaggatagagtatctacctcaagggttgttgtgaagattaagagttgatacttgtaaaatgcttagaatagttcctggcacacaataggtactcattaagtgtttgttgtttgttgttgttgttattgtaaccattattgcttataggaaagtcccttgtctgggaaaccctcggtcctggttttagcatggaaagtcccatggccttggtaaaagttcaaaacgggtccatatggcaggctgaggacagagagtcagcctggcgccctggtggtcactctccactgtcctgcatctttttcagagctcacctctgaaaaactgccccttactctttgtaattgccaccctcccagtatttcaggacactgtactacttagccaacagggtgtacagaaatcatatacctttttcgcacattcttctatgtactaagcttgtccaacccgccttattctgttgtcgttgttgttctgttttgttttgttttaggcttttagcagcctgaagccgtggtttttagtttctgtctctaatgaagctgaaaagagggatgaggaaggggctttactggcccagccagaaacagaaactaagaacctgtgactgtattcagtctctttaacatcccagattgtagaccatcactctagtttccccacttcctgttaacttttataactatctctgaactttaacagaacactattttgtgtttgcaaataacgtgctaaaacgcctttcctagccgaatcaaaccctagcatctagtgccccctgctgccctttcataggaaaggcaagaaggatgaaagtttgattcactgacagtaaaatttttacttgtcgagatttcaataggaatcggtataaatatcctaaattatattcacgtttcatcttttctttgaacctactccttgacttggttttttgtcttgcctttgcgaacattcatttttgcttaattatatttttctcatttatatttgctttccttgaatttccttttggttgttttgctattgctatttgaacttgttttgtcttggctctttctcactttggccatgccttgacacagacgcgcggggtcgagaggctgcgggctcggcgggcggagggcgcatgggagcctcttggccctggacctgcccctgcaatccttccgcgggatctcttggaccctctccagggtcctggctctgagacgttgctagaggacaaatccgcgggatttagagcgcggccaatgggacagcggtgcctggctgagtgtcaggcaaaactagccaataaacatgtagtttgggcaaggtgggtccgtcccctaactcggaccttataaagcgcgcccgctgctcccacaaagccgggctgtcccaggctgaggcggttgctcccctgccgggtgtgttagaagcaagttagaggaagaaggtcttggggactacgggcgccaccgagaacccatacgaggcagccgccgacggcgggtcgccggggcggggccagaacggcgccaaggccaaccagaacggcggcaagaactagggggacgcggggca

SEQ ID NO: 36398 - DNA, 2300 bp, Homo sapien
aaggtagggaggatagagtatctacctcaagggttgttgtgaagattaagagttgatacttgtaaaatgcttagaatagttcctggcacacaataggtactcattaagtgtttgttgtttgttgttgttgttattgtaaccattattgcttataggaaagtcccttgtctgggaaaccctcggtcctggttttagcatggaaagtcccatggccttggtaaaagttcaaaacgggtccatatggcaggctgaggacagagagtcagcctggcgccctggtggtcactctccactgtcctgcatctttttcagagctcacctctgaaaaactgccccttactctttgtaattgccaccctcccagtatttcaggacactgtactacttagccaacagggtgtacagaaatcatatacctttttcgcacattcttctatgtactaagcttgtccaacccgccttattctgttgtcgttgttgttctgttttgttttgttttaggcttttagcagcctgaagccgtggtttttagtttctgtctctaatgaagctgaaaagagggatgaggaaggggctttactggcccagccagaaacagaaactaagaacctgtgactgtattcagtctctttaacatcccagattgtagaccatcactctagtttccccacttcctgttaacttttataactatctctgaactttaacagaacactattttgtgtttgcaaataacgtgctaaaacgcctttcctagccgaatcaaaccctagcatctagtgccccctgctgccctttcataggaaaggcaagaaggatgaaagtttgattcactgacagtaaaatttttacttgtcgagatttcaataggaatcggtataaatatcctaaattatattcacgtttcatcttttctttgaacctactccttgacttggttttttgtcttgcctttgcgaacattcatttttgcttaattatatttttctcatttatatttgctttccttgaatttccttttggttgttttgctattgctatttgaacttgttttgtcttggctctttctcactttggccatgccttgacacagacgcgcggggtcgagaggctgcgggctcggcgggcggagggcgcatgggagcctcttggccctggacctgcccctgcaatccttccgcgggatctcttggaccctctccagggtcctggctctgagacgttgctagaggacaaatccgcgggatttagagcgcggccaatgggacagcggtgcctggctgagtgtcaggcaaaactagccaataaacatgtagtttgggcaaggtgggtccgtcccctaactcggaccttataaagcgcgcccgctgctcccacaaagccgggctgtcccaggctgaggcggttgctcccctgccgggtgtgttagaagcaagttagaggaagaaggtcttggggactacgggcgccaccgagaacccatacgaggcagccgccgacggcgggtcgccggggcggggccagaacggcgccaaggccaaccagaacggcggcaagaactagggggacgcggggcaggtgctgtgggagttggctggacctgtgggatcgacgtctgcgccgtccaggagccgcccaggggagagagcggagactcgggaggaggatgtgcgctccgacccgggcaaggcttcccatccctcccttcctcttctctccttccctccacctgggctcggagtcaggatctgaccgcgggctctgcccaggaagaccgagttccttgagagcgacacctaagcgccggggaagacagggatagaagagacgacagccctttgataagagggtttttagactaacttccacctgtgacgagtgcatggggcctgcgccctgagaggttgcctttccttttcctctcccaccctgggggtttgtggtgatgttaagttctgttaggaccaaggtggatctcagtaaggaggtagagtagatttgtgaacagctgtcggaggtagaatctttgcagacccagagtgggtgggtgtagacactttgccatgggtggtagctttatttgtaatcctcccagtgaaagctttgggaaatccagccctcccaaactcttgcctttcttgtaagactttctaagcgcatggctttgtcgtaagacttctcgtggccatgtgtctcaccctaccgttcgtctcaccaatgaaccagagctgggataccagcaaaaaggacccaaaagactgtttcaccacaattgaagaggtcgtggaccatcccccaaa

SEQ ID NO: 36399 - DNA, 2300 bp, Homo sapien
gaaattatggtaataattagatccaccccctaggtcttgtaatctttaatatgttaataaagaagcacatctattatgtgacagatttaaatgtttaagaatttgatttcaatgaaattgcatttcaataaaattggcttcctttgcaatcctgtgtattttattttgtgcatttctccagactgccaaagaggttggtgacacattgaaagttaagagtctctgctgtggatcatgcatagaaagctttacaaaacagttgaggggaataggctttcctgcatccttaccttgggctgcagcctttccattagctggagaaggcagcagctggtgcctatgagttgagagggcagtggtccctttgcctaagaaccatcctgttcccacatattcaagggtatggaattcccataatattcaaagagtttttctttagttttaggtgatacgccttgagtaggaatatcatgaggctgtttccagcttcgagtatgttggtgatagggtgtaagggatctcagagcatctagtcttgtccatatcttaaatccaggcactgaggtccagaggggagttatttacccaggtcacatcagatgaagataatgaagtattccaagaggattttagttttattccaaatagggtaagtgttctgagagtgtgaggagagaaggtgaggaggctggggtaaggatgggcatagaaggggatggaaaggagggctgagagaactcagaaccaaatttcaggctatcactttctccacgccacattccagtgccttgccatcaactcttctgtgaatcttcaggaattttattaattccccaggaccaacttagactttcataagttagatgtagttatattacttccctgaagcacttttatgcacaaagaatagatgtagcaaacaaacttcacaagatttaatttttgagtttccttttttattctgaggaattccgctgtaattctcagtgacacagaacctctagagctacttcactatgacaaccttcttcaaatctccaaagggctgttacataaggaagagggtcggagttctgtattcaatcaagaaggcagaagattgagatgataagttgctacagggaggcataatttaaagtcaatttaaactgtaatcccagcactttgggaggcagaggcgggaggattgctttgagctcaggaattcaagaccatcctgggcaacacagtgaaaccccgtctctacaaaaaaaaaatagtcgggtgaggtggcacacacctgtaatcccagctacttgggaggttgaggctggagaatcgcttgaacccaggaggcaggaggcagaggttgcagtgagacgggatggtgccactgcactccagcctgggcgaccgactgagatcctgtatttaaaaaaaaaataaggtcagtttaagtttcgttcctgggattgagcggattgccttgcattaggcaaggttttaagtgctttccaactctggaattctatacctttcccagtagatatctaaacccagcaaatcctgggcctgaagtttaaaactaggatcctcgtctcccaaccacatctagatgatcccatagtgtaatgaagggtgcttgggctttgacaccaggcaaacttggattttgacctgggacaactaagtcacttgacctcactgaaccttagctccctccactgacagtggggacagtctgctggagggtgtgtagaagacctcgggttgccttttggaggttctggaaatgtcccttgaaagatgaatggagttaatttaaaaatcttcgccttctgtaattttggcttcttgcaaacacgcttcctgccagtcctgctccgtcaggcgggaggcagcaaaccccagccctggctccaggacagggccgaaggcaggatagacggagcaacgggtccggctgccgccgggatgttgcagcacagggcctcctggctgcctggcctacaggccgcccggattcagccggagggcatggaccgggtggagtcctgcaaggcgagaagggacacagcgcatgcgcgcggcagggagggcgtttccaggagggagcggcctttgctcagcgcgagacggctgggcgccgagtgggacagcgctggtgcggagactgcttccggactccaggtaccgcgcttggcggcagctggccccagacttctgtcttttcagctgcagtgaaggctcggggctgcaggtgagctgtgcatcccgcaatggagaccttcctgctctgaattttcttacaaaactgcaga

SEQ ID NO: 36400 - DNA, 2300 bp, Homo sapien
agactgaactgaataaagtcttaaagacattttttgggaaaatgctagtgagctgcatgttcttcctcttatcttcatttctcacgtagtgtctctttctgcctccctactggtgctgatagagggaacttagttggtctttgtgtaggaggggcgcagattccctgggttgtgttaatggtggtgtcagtccttggcttcactctgaggctgtgctttgtgcattgcgggccctgaaaatcagaatcagcaaactccccacagtgaagaagtttttgcagcctggcagcctgaggaagcttcccatagatgcaaaaggtttacaagaagcaacaaagattttcaaggtttgataaagcaggcatggatgccaagaacatgcaataccaatattctaaagttttgcaacaataaattgctttatctaaatgttggttgtggctattgtgaagttaataaactttttaaaaattgtatgctaattacatagtaaaatgcctatgaccagatttagttaaaattgatttcttttcattagtatctgatatgaaatcagatttccgaactgcccataaattttcttggaattaaaaatttagtaaaaagtacaatgtagactatgtggtttgtttgactttttcaagaattgtcctgcaacatttgtgaaattgcctatcaaaaactcatgtatagaaatttacttctgacattctgcacaagaaaacagttatcattctggggaatggcaaaatgaaattttcttttttccttgacatccattttatttctcatgaaaacactttttcttatgcattttcaaacaacctttctgtctgctatggatccctcagttttctaggaggtgaggaaatattgaagagcaaacagacccaccctctgctctcaggccaacttgtcatcccttacagtgcatgtgctcctggctcatcctcactctcctccttaaggctctgtggggacccgggcataagccttccctcagttcgttcagtgccactcaggcctggctgcgaagatacagatggtatatgtgaattacgtataagtaactatatttaaaattatttttccctggtgtgtcattgtgccagcgtgtttggattagaagtgatttccaggaatccttccctgcgtcttctagtttcggggggctcttggcctttctggactttcatggatcatgaccacatcactctaatttctgcctctgtcttcctgcacctcaccccctgtgtgttgtgtcttctcttctctctgctgtgaggacaattgtcattggatttggggcctatccagatataccaagatgatctcatctcaaattcttttacttcattacatctgcaaagagcctttttccaaataagatcaagttcacaggatctagggatttatatatggacctgtctttcttggggtccaacataaccccctacatggtgtagatgaagaaagaatatttgcaattgatgaatccaggtgatggatactttcatatttgttatattatgggcaatttgagtgacgcaaagaggatagcatatgcaaatagggttcccggatttgtcagataaaatgcaggatacccacctaaatgtgaatttcaggtaaacgataaataatatttcagtataatctggtttcataccgtgtttggaacatagctataactaaaaaattgttgattgtttgcctgaaattcacatttacatggatgtcctatattttatttggcaacccagtaagaaaacggtggcatcagcttgcccttcacagacatcctctcccagctatgctcacaatagggttttttcagttgccctagtctttgcatccaactcatgaaaaaaagtatctttaaaaagccagtttctgctgacttgcaaaaagagcaaaatctaggtgaaatgtattgtttaaactttgattaccaaccttgaaaaggaacatattaaccagtgtcttctgataagcagatcacttgcctcatgtcttagaatccagtaggtggccccttggccatgaaatgtgtgggagtggcttttccctaacttgacccttctttcagtgggagggaactattgagaggaacaaagagcttataaatacattaggacctggaattcggttgtccagccacaaaggtgacagcatttaacaaagtaagtactgatcttataaatctctctacattgcctcacaccctcctctctagcctcctagaaaaatacactaatatgtgtccttagcacaagaaaaagtttgtttttactcatatc

SEQ ID NO: 36401 - DNA, 2300 bp, Homo sapien
aactgaataaagtcttaaagacattttttgggaaaatgctagtgagctgcatgttcttcctcttatcttcatttctcacgtagtgtctctttctgcctccctactggtgctgatagagggaacttagttggtctttgtgtaggaggggcgcagattccctgggttgtgttaatggtggtgttagcccttggcttcactctgaggctgtgctttgtgcattgcgggccctgaaaatcagaatcagcaaactccccacagtgaagaagtttttgcagcctggcagcctgagggagcttcccataaatgcgaaaggtttagaagaagcaacaaagattttcaaggtttgataaaacaggcatggatgccaagaacatgcaataccaatattctaaagttttgcaacaataaattgctttatctaaatgttggttgtggctattgtgaagttaataaactttttaaaaattatgtgctaattacatagtaaaatgcctatgaccagatttagttaaaattgatttcttttcattagtatctgatatgaaatcagatttccaaactccccataaattttcttggaattaaaaatttagtaaaaaagtaaaatgtagactatgtggtttgtttgactttttcaagaattgtcctgcaacatttgtcaaatggcctatcagaaagtcatgtatagaaatttacttctgacattctgcacaagaaaacagttatcattctggggaatggcaaaatgaaattttcttttttccttgacatccattttatttctcatgaaaacactttttcttatgcattttcaaacaacctttctgtctgctatggatccctcagttttgtaaggggtgaggaaatattgaagagcaaacagacccaccctctgctctcaggccaacttgtcatcccttacagtgcatgtgctcctggctcatcctcactctcctcaaggctctgtggggacccgggcataagccttccctcagttccttcagtgccactcaggcctggctgcgaagatacagatggtatatgcgaattacatataagtaactatatgcaaaattatttttccctggtgtgtcattgtgccagcgtgtttggattagaagtgatttccaggaatccttccctgcgtcttctagcttctgggggctcttggcctttctggactttcatggatcatgaccacatcactctaatttctgcctctgtgttccagcacctcaccccctgtgtgttgtgtcttctcttctctctgctgtgaggacaattgtcattggatttggggcctatccagatataccaagatgatctcatctcaaattcttttacttcattacatctgcaaagagcctttttccaaataagatcaagttcacaggatctagggatttctatatggacctatctttcttgggggccaacataaccccctacatggtataggtgaaataagattatttgcaattgatgaatccaggtgatgaatactttcagatttgttatattatgggcaatttgagtgacgcaaagaggatagcatatgcaaatagggtctctggatttgtcagataaaatacaggatacccacctaaatgtgaatttcagataaacaataaataatatttcagtataatctggtttcataccgtgtttggaacatagctataactaaaaaattgttgattgtttgcctgaaattcacatttacatggatgtcctatattttatttggcaacccagtaagaaaacggtggcatcagcttgcccttcacagacatcctctcccagctatgctcacaatagagatttttcagttgccctagtctttgcacccaactcatgaaaaaaagcatctttaaaaagccagtttctgctgacttgcaaaaagagcaaaatctcggtgaaatgtattgtgtaaactttgattgccaaccttgaaaaggaacacattaaccagtgtcttctgataagcagatcacttgcctcatgtcttagaatccagtaggtggccccttggccatgaaatgtgtgggagtggcttttccctaacttgactcttctttcagtgggagagaactattgagaggaacaaagagcttataaatacattaggacctggaattcagttgtcgagccaggacggtgacagcgtttaacaaagtaagtactgatcttataaatttctctacattgcctcacaccctcctctctagcctcctagaaaaatatgctaatatgtgtccttagcacaaggaaaagtctgtttttactcatattgtgccgtc

SEQ ID NO: 36402 - DNA, 2300 bp, Homo sapien
ctcatcttcatttctcgctcagtgtctgtttctgcctccatgctggtgctgatggcacagacttgcttggtctttgtgtagaagggtctcagattttctgggtggtataaacggtggtggcaggccttggcttcactctgaggctgtgcattgtgaattacaggccctgaaaaccagaatcagcaacctgcccatggtgaagaaatttctacagcctggcagcccaaggaagtctctcatggatgagaaatctttagaagaagcaaggaagattttcagattttaataaagcagccatggaggccaagaacatgcaagaccaatattctaaagttttgcaacaataaagtactttacctaagtgttgattgtgcctgttgtgaagctaatgaactctttccaattacatactaattaaataataaatctcctatttgtcgacttggttaaaattaatttcttttccttaggatctgatatgaattcagatttccaatctcctcctaacctaccactttcttggaattaaaagcttagtaaaaaaataatgtagattatgtggtttgtttgacttttccaagaattgccctgcaacattcaatttgtcatacaatctattaaaatgtcagtgtagaaatatacttctgacattttcaggtatgcacaggagaagagttaccattctgggtaatgacataaagacattttcttcttttcttggaccatcattttatttctgataaaagcattcttccttatccatttacaagacaaccattctttctgctgtggattcctcagttttctaggaggtgaggaaatattgaagagcaaacagacccatcctctgctctcaggccaccctgttttcccttacagtgtgtgtgctcctggctcatcctcactctgcctccttaaggctctgtgaggccccaggcatgagccttccctcagttccttcagtgccactcaggcctgggctgccaagatacaaatggtatatgcgaattacatataagtaagtatatgcaaaattatttttccctggtgtgtcattgtgccattgtgcttggattaggagtgatttccaggaatccttccctgcatcttctagcttctgggggctcttggcctttctggactttcatggatcgtgaccacaccactctaatttctgcctctgtcttcctgcacctcaccctctgtgtgttgtgacttctcttctctctgcagtgaggacaattgtcattggattcagggcctttccagatataccaagatgatctcatctcaaattcttttacttcattacatctgcaaagagcctttttccaaataagatcacgttcacaggatctagggatttctatatggacctgtctttctagggggccaacataaccccctatatggtatagatgaagaaagattatttgcaattgatgaatccaggtgatggatgctttcagatttgttatattatgggcaatttgagtgacgcaaagaggaaagcatatgcagatagggttcccggatttgtcagataaaatacaggacacccacctaaatgtgaatttcagataaacagtaaataatatttcagtataatctggtttcataccgtgtttggaacataggtataactaaaaaattattgattgtttgcctgaaattcacatttacatggatgtcttatattttatttggcaacccagtaagaaaagggtgccatcaacttgcccttcacagacatcccttcccagctatgctcacaatagagatttttcagttgccctagtccttgcatccaactcacaaaaaaaagcatctttaaaaagccagtttctgctgacttgaaaagagagcaaaatctaggtgaaatgtattgtttaaactaattgccaaccttgaaaaggaacatattaaccagtgtcttctgataagcagatcacttgcctcatgtcttagaatccagtaggtggccccttggccatgaaatgtgtgggagtgggttttccctaacttgacctttctcctttcagtgggagggaactattgaaaggaacaaagagcttataaatacattaagacctggaattcagttgcccagccacgacagtgacagagtttaacaaactaagtactgatcttataaatccctctacattgcctcacatgctcctctctagcctcccagaaaaatatgctaatatgtgtccttagcacaaggaaaagtctgtttttactcatatcgtgccatcttggtgtgtttgggtgacagttcaagaattgtttatttc

SEQ ID NO: 36403 - DNA, 2300 bp, Homo sapien
ctggggagagcctagaagcattgaaaacccagaagcaatgagtacacatagttccgagatcctagttttcaaataccttccccaataaaaggaaacaaggatctttggagaaatggttgacttcaaggctgggacacagacaagacaagataagcctggaacatctttggcacagaaagtatctggaaatgctcacaataagagaggaggtttgccataaaagacacagaagccaatctgaaggagctcccacaggctaaaggtggatcaatttgagcaataaaatagatatcgatggtattagattgtaacctttagaataaaatatctataaatctgtactaagaaaataattgaatgaatggaaggataaataaaggagaagagacagcttttctttacagaagaattcgaattattaaatgtagatggaatgagggaaatagaaagtcactattagacaaacactacagtaatatttgctgcaggcaagatccataatggatgctaaagttagtgagcagaagcttattttgaaactgactatttttatagtcacaaagtatcttccacaagatatttatgaattccaaagggataaatagtaatattacggttgatgaacctggcagacgctactttaatcaagggattaaggttaagatcaaaattaataagacataccatgtctcggatatgaaattatgggtggaaatgatcagctgagactggaacaactgctgtgacattttgcaaaaaatgtatgtcgtcaatcgagtcatgagaaaacatcagatagacccaaattgaggtacattccacaaaataattgaccattactcttcaaaaatgccaccatcatgaaagacaagaaaagactgaggaactgccatagtttggaggtaactaaggagatgtgacaacgaaatgcagtgctggggtcctggatgggatcctgggttagaaaaaagatactgattgaaaaactggtgaaattcaagtaaggcctggagtttagtcaatagtgtatcaacattaaattcctggattcaatcattgtactatggttacataagatgttaacattagcggatgctgggtgaggggtatttgggaaacttgtactagttttgcaatttttctgttacataaataactcccccacccacaagtttaaaagatacagattagattatagaggaaaaaaactaagtctgagatttgcttcaaatattgtcaataatttttgaagcaaggtgatgggtacatcaaggctttgtagtgttctttccagatttatgtatatcagacaatttcctttagaaaagtagaaattacatatacgtgtattaagccctttctatgtccaggcactgtggttagccacggggacttggttaaccaccaggacttgaggccctgcctcaaggagctcatactcaacagggggaaagcagacatgatgcacggaatgtagaaagagtgatgtgatagaggaagcacaggatgccttggagcaggggagaaaagagtgctccaaataggagaaacagcatgcagagccttgggctagggagaaaggctaactggtaagtcacagagaaaaatctgcaaatgacctcggggaatgcagctgaggtcttttgtctgcccagggcaaggacaactcagccagattctttgggcctataaaattttgtgacattatttgtaatttagtctttttaaacaaatttagaaggcaatctccctatgctctttatcaagtcccctttcctgacatctcctatgactctcctatgacactttcctcctctccccacaatgttttctcatctgtcataaatctgcagcctatttaacaagatcctccttaagcagtgttcacaggatacttggtccccagtgaccttctgaggcagccaaatagatatgaaatctttttgtgcatttatggatagccttgaaattaattgctgtcattttcttcctagcagatcatggaactctggagactaaagtggtgtgggagtggctgctcccaactagactccacccccttcagaaggcaggagttgtcatagtattaaaacagctaacatacacatcaggaggtggccttgagaagctgagcggagaccggctagactttactcaagttagtattgaccttaaacatcttcataaatgttctcatgtctacttcactaagaaaaacaaatttaaatgtgttagtttgtgtgagtactttatgttcttgctgtttttctgtgtgcttaggagacaatttaagcattgtt

SEQ ID NO: 36404 - DNA, 2300 bp, Homo sapien
tcctctgttgtcatcctgtcattgacctgacggagataccagagattgccacactcttgggctgcagttttggtggcacttctctcatttggggttagtgtttgatctagcagtaacattatatgtctccatgtcagatcaaaagattgtcctaacccttgtaaaacattaatatagccatcagggttatctgagaatttacctaggtctattttaatttgcttcaactgtgagagggaaaaaggtgcatacactctgactgggctgaattctccacaatacatcttaggggtgtttttgccttgggggaaacgtttcccatctgaaaaaagaacataaggatgccagcaccccagtaattttccaatgagcattagtcatagagcatcctctatggtcctaatgcttattactttccagggtgcgtaaccacccatggacctctgcttattggattagttaagctcactgatgtggcagtcctgcccctgttttcccacctttcttgaccacaaagaaatgggtctgggctgctggattctagtggtcctttaccagtgtgtccaacattgcctttgtgctcaggggtgagtcctagagctgggctgggttcctgaatatttcataacaacccagctgccccatcaagatgcattcccataaacaacagttcttatgcaaattcatttcagagaacgtgtaggtaactttttgagtcaggattgagtaagtacttgattctgtaagtactttaaggcttggctgagtgcaaacagcttgcatgtttgagcagagcaattattaggcaatttttctaactctgcttccacaagaatctccctgtcagttactgaatacccattgtatcctcaatcacctgagaggaaccatctatcttcctgtcctgaagggagttcctcctaggtctggttggacctttgtatggtaattaagatttaaatcccctgttaggaaatctgctgggttaagggaattatcagtggttggagttacattacctttttctaacagaatagcccccatactttaagatttttgagttagtaacctttttgcttttttgacttagaataactctgaactggtgaggtgtgctcacaatgaggtttcctctaaaggttacttttctactttcttctgttagcaaagcagttgccgctacagattgaatgcatccatgggttactgggttaaggatttttgataggaaagctactggttttctgtggtctcagtgttttcaggctacgcccttgtttacactgacaacaaggtagtattggagtgttatagggtcacggagaggaccttcaattatcaattataggttttaaatttacgctggcttttaaaggagtacagcgtacttttttttttttttactatttctttctttttgactccctctgtctctctctctctcctcagtgtctctctctcctccatctctctgtctctcccctccgtctctatctcctccatcctctctctctccttctcttagccattacaaacttggggccctggcaagagtggggggaacaggtccctcataactgcccatgttgaaagctgtatacctaaatcgggagggacaccagggataagactccctgggtttatagcctagatgcctaaggatgcagcatagagcttccttagacccctttggagatacaacttgctagaggaaatgaaagtctgaacctttgtacctaggaggcagggatcagaggaagtagattcagaggtaaggagaattttggggctactctttcaagaaagtcttggtcaggacccagaaagtgtgggtcagaaggaaaggtaggggtgcacacatgggcgactgttgaatagagacttctggctgcaccatgatctcaaccagctaaagccgggagttcaggacgtcagctttctgcctctagtcagcccttggcttccccaagaaaatggaaagcggaaactggttctaggcaagcgaatgttcccaacccagaagggttggatgttgttagaaagatcttccttcctgagacggcctcacacctgagtcttaaatctggtggccatgttaatcatttttaactggccgacaggtacctggtattttcctccaattctaaggaaggataggacagaatagcaagggaaagtgttccaatattgccactttggaggtcccatctgggtcgccaaatgttaccggggggtccttgctcccagagctcccaagatggtggcaagctgcttccaagatggtggcaagccttgtgttc

SEQ ID NO: 36405 - DNA, 2300 bp, Homo sapien
cctttgagacgtggaggatttacaccatttctaccattaactgggagcatcagttgagcaccttgtccctgcatatatcatataaactttctgagctaaatgtggtggcttgagcctataatctcagcttcttgggaggctgagggtggcaggatcccttgagcccaggaggttgaggctgcagtgaactgtgattgagccactgcactccagcctgtgtgacagacctctaagaaaaaataaataaataaccctttctgttaactaatatgatgttttgacttttgattttagtatgttgtagtacaaatatccagggacaaattcctcaactgaatctatctgagagacaaattgtcaattgatccaggagtactgcctgcactacatctgaccatctaggcttcgagcattgttgccccaaggatactgttcatgagcattagatggagatcctctgggagcattgaggctcctttcctcacaccatgagcacccactctggcaagtagcagaagccaagcctatgatcctgattctgccccacccctccaagttgaatgtttttcaactaaattcaccaattgttaacattttgctacatttgctttctcccttccttttttttctgaattgtttcaaagtagttgcagacatcagcatgtgtcttcctcccaatgttacaggaaaggggtcctgatccagaccccaaccgagggttcttggatcttgcagaagaaagaatttcaggcgagtctgcagtgcaaagcaaaagcaagtttattaggaaagtaaaggaataaaagaatggctactctatagagcagtcccaagggctgctggttgcccatttttatagttatttcttgataatatgctaaacaatggggtaaattattcatgcctcccctttctagatcatatagggtaacttcctgacattgccatagcctttgtaaactgtcatggtgctgtttgggagtgtggcaatgaggacgaccagaggtcactctcatcaccatcttggttttggtgggatttagctggcttctttaatgcaacctgttttatcagcaaggtctttatgacctgtatcttttgctgacctcctgtctcatccagtggcttacaatgccttaactgtctgggaatacagccccccagtaggtctcagcctcattttacccagctcctgttcaagatggagttgctctggttcacacgcctctgacaccaaggcaaaataaataattgtcctaataaccacaataccattgtcaccaccaagaaaattaacactgccttcacaacatctaatatgcaatccatattcaaattttccgttttcccccaaatgtctatataatggttacacgtctgtttagcagttataacagtttcctctcctctgaaatctacttccaatttggttgttaagtctctagttgattttcatcaacaggacctgacttttttttcatgccttcgactcttgagaagtccaggccattatgttcgtaaggtcccacatcctgaatatacctgattttcaccttgtgtgtagattcagggtaaatatttttggtgttgttttagcaggtgtgactgtgcccttctcactttgttaacaacagaagcctcaggatgtcagagtgttctccactggggagccaagtttgattgtttggttagacagagggtgagagatctcccgatctctccattataaatcgacactttccctttatcataattaagtaacttaattaagtcttctgtaaaaaagagcttttccttcctcctacctttttttttttttagcatcatcatttatggacatagagattttattgttgggtgttataatccataattgacatcattctttttgatgcttaaattttcccagatttggtagggattccccttacagggccctccatgcctttctctttcacatttgagcacttccttgctttctggcataacaaaatcaaccttctcttataggacccctagttccttttagggggcagtgatatttagaaaccaagatgtggatgctaagtctgctctttctctctgcttcttaagactgtttaacttggcattttttgtcctgagcctgtatgatatttacctccttttggagggtgaggatatctttttaaaaaattgatgcataatgtacatatttggggaatacatttgatattttgatacatgtgtatcatgtgtagtgatcaaatcagggtaattaggatatccatcacccacctcaaacatttatctttccttta

SEQ ID NO: 36406 - DNA, 2300 bp, Homo sapien
catctgttagaggaaaatgttgaggaactcccagatgaaatgttatgatgtttggattttgctttaaaatactcccacaaaacaagggaagggaggtgatagatgaaacaagattagcatagagctgatgattgctgaagtcgggtgatgagtacatagaattcatggcaatgttctctctacatttattggtatttgaaaatttccatactaagaagctaaaagaacagaacgaaaacaaaaacagacacacacacatatgtaagcaagataccaaggctgccagtttgaagccactgaagaaaacaagaaatttaccctgagaatgcataattaataagagctcagagtaactgacaattttcaggtaaatttcctttcttcttattaataaatattcactggtgctagatcagaagccaataattaagtaaaagtcaaaaggaaaatagaattccatcaactacgttctaattataaagaaaaatcccttcagggatggtatctgactcagtgaagcgtgcctgtgattttggtggacgagaactagaactgaacggtgcttcaaaacgtatttttctttcaaaggtctcaaaagctgtatgacaaatccgtgaagaaacagcatataaggtacctcgactccggcggcagctaaaacccatctcacggactccatccggcctcttccgttgggatagtggagcttgggccttgctgccatgatagcttttcaggctttctgaaatacaaatgcagcagctcgtcgcagaccaacagtcccaatttcgcgtcttcaacccagtgctcaggggcgaaatgaatattcaggattttggcacgggaaactgttctttatttttgttgctgcattttccctcactcaagaaaaaaaaaccaccattttaaaacatggagaaaaaaaccttggcttttatatgatttctatttatgacttcttatcctggatcttgggaagctggggccatttgttgtaaaaacatatgtgctagcagtacgggatttcacaaattcagaatattatatattttgacctcgagaatctcagattttccaaattcagctgggggatagggggtggcaggcgttgaagagggtagcgaaggaaaatcgcacagccactggaagctcttcaagtattcatgcttttacatacatcatcatattttattatcacggcaactggaaggtgaacaggccgagtactactactgtctgcaaaatgtgcgtccaccgtcacgcatgcggtggctgcgccccccgggtcccgcgtgtccaccacccctacagggagatgagcccccggccttgtaaaacgagccgggggccagggcttggccatctgagatcgcactctcccatgctcgtcttccccgctcagcccatgcaggggcgtagcggcagcccagccaggcccggggacgatccgagcccaccttccaccaatgcattcagactccgcagaaggggtttaaaaaaaaatacgcacactgagccaagaaggaccccagctccagccaaggggcccacctctgcccagactggatggagcaggaggacaaaggacaagaggaagaaaagacaagagaaggactgaactgggggagtgagggaagaatgcgagagtgagactcagagagtaaaggggagggaaaaaaaagaagagagaaagggcgaggaagggggcgaccgcaggagggagacagacctggagtccactcggaggcctggagccgcacaaagcgccaggtcagcggtcccggctgggtgagaccagcaggcggctctagcgcgcgggagctgggcgaggctccgggacgacctcaccaatggagactgcagtatttagcatgccccacccatctgcaaggcattctggatagtgtcaaaacagccggaaatcaagtccgtttatctcaaactttagcattttgggaataaatgatatttgctatgctggttaaattagattttagttaaatttcctgctgaagctctagtacgataagcaacttgacctaagtgtaaagttgagacttccttcaggtttatatagcttgtgcgccgcttgggtacctcggatgtgagggcgatctggctgcgacatctgtcaccccattgatcgccagggttgattcggctgatctggctggctaggcgggtgtccccttcctccctcaccgctccatgtgcgtccctcccgaagctgcgcgctcggtcgaagaggacgaccatccccgatagaggaggaccggtcttcggtcaagggtatacgagta

SEQ ID NO: 36407 - DNA, 2300 bp, Homo sapien
aagcgttgacagtgcttttgattttaatctgtatgtggtactttgcctgcttaacacccttatgtggatttcctgacggacttgacattcctgtcaggaaagcattgcgtacttgctgattaaaaagcatctaagggccgggagcggtggctcacgcctgcaatcccagcacgaggcaggaggatcacctgacgtcaggagttcaagaccaccctggtcaacatggcgaaaccccgtctttactaaaaatagaaaaattagccgggcatggtggcgcgcgcctgtaatcccagctactcgggaggctgagtcaggagaatcgcttgaacccgggaggtggaggttacagtgagccgagatccgtctcaaaaataaaaaataaataatgaaaaaaattaaaaatttaaaaattaaaaaacatttaaaaaagcatctaacttagatgggtaatgggtcaaaagaaaggcagactgccacatgcagcgcctcatttggatgtgtctggagtcttggaagcttgactaccctacgttctcctacaaatggaccttgagagcttgtttggaggttctagcaggggagcgcagctactcgtatacccttgaccgaagaccggtcctcctctatcggggatggtcgtcctcttcgaccgagcgcgcagcttcgggagggacgcacatggagcggtgagggaggaaggggacacccgcctagccagccagatcagccgaatcaaccctggcgatcaatggggtgacagatgtcgcagccagatcgccctcacatccgaggtacccaagcggcgcacaagctatataaacctgaaggaagtctcaactttacacttaggtcaagttgcttatcgtactagagcttcagcaggaaatttaactaaaatctaatttaaccagcatagcaaatatcatttattcccaaaatgctaaagtttgagataaacggacttgatttccggctgttttgacactatccagaatgccttgcagatgggtggggcatgctaaatactgcagtctccattggtgaggtcgtcccggagcctcgcccagctcccgcgcgctagagccgcctgctggtctcacccagccgggaccgctgacctggcgctttgtgcggctccaggcctccgagtggactccaggtctgtctccctcctgcggtcgcccccttcctcgccctttctctcttcttttttttccctcccctttactctctgagtctcactctcgcattcttccctcactcccccagttcagtccttctcttgtcttttcttcctcttgtcctttgtcctcctgctccatccagtctgggcagaggtgggccccttggctggagctggggtccttcttggctcagtgtgcgtatttttttttaaaccccttctgcggagtctgaatgcattggtggaaggtgggctcggatcgtccccgggcctggctgggctgccgctacgcccctgcatgggctgagcggggaagacgagcatgggagagtgcgatctcagatggccaagccctggcccccggctcgttttacaaggccgggggctcatctccctgtaggggtggtggacacgcgggacccggggggcgcagccaccgcatgcgtgacggtggacgcacattttgcagacagtagtagtactcggcctgttcaccttccagttgccgtgataataaaatatgatgatgtatgtaaaagcatgaatacttgaagagcttccagtggctgtgcgattttccttcgctaccctcttcaacgcctgccaccccctatcccccagctgaatttggaaaatctgagattctcgaggtcaaaatatataatattctgaatttgtgaaatcccgtactgctagcacatatgtttttacaacaaatggccccagcttcccaagatccaggataagaagtcataaatagaaatcatataaaagccaaggtttttttctccatgttttaaaatggtggtttttttttcttgagtgagggaaaatgcagcaacaaaaataaagaacagtttcccgtgccaaaatcctgaatattcatttcgcccctgagcactgggttgaagacgcgaaattgggactgttggtctgcgacgagctgctgcatttgtatttcagaaagcctgaaaagctatcatggcagcaaggcccaagctccactatcccaacggaagaggccggatggagtccgtgagatgggttttagctgccgccggagtcgaggtaccttatatgctgtttcttcacggatttgtcatacagcttttgagac

SEQ ID NO: 36408 - DNA, 2300 bp, Homo sapien
actgtctagtgggtatttccagctggatggttcatagcaacaaaagacaagtcaacccattttccccaaactttgtcttccttctccgctctttatggaactagaaaccaaagcattgctcattcattcattcaacaagtgttctctgaatacctactctatactaaccaggatgtacaaaaggaaaaccaaaagcgcaaaaatcctcgatctcgtggaatttacattctaggaatctacagacaaataaataaaaaagtcctgttagatgacaatacatgttattaaaaaaaagacaagaagtgtgtgtgtgtgtgtgtgtgtgtgtgtgtgtgtgtgtgtgtgtgtgtgtgtgtgttggacagggcatcattctagacttttcttcctcctcccttccctttgatctgattagcaattgctttaccacctacctccttagtatttcaccttttcttactcatattcttcaaactcatggtgctactttaatttacacagacacaagaggtttctttctctacccctactaccccaattcattcgcctcactttggccagagaaacctattgaaaataaaatctgatcatgttagcggctgcaattgttcagcacccaggcttgtcaagcaaggtactctcgagcgcccccgtgggtgaagaaaataacaacatctatagcctgagaaatagcagaagctgcctctaaaaacaaaatttattttcgaaggcatatatttcaaactttgaaatccatgtgaattttgcaattgttccataatatagccctgatagttttaatatatttttaatgttttaactaacttgccagccaaattattcttttagcaccacccccaactccaaagacccccttccaaacaggtgctgacttgagaccgtgactatagagcacttgtctctaaaatgtacaaaatgaagagaaatctcaagatgtcccactgagatgaagaaagaaagaagaaaatatgtatgtttgtatacatgtatacatgtatatatatgtatacacaaaattagaaaagttagggtctactgtataaattaaataagcgttgacagtgcttttgattttaatctgtatgtggtactttgcctgcttaacacccttatgtggatttcctgacggacttgacattcctgtcaggaaagcattgcgtacttgctgattaaaaagcatctaagggccgggagcggtggctcacgcctgcaatcccagcacgaggcaggaggatcacctgacgtcaggagttcaagaccaccctggtcaacatggcgaaaccccgtctttactaaaaatagaaaaattagccgggcatggtggcgcgcgcctgtaatcccagctactcgggaggctgagtcaggagaatcgcttgaacccgggaggtggaggttacagtgagccgagatccgtctcaaaaataaaaaataaataatgaaaaaaattaaaaatttaaaaattaaaaaacatttaaaaaagcatctaacttagatgggtaatgggtcaaaagaaaggcagactgccacatgcagcgcctcatttggatgtgtctggagtcttggaagcttgactaccctacgttctcctacaaatggaccttgagagcttgtttggaggttctagcaggggagcgcagctactcgtatacccttgaccgaagaccggtcctcctctatcggggatggtcgtcctcttcgaccgagcgcgcagcttcgggagggacgcacatggagcggtgagggaggaaggggacacccgcctagccagccagatcagccgaatcaaccctggcgatcaatggggtgacagatgtcgcagccagatcgccctcacatccgaggtacccaagcggcgcacaagctatataaacctgaaggaagtctcaactttacacttaggtcaagttgcttatcgtactagagcttcagcaggaaatttaactaaaatctaatttaaccagcatagcaaatatcatttattcccaaaatgctaaagtttgagataaacggacttgatttccggctgttttgacactatccagaatgccttgcagatgggtggggcatgctaaatactgcagtctccattggtgaggtcgtcccggagcctcgcccagctcccgcgcgctagagccgcctgctggtctcacccagccgggaccgctgacctggcgctttgtgcggctccaggcctccgagtggactccaggtctgtctccctcctgcggtcgcccccttcctcgccctttctctcttcttttttttccctcccctttact

SEQ ID NO: 36409 - DNA, 2300 bp, Homo sapien
ttataatttcctgaggccaaaactactgatctaggctacttactagcctagcagactcttgctaaaaggtagaccaagacagtacctttgtttgccaggtagacctgcttggacaatttgactaaaactgatcattttactttagaaattgcttttcatgggagtagtatatgacttgttagattccttgtcgtgtctctatcttttcactgataatgattttcagttttcatttgccatatgggctggctgttaaataggtaaacacaaaggtagatatcaatgttatacatatgtcaagtggccagatgacctttttccatttgggagaggaaatctaaagaagcttgactgtcttatatcttgcatgtttcttccacaagatcaagaggagagaaggattcaggtcttggtatagattttttcagtaaaaaacaatcttcagtctgtagaattcaaaaataaaaatagtgagaaaaaaactgatatgatcagctgggaattgtaaactcagagaacagtccacaaagtgtcaaagggttactgctttattaattaaatttgtgttgcttacagcagtgtgacccagcaacattagcaccagaaactctgagagtgcagcccaggagtttgttttaacaagtcctccaggtggttctgatgcttcccgctaatgtttaagaactgttggcttagaacaattatgtaaatttaaaatcagggacctggaagcaacttctttattcaaaccgctctagccttataaggatgatttaaggtaatgtctacaatatcacttatgacataaatcaatgtgttataaaattacgtgttagtgtcagattccctataactagttacagaggacgattgttgtgtagaggatatctgactagagtcagtttcccatctgggttaagagtccagtctttacaactacttgctaacaacataaaaactcttaagagttcaaaggaatgctaacaggcaatcagttgcgttttcattttatttttctgtaaaggtaacatgaaatttgctgtttaaccactttgaatacaattcagtggcattgattactttcacaatgtcgtgccacctcaactacgttttttcaaatcagaaaaatgttttcacaacgattatctttaatttaatgtgctcagaacgtccatcgacagcctccatttctaagtcttgatggttgatcgagccgatctgcaacgaggcgttcgttcggagtcggagatcgccttgcggtcagcgggggttaggggtccctgggcgctgtgctgccctcggcccagagctgcgcctggcggctcggccgcgcgagccagggcgaacaggacgcagtgcagggacgcgcagggccagcgaggggagctgcagggtaacttttcccagggaaagcggccggtcgtccccagtagaagccacccagccttttgtttgttttcctgccggaggctggaaaacggccgggttcctgctgcactaccatgcgccgtgcggcccgtgcgactcgccggacctcgcgggcgtccctgtacggagccctcggccggtcctagcagggattgtccccatttccagctccggagcgggcggctgcgccccgctcgtcgaggagctgcgctcacctcaggggcgggcccccgcctgcgttcgcggcgccagtaagtggggctccgggatttaggggcttctgccgggcgacctgtcactgtagtagctgctgggatggggcggcggggagacccctggccgtggccccgcgacggatcggaggcgcaggaagaggctaatgggttatagtttctttccgcgatcctgtggatctctccttcctggtatgaaaactcggagcctggaggattttgacgggtgtttatcttttagtcttaaggagggggaagaccctagctaatttgaagcctcgttgcggggcacgttgaggacttgctttcggaatttccctgactaggcccttggctgtcccacaaggggtctgagcaaaaatcctcgagtacttatttgcaaccattttttactggatttctttctgttctgatttctttcttactaatctgagtagctgttatgagaaggatattgacggatattccagaacaactgattcttttgtaatgttaaccttttaaagtttgactttgacactaacattaaggacttatatgtaatatagctaatgcatcattctgcagagaagagtattcctttccacttacaactaaataagacctgcttttgctggagctgtgctaggctgagggaat

SEQ ID NO: 36410 - DNA, 2300 bp, Homo sapien
ctcgaactcctgacctcgtgatccgcccgcctcggcctcccaaagtgctgggattacaggcgtgagccactgcgcccggcctgccatgttttaatattgggatccacccttcggatgcgtgtgtttttatttgcaccctaagtcagctacctataaaaaatgccttactgtttaaaagaggccaaaaatttaaattttttgttttaaaggagactctagggcttaagtctttttaaggataaatttcctcccaatgaactccttaaaattgaattttgaaatttaaattggggggaaaggttaaatctaagatttataatagaataaaatgataaatgtgactcttacatactgagaatgaagtattgaaatagtttgggaacaaatctgtttcatttaaaatgttgagtgctagtttaaaatagcctggtcaattacacagatggtttcttttattctagcaagtaattaaagcttaataaaataatatttgtaaagataaattgagcattaaaatactgttatgcttcatagctactaattttctattttcagtcagttccacagtatccactagacctcattacaaggttatattctcatattatatttacaggattataatttcctgaggccaaaactactgatctaggctacttactagcctagcagactcttgctaaaaggtagaccaagacagtacctttgtttgccaggtagacctgcttggacaatttgactaaaactgatcattttactttagaaattgcttttcatgggagtagtatatgacttgttagattccttgtcgtgtctctatcttttcactgataatgattttcagttttcatttgccatatgggctggctgttaaataggtaaacacaaaggtagatatcaatgttatacatatgtcaagtggccagatgacctttttccatttgggagaggaaatctaaagaagcttgactgtcttatatcttgcatgtttcttccacaagatcaagaggagagaaggattcaggtcttggtatagattttttcagtaaaaaacaatcttcagtctgtagaattcaaaaataaaaatagtgagaaaaaaactgatatgatcagctgggaattgtaaactcagagaacagtccacaaagtgtcaaagggttactgctttattaattaaatttgtgttgcttacagcagtgtgacccagcaacattagcaccagaaactctgagagtgcagcccaggagtttgttttaacaagtcctccaggtggttctgatgcttcccgctaatgtttaagaactgttggcttagaacaattatgtaaatttaaaatcagggacctggaagcaacttctttattcaaaccgctctagccttataaggatgatttaaggtaatgtctacaatatcacttatgacataaatcaatgtgttataaaattacgtgttagtgtcagattccctataactagttacagaggacgattgttgtgtagaggatatctgactagagtcagtttcccatctgggttaagagtccagtctttacaactacttgctaacaacataaaaactcttaagagttcaaaggaatgctaacaggcaatcagttgcgttttcattttatttttctgtaaaggtaacatgaaatttgctgtttaaccactttgaatacaattcagtggcattgattactttcacaatgtcgtgccacctcaactacgttttttcaaatcagaaaaatgttttcacaacgattatctttaatttaatgtgctcagaacgtccatcgacagcctccatttctaagtcttgatggttgatcgagccgatctgcaacgaggcgttcgttcggagtcggagatcgccttgcggtcagcgggggttaggggtccctgggcgctgtgctgccctcggcccagagctgcgcctggcggctcggccgcgcgagccagggcgaacaggacgcagtgcagggacgcgcagggccagcgaggggagctgcagggtaacttttcccagggaaagcggccggtcgtccccagtagaagccacccagccttttgtttgttttcctgccggaggctggaaaacggccgggttcctgctgcactaccatgcgccgtgcggcccgtgcgactcgccggacctcgcgggcgtccctgtacggagccctcggccggtcctagcagggattgtccccatttccagctccggagcgggcggctgcgccccgctcgtcgaggagctgcgctcacctcaggggcgggcccccgcctgcgttcgcggcgccagta

SEQ ID NO: 36411 - DNA, 2300 bp, Homo sapien
gaagaaacatgcaagatataagacagtcaagcttctttagatttcctctcccaaatggaaaaaggtcatctggccacttgacatatgtataacattgatatctacctttgtgtttacctatttaacagccagcccatatggcaaatgaaaactgaaaatcattatcagtgaaaagatagagacacgacaaggaatctaacaagtcatatactactcccatgaaaagcaatttctaaagtaaaatgatcagttttagtcaaattgtccaagcaggtctacctggcaaacaaaggtactgtcttggtctaccttttagcaagagtctgctaggctagtaagtagcctagatcagtagttttggcctcaggaaattataatcctgtaaatataatatgagaatataaccttgtaatgaggtctagtggatactgtggaactgactgaaaatagaaaattagtagctatgaagcataacagtattttaatgctcaatttatctttacaaatattattttattaagctttaattacttgctagaataaaagaaaccatctgtgtaattgaccaggctattttaaactagcactcaacattttaaatgaaacagatttgttcccaaactatttcaatacttcattctcagtatgtaagagtcacatttatcattttattctattataaatcttagatttaacctttccccccaatttaaatttcaaaattcaattttaaggagttcattgggaggaaatttatccttaaaaagacttaagccctagagtctcctttaaaacaaaaaatttaaatttttggcctcttttaaacagtaaggcattttttataggtagctgacttagggtgcaaataaaaacacacgcatccgaagggtggatcccaatattaaaacatggcaggccgggcgcagtggctcacgcctgtaatcccagcactttgggaggccgaggcgggcggatcacgaggtcaggagttcgagaccagcctcaccaacatggtgaaaccccgtctgtactaaaaatacaagaattagctgggcttgggggcgctcgctgtaatcccagttactcaggaggctgaggcaggagaattccttgaacccgggaggcggaggttacagttagccgagatggcgccactgcaatccagcctgggctacagcgagactctgtctcagcaaaacaaaacacggcatttggacttccttattgtagctcgttctctctccccttcactctctcgctctctcccctccctcagcactttcacctccatttctgtgccaaagatgtactacaattttttttttttttgagacggagtctcactctgtcgcccacgctgtagtgcagtggcgcgaacactgcaacctctgcctcccggtttcaagcgattctcctgcctcagcctcctgagtaactggtattacaggagcgcgccaccaagcccaactaatttttgtattcttagtagagacggggtttcaccatgttggtgaggctggtctcgaactcttgacctcgtgagccacccgcctcggcctcccaaagtgttgggattacaggcgtgggccaccgcgcccagcggatatactgcatttttaatctctccagaatagaatggattagaaatttaaactctgtaaactcgttgaatgtttggaagcctattagtccctggcaccactagaaactttaaaaactcagtaaatgtttgctaaattaaagttataggctatgaagcctatcagttttcacaaaacaggcaaacccgtagttaaaaagatttaaattgtgtaaaagcaaagtatcaccttatgaacaagtacattcactcaagaagaaatcaggtagtttgggctttaagaggtggggccgaggaccaagtgtaagttccggtgctcaaacctgagcggccgactacaaatcccagagtgcctcgcgggcgccgtctccacggcacttgggtttcagggccatggaatcgcaagcccttttcgcactgcattatgggatctgtagtgagacatgccttgcgttggctctttcctcctgctgggcgccaaagcgcgtcttttcctcaatctccagtctgtctgtgctctcaaaaactttagtcgttataacaactgtgactgttgagaaatttcactgttttcctgcattcctggcgcgggactctagccagaggctccgaggactttgtagcgactgtcccaagcgtccagttcgatgcttctcagggcggcttgctttaagggcccacccctaaatttgggttgtaa

SEQ ID NO: 36412 - DNA, 2300 bp, Homo sapien
tagtggatactgtggaactgactgaaaatagaaaattagtagctatgaagcataacagtattttaatgctcaatttatctttacaaatattattttattaagctttaattacttgctagaataaaagaaaccatctgtgtaattgaccaggctattttaaactagcactcaacattttaaatgaaacagatttgttcccaaactatttcaatacttcattctcagtatgtaagagtcacatttatcattttattctattataaatcttagatttaacctttccccccaatttaaatttcaaaattcaattttaaggagttcattgggaggaaatttatccttaaaaagacttaagccctagagtctcctttaaaacaaaaaatttaaatttttggcctcttttaaacagtaaggcattttttataggtagctgacttagggtgcaaataaaaacacacgcatccgaagggtggatcccaatattaaaacatggcaggccgggcgcagtggctcacgcctgtaatcccagcactttgggaggccgaggcgggcggatcacgaggtcaggagttcgagaccagcctcaccaacatggtgaaaccccgtctgtactaaaaatacaagaattagctgggcttgggggcgctcgctgtaatcccagttactcaggaggctgaggcaggagaattccttgaacccgggaggcggaggttacagttagccgagatggcgccactgcaatccagcctgggctacagcgagactctgtctcagcaaaacaaaacacggcatttggacttccttattgtagctcgttctctctccccttcactctctcgctctctcccctccctcagcactttcacctccatttctgtgccaaagatgtactacaattttttttttttttgagacggagtctcactctgtcgcccacgctgtagtgcagtggcgcgaacactgcaacctctgcctcccggtttcaagcgattctcctgcctcagcctcctgagtaactggtattacaggagcgcgccaccaagcccaactaatttttgtattcttagtagagacggggtttcaccatgttggtgaggctggtctcgaactcttgacctcgtgagccacccgcctcggcctcccaaagtgttgggattacaggcgtgggccaccgcgcccagcggatatactgcatttttaatctctccagaatagaatggattagaaatttaaactctgtaaactcgttgaatgtttggaagcctattagtccctggcaccactagaaactttaaaaactcagtaaatgtttgctaaattaaagttataggctatgaagcctatcagttttcacaaaacaggcaaacccgtagttaaaaagatttaaattgtgtaaaagcaaagtatcaccttatgaacaagtacattcactcaagaagaaatcaggtagtttgggctttaagaggtggggccgaggaccaagtgtaagttccggtgctcaaacctgagcggccgactacaaatcccagagtgcctcgcgggcgccgtctccacggcacttgggtttcagggccatggaatcgcaagcccttttcgcactgcattatgggatctgtagtgagacatgccttgcgttggctctttcctcctgctgggcgccaaagcgcgtcttttcctcaatctccagtctgtctgtgctctcaaaaactttagtcgttataacaactgtgactgttgagaaatttcactgttttcctgcattcctggcgcgggactctagccagaggctccgaggactttgtagcgactgtcccaagcgtccagttcgatgcttctcagggcggcttgctttaagggcccacccctaaatttgggttgtaaaaatttttgaggtaatgcttgttcaagttcgcttaagtgttcactcagcccaacacgcgggttgggcttgaggttcggcacccgggcagcctcaccccccgcgtcaggcgcgcgcacacagtaggtccgcgacccttagccctccactaggcagcccgcggggatgggtggccgggccgcccacacgggcagcaccggcactgcgcatgctcggcgcgtcggcgcaggtttccgcagctgagggggcagctccgcggcggcgtccggggtctccagtagggctgacgctccggtgctcgcacaatcccccgcctcggctggcaacgggcgtccctccactccccgagtccccggcagccgccgccaccccagcgcgccccgatctggccccctgccccgcgaagatggctgccgtacgc

SEQ ID NO: 36413 - DNA, 2300 bp, Homo sapien
ctcctgggctcaagcagtccttccacctcagccttccaaagtgttgggattacaggcatgagccaccacaccctgcctggactgtattctcttaagtgatccatgaagcaaaaactatctgctacagccaggtatggctgcacaagcctgtagtctcagctactcaagaggtggagcagaaggatctttggagctcaggagtttgaggccatcctgggctgcataaggagactctgtcccaagaaagcaataactatttgctgaactccataggacaactaaatgttactattttctgaaacaaagttgttatttttagccacctaacaatacattttaacctagaacccagtggatttgtttattctacagtatcaaaaaaaattcaagtatcaagttatatctgattggtatcattaaacttacctgtgaagaagataactataaagaagcaatgttgtatttcattaacatgaaacattagagtattttctgttttgggacttgtagaagtttatggacactaaaattatttgggctttttgccttagactcaattatgtttggaacatctgtcacagcaccttgtcaactgcattctagaacatttctcctcctgatggaaaatacaacatgacctatgaggcagtcttgcaaaagaaaaaagaaatagcagaatctaatctagcctttcaagatcctgccacaatttataggaaataagagtaagaggtcaaaggaacatatttattgacacctcagcaaaatctagcttctacagaaaaacgacccagtttcatcccaaataaattacaagaaaaaagagtgaggattacaaaagacttgagacatatcaagcaattacaatgtggactttatttgaatcttgatttcacaaactgtgaaatatatgtattttacatatgacatcttgagaaatatgaatactgtgacttgatatttgatctaaggaattacattgataattattgaagttgggtcatgagtacttagggattaattctctttaagtgtttttctcataaaaagttttaaagtcttgtagaactaaaaaaataccaaagatgttctaattttatttcatttttttctaagaagaataatatttttcttttcttttttcctttttttttttttttttttttttatgatggggtctctgtcatccaggctggagtgcaatggtgcagtctcggctcactgcaacctccatctctcaggctcaagcaaccctcccacctcagcctcccaattagctgggaccacaggcgtgtaccaccacgcctggctgattttttgtatttttagtagagatggggtttcactatgttggctaggctggtcttgaactcctgacctcaagtgatgctcctgcctcagcctcacaaagtgtggggattacaggtgtgagccaccgcacctggccagaaaaagagaaaataatttttattatagattatcagtagttatgtatattaatgaagaatttggcttcatttacctaattagattaatcataaatcatttatgaatagtaatagacttgaattgttactttatattacacagttggccctctgtacctgcaggttctgcatcctgggattcaactgtggatcaaaaatatttgggggaaaaaaagcaatacaacaataaaaaataatacaaattaggaaaaatatactacaagaactatttacatggcatttacattataagtaacctagagatgacttaaagtatatgagaagatgtgcataggttatatgcaaatatgccatatgagggactggaaaacccagggattttggtgtcctgggggctcctggaactaatcacctgtggatactgagggacaactgtaattaaattgatttttggatggatgcaactgatgttaaatttggcgggggggaaatgttaggattcacaataacgtgagtactgtgggttggagtagagaatatgcttttcagactcattttcctttggaaattaatagtaaggtctcaagtgccccctacagccttgctactcaaagtgggttccacaaagtgttgacagtatggtactaaatagaaagtggctgaatgagaaatgtagattgcagagggcaactggtgtgtttatatgcctgacattatttgggttttcccccctcaggcagaagctgaggaagattgtcattctgatactgtcagagcagatgatgatgaagaaaatgaaagtcctgctgaaacagatctgcaggcatgtttcttcaattgtgtctttgattt

SEQ ID NO: 36414 - DNA, 2300 bp, Homo sapien
tgtgtgccctttaacctcctccgatggtaacaacttgcataactatagtacaatatcaaaaacgaggaaatagacattggaacaatccacagtttacttggatttcctgagtttacaagcacttgtctgtgtgtatgtgtataaatagttgtttgcagttttattacaaggtagcttcatgtaaccaccaccacaatcaagatacagaactgttttatagttatatactccctttccctagccattcgtaaccactggcaaccactagtctgttctccattttgtaattttgatattccaagaatgttgtataagtggaatcatccagtatgtaaccttttgagattggcttttttcactaagtataattccctcaagatcagtccaagttactatgtatcagtagtttgttcctttttattgcagaatagtattgcatggtatggatgtaccccagtttaaccatttattggttgaaggacatttgagttgtttccaatatttggctgttatgaatggagctatggaaatatgtgtgtaggttttctcatgaacataattttcacttctctgggatgaaaccccaagagtacaattgctaagttctatagtaagtacatgtttgattttaaaagaaactgccaaagtgttttctagagtatcttatattaagttcccaccagcaatgtatgagtgatccagttcatcctcatcagcatttagtgttgctactttttaatttaatttaattaatttatttatttattttaagacagagtctcactttgtcgcccaggctggagtgcagtggtgtgattccagctcactgcaacctctgcctcccgggttcaagcgattctcgtgccttggcctcccaaatagctgggattacaggccccgtcagtaacgctgggctaatttttgtatttttacaaatttgtattttgtatctagaatgcaaaaagaacttccaaaacacaatattaaaaatattagcaatctagctgggtgcggtggctcacttctgtaatcccagcactttgggagcctggggtttcaccatgttggtcaggcttgtctcgaactcctgacctcaagcagtctacctgcttcagcctcccaaagtgctgggattacaggagtgagccactgcacctggcctttaattttattaatagccattctgataggtatgtagtggtatctcattgtcattttaatttgcatttctctaatggcttgtgatgttgaacatcttttcatgtgcttatttttcatctattaatatatattctctctctgaaatatctgttgatgtcttttctaattggattacatatatatatataattatttttttttttttttttttttttgagatggagtgtcactgtgtcaccccaggctggagtgctgtggcacgatctcagctcacagcaagctctgcctcccaggttcaactgattctcctgcctcagcctccagagtagctgagactgtagacgtgtgccaccacaaccggctaatttttgtatttttagtacagatggggtttcatcttgttggccaggccagtgtcgaactcctggcctcaggtgatctgccgacctcagcctcccaaagtgctgggattacaggcgtgagccaccgcgcccagccagatgctaatatttttgatgttgtgttttggaagttctttattctagatgcaagtcttttattgaatatgtggcttgtaaatattttcatcctcttaacagggcatttcacagagcaaaaatttttaattttgacaaggtccagtttatcagtttttccttttgtgaatggtgcttttggtgtcaagaactctttgcctagtcctaggtctccaagattttctttgttttcttttcttctaaaaggtttatggattttacatttaagtccatgatccagtcaagttaatttttatgtaaagtatgaggtttaggtcaaggttcattaatttgcctatgaatatccagttattttgcacaatttattaaaaaggctctccttctgccatccatactaatttttaatgcaggttttcaaaaatttttactttatatttttataggctcgagaactcttcctaaaagcagtagaagaagaacaaaatggagctctctatgaaggtaaaaattcagagcccaggttcatatcataacatttctgaataatgactctgttattaaccatatttttttttctataacttatttggtatagaacatcacttttcttaatacattcttccttcagtactcattggaaat

SEQ ID NO: 36415 - DNA, 2300 bp, Homo sapien
gtttcaccattttggctggcctggcctctaactcccaaccgcaggtgatccgcccacctcagtctcctaaagtgcaggaattacaggcgtgagccaccgcacctggccctagtggtttttttctttctttctttgtttttttttttttgagacagagtctcgctctgtcgcccaggctggagtgcagtggcgcaatctcggctcactgcaagctccgcctctgggttcacaccattctcctgcctcagcctctgtagccctagtggggtttttttttgtttgtttttgtttttttttttccaggcggagtgtcgctctgccgcccaggctgcaggtgcagtggtgccatcttggctcactgcaagctctgcctcccgggttcacaccattctcctgcctcagcctccccagtagctgggactacaggcgcccgccaccaggcccggctaattttttgtattttttagtagagatggggtttcaccatgttagccaggatggtctcgatctcctgacctcgtgatccgcctgcctcggcctcccaaagtgctgggattacagacgtgagccaccgtgcccggccagccctagtggtttttaattagccatcttctgcccaccattcagaatctttatttttgcttatggaagattttcagaagaagcaagggaaaagagtcaaaccaaatcaaaaaccaaaataagaacattcacaaatattttatcccaggcatgcagatcaaacaaaatattaaactgaatgcacagaccaaatcaaaagtaaattcaccagaagacgtgaacagaatgtaaatgctgtagaaaccaagaatacccaatctaaaaagacacttttctttacaccagaaaggacttaccaggaaagacaaaaagtttatcatctcaaaagggatgtatggtcctttattaaggtgaccttatccaaaccagatcccaaatgatatcaagaagcctctaccaaaaggaaggaggctcagcctgaaagaagattcaccagggcagaaaaggcaagccgtggaagtagagtgctcagagcactcaagtaagtactgcacactggttccaagaatctctgattccttcagttaatgatcttttcagatcccgcttctgacacttctgtatttcaacctaaataacaaatgcccaaaagttatttgggattagagcatcacaatgggaatacacatgccatagtaaaccatgtgcttattcagggaggtaaaggcaggcaggtttttaaaggaaaaaatgaggattacataattgttttggaaataattatccttggctacaaagatcattaacaagggtaatgccagttcaagtttgcacaggcagtttgctgggcagatgtccttgtagaagtattttttgtataaggtttaatggcctttgtgcagggttgtgttttttgtagtcttttttgttatcaggcatacaagcatgagaaccttattttcatggcctttcccagctctgtcaggattttcttcacattcatgatttaattttgattttgacaactttcatagttattccattaacttgtaattgtatgtgagaaaatactataaagaaggaattgggctggtctgagtgcagtggtcgtttacatctaattgatcacaaccagttacagatttctttgttccttccccactcccactgcttaatttgcctagcttaaaaacaaaaacaaagaaagaaagaattggttaagcaaatattcaggaataaaacttcatgtgtcatcataaaagtaactttaaaagcaaacattttaaatatacattttaacataagtttgaggggacttatctttttcaatctgacaccgatctaaatagtttttgcttcatttacttatttatgaatgaatgaacaagacaaggtcttgttctgtcgcccaggctggagtgcactgacaccatcatggctcactgcagcctcaaactcctggcctcaagccaccctcttgcctcagcctcctgagtaactggaactacaggcatgtgtcaccatgcctggttaattttttttttcattttgtatttttgcctagttaattaaaaaaaatttttttaagagacagggtcttgctatattgcccaggctagtttttacatctttaaaactgaatacttagctgggtgtggtggtgcacatgcctgtagtcctagctgttcaaaaggttaaggcaggaagattatttgagcctaggagttctgggctctagtgcactatgctgactgggtgtccacattaagttcagcatc

SEQ ID NO: 36416 - DNA, 2300 bp, Homo sapien
tcataaggaggtggcattttggggatcctgaagggtagacagggttcagatatatggatgtgaaaaatacactagagaatagacctaagtaagtgaataagcacaacaggtgtgccagtgattgacttattgcctgtcgacactaaatccactctttactccgcttgtgattctggacctagaccctgtagacatcctctttcaccagctggcataattttaggctttgtcctgatacaatgtatctgatggatggagaaatgtcctcctgaccaacaaagggattacagagaggagaccaagactggccagataaagtacaataagatcaagcagggttggtcaggcgtggtggctaacgcctgtaatcccagcactttgggaggccgaggcgggtggatcacctgagttcgggaattcaagactagcctgaccaacatggagaaaccccatctctactaaaaatacaaaattagccgagcgtggtggtgtgcgcctgtaatcccagctactcaggaggctgaggcaggagaatcgcctgaactcgggaggcagaggttgtggtgagccgagatagtgcaattacactccagcctgggcaacaagagcaaaactccgtttcaaaaaaaaaaaaagatgaagcagggtcttaaacttcaggcaggaaaggaatttgttcatgaactgaaagacgaatgagaaatctattaggggccgccgaatgcaactatgaggctttccaagccttttgccttctcgccttctcatctctgcctcctaagcctcatccttgaaagtctggaccttcctgacaggtactgatccctcgtcatgttgtccaggatattgtcactccccgaaacaccctcttccagtccttcacgccttgataaatatctatttgtccttcaaaaggctcatcgagcattattttggtgggtttcctttggttctcctccctccagcttaatagccttctcatttatattacttttattctatacatcaaattaaatcggccttatttagtagctttaatcatcttttctactagaatgaacttcttaatggctttcattctctcttgtgttgccaaggcctggcagactacctagaacaaaacatatgaactgaactgatttaggctgtactgcggatgtctctaaaaggaagaatagcactgagggtatctctagaagaaataattggtttttgtttgttcgtttttttttgttgttttgttttgttttgtttttgtttttttgagatggagcctcgctctgtcacccaggcttgactgcagtgacgcaatctcagctcacgcaacctccgcttcccgggttcaagcaattctctgcctcagtctcccaaatagctgggattacaggcgctcgccaccacacctggctaatttttgtatttctagtagagacggggtttcaccatcttggccaggctggttttgaactcccaaccttgtgatccgcccacatcggcctcccaaagtgctaggattacaggtgtgagccaccacgcccggccaagaattgtatatttttaggggatcagaacacttagaattagtgggacattattgctagggttaagatagcatttcagtatttctggtatagaggatgttggctatccactgtctattccagtaaatttcctcaccataatatctctctatctctgtctgtctgtcttctctctcttgcacacatgagagagaactattacctgccgggtaaatagtgggagaattaggacctactgtgaatcgtctgcctggggcccaacctgtaacatcacaagaagaaaaacatctgtacttccttatgaggttcttttcaatgtccattttagttcaaatgtcctcataacataaagggagggggaagttcagagacacatcatagaatattcatcacattgctggcattctgggaagaatcaggctggttaagtgactcccaggctgctcttacctatccagagcctagagcatctagattttgattggaccattgccagaactcattagcatagtgtaccctgacctggaatagggaacagcgtctgctcagaaaatgaccagagcctgctgggacttgaaccagcagtaagattttcacgacacagtgctgtctgcttctccgtaagaagttagaaggtaagaaagccagaaatcccgtggagaggcaaatgtaagggatgtggcaacgaccactctattcctacagggtttcatttgttctagttcatttttctgtagaaatgatgaaaattgaatatac

SEQ ID NO: 36417 - DNA, 2300 bp, Homo sapien
agccactgatggacattaagagctcttggggcactcgggcttctccgagttgacatcagatttttggatattagtgaaacatgtcagaggtgatattccagagaagccgtgaggataagccttaaatctttgaccctttcctcttagattatccgtgtcctctggtggtactacttctccaaactcatagaatttatggacactttcttcttcatcctgcgcaagaacaaccaccagatcacggtcctgcacgtctaccaccatgcctcgatgctgaacatctggtggtttgtgatgaactgggtcccctgcggccactgtaagtattagagacggggacttggggaacaggtgtgagcagggaggagagttgaaactaaggctttcagaaaaggtgctgtttctgtaaatgtctaggtcaggctttcagctttgtgttcaagttgcttttaatgatagtttatgtacctatgcacacaaaacccttttttagttaagtgaactttctgtgctgattgggtgagatgagggagataccactggggacatattaaggaataggtacaatattctctgacttagagggcaactttccaggttctttctggtccttctgtatggtgtggaaggtttgagacgggcaggtgaggaaaataggatcacactgttgcatgagtaccagggagcaaggctcattttgaaatacagctttagctgtcatgcattaggaagtctccacatgttctaacaaccctcatattccctgaagcatggtgatcaaggtgtcttctataacgagcaccaaaacttgatataaattttctaaggttgtacttggtttttggaaagcttgtagtccaaagtttcttataattttcagagattgccaccttcagattcagcctgggagttttagcaaatgtctcagtcaaaagtcccgtcatccaaacactgaagaatttaactgagaacctatgggtctatttatggatatttttttctctgggatagcactgcccttgattacctgagcctgctaagattcacagtgtcatggaattccagagctaggaaaaaaaaaaagctttccaaatacagatcctttgggtttgggaggaaactaagaccacagaaaggtgggtagagttggggctttctgctcttcctcccactgtcagagctcatgatggtggattaactgacctaactttctaatagaaacagcccctccctacatttgaagagtgctttaaattttcagagaactttcaggaggacagatttaatcagctccacttgggccatgagaaactgaaccagggaatggatgtgatgtgtccaaagtcaaaagccagttcctatcatagccaggagtagaaacttccctaacaccaggctgtgcacctgcaactgcacagggaaaagccagatggcttggtttggttgctgactgttggggaggaggacagagtctggaaaaagaactagtggtcctactgaacattgaaaatgatgtgataagatggctcttttatctctaaggagctagactcttgactctattattaataaaaatgtatgacctcagcactgcagtcctgggaaataattagaagatggcttcagagacctctccacaccccagcaaatgtatagaaacaaccatttttgagcatattgcccatcagctgtcttccacagccttcagagagcatatttgggcagttgtgcatgtaaagaaaaacagctgtctctgagagtgggtgggcatctgcagcaaagcctgtaggtgctgggatggcgtcgtggcttcagtgtcagatgcccctctagcagctacagctgacccctgggctcggagcctcctggtggctgcctgcccaagtggaaattgaattctcattacacatccatgcattgcttgctgttgcagtgtttgtcagctccgttggaagtcatctctctttctgattcaaaaagaatcttgtattttttttttttttaccacctgttctgtttaaaacactaatacattctccttcccaaatccctctgttcctgcagcttattttggtgccacacttaatagcttcatccacgtcctcatgtactcttactatggtttgtcgtcagtcccttccatgcgtccatacctctggtggaagaagtacatcactcaggggcagctggtgagtgacttggcctctttccccaggacttacttcctggtggatacagacctcttcctggctttagtgttatgtaatagcatctaagatgccccttctccaccctttttc

SEQ ID NO: 36418 - DNA, 2300 bp, Homo sapien
atagtatattagtaccccctcatcgtcagggagtacattctaaggcccctagaatggaagcctaaatctgcagatagtaccaaacactatattatatatagtggttttttttcctatgcatacatacctataataaagtgtactttataaattaggcaaagtaagattaacaacaataactaataattaaatcgaacaattaagtaaagtaaaagttatctgaacatgagcacttcgatcctgaggcagttgatctgataacccagaaggttacaaagtgactcaagggtgaagaagtgtctacggtgaggatacgctggacaaagagatgattcccatcccaggcaggatggagtgggactgcgggagattttatcatgctactcagaactgtgtgcaatctacaacttatgaattgtttatttctggaatttcccacctcgtattttcagaccatggttgatttcaggtaattgaaatctcagaaagcaaaactgtggattaagaggggactactgtatgttaaaatcttaattgttggattgcagaagtgaccttgtgctaaggttttgtaactattgaggggcaaaggtggctgacctggttattggcagatgggtatggggagctggtgccttcggggagctggtgccttcagggagctggtgccttcgtttccagccatgaattggtgtcagcagcctccccaatcacccttgggcaggaaagctgtcaggacagaaccctgttaactactttgaaagtgtcattgatggctcctcctatctctacgtcccatctcatctggattgacttaattgtaactactacaaccattagatgatttcgtggataaagtagtttatcttaaaattagccagtgaatacataacgcttcagtgtggcaagccaaggaagagaagtattgctaaatgattaacagcttagttaataaaatcagttctgcctttgcccttggacgttataatattgatgattattcctgtaagaagaatggccaggaaagttggaaaatctagtcagtatgcatatgaaaagttgattagctaccctctaaatgtaaatcttaaattggggaaggtagggagctatagaatcttagaagatggaggtaaatctttaactggtatctcaagatgttttattaagtgaaaataagcaagtaatatatacacacttctatatataatagtgtttttttagttttttttaactgtgatccccacagtaagaatatattttacatcacagctaagtacattatacttataaatatgatataataaaactaaagttttataaaactatattcattctcactgagagcaaagcattctgattctctactatgatcaattattatttttaatgctaagttgacatgatcatctactaatggtagatttcacccacaattgtgaaaacatccatttagcatgacctctttgtgctcaaaagaggagaaatctctggaagtatattgaagaaatgttaccattaggttccttgtgatgcgtggcttggggattgaggttgagggaagtaatgagatttttgccccttttttttaatttttaatacttgaatttttttttactgtagatatgaagtactgtaaaataataattgataaaagtaacaagcggaaaaaactgtcttgtcactgtggcattctgttccctgatatggctcttccttgtcttacctcaagtcctcagttgttgcccagacaggatctcttcctgtctgccacctctcattccagttagttccacttttttccccactgagatttcagcttcacggaaagagtttttatggaactaagaaaagaagttcagaaaactggcacttcatttataaagtgaactcacagaattgtgtctttccttttgatcttcaagttagatctagcacagaagtcacttctgtgaattaaattcttttaacctaaggaactgaacttaaccttgtctgtagcatattctttgaaaagaatttattcttttatgaaaaaatactgtataaaaaacattttgagtagagattaatcagtatctttttttttcttaataggttttcaaatggaacattttgatgcatcacttagtacctatttcaaggcattgctaggccctcgaggtaaggtggtttttggttttgcttaccttctgcagcatcactccctgcctatagtcccttgtaaatattgcatgaggagatagtagaaaatgttagcattttctatgataagtctaaaactttatcctggataacaa

SEQ ID NO: 36419 - DNA, 2300 bp, Homo sapien
gtgatgctataatggaaaccaagatacacacatcaacaaagaactgtgtaaaaacgcagcctttgggggatgggaaaaaacagcaaaacgtcatacttaatcatacaataagaaaaatcacttgatatttaatgcatagcttgacagttatataagcctgaacttaaagatattttggtcaaatgggcttaaaacattttattgataggtaagcacaattcaaacaagtgcggcgtaaaacttaagacttttggaatctcaagttaaattagaaacttttaaaacctggaaaggcaaaacttagatgggatgacagagatgaaccctggccttggactactggcagaagcgtgaagaatgaaggagatatctcaaaaaaatagtctatgccaccagcatatgcttttctcatgtcccttgatgtccatagcagcatttaccactctgcattgtagttgcttcctgactgtatcattttccaggcccaagaagtccttgaaggtttcaaattttgaatacctaacatagtatctagcaaattgaagtcattcagtgtttgtggagctcaatggcaactgacaatctcgattctttgtatatgtttaatttacttaatttgtacatggtttgtatacttgcattcctattgcaatggcccactgcctggaacacagctggcacgtgataagcattacattgtaaatatgtaaaagaataaatttgccggccaggctcggtgactcacgtctgtaatcccagcactttggcaagctgaggcgagcggattacctgaggtcaggagttcgagaccagcctggccaacatggcgaaacctcatctctactaaaaatacaaaaattagtcgggtgtggtggcgcgtgcctgtaattccagctacttgggaggctgaggcaggagaatcgcttgaacccggaaggtggaggttgcagtgagctgagatcgcgccactgcactccagcctgggcaacagagcgagactctgtctcaaaaaagaaaaaaaaagaaaaaaaagaataaatttgcctacattaaatagccgactgttaggtggatgcacatagaggagtaagaatacagcaagaggggcacacgaagaaaggctaaatctctggggtttgaatggggaaacagtaggatacaaagctaatgaaggtctttaattatccaaatatcagtgaaaaacagcaaggatcttccgtttatgccctgaaccccctttgtcttaagtgcttaaatatgcttagctgaaaagacactgattccatctttcctcatttaacaatcctttagaataatttctagagtagaaatggagttgatagtggcttccaaagaaaaatcagaatccctaagaaaaatacacggtaaatcctttgcaagggagttatggttacaacagttttgagtcgttttgttcttgttcctttatcttgttcaactgcagaccttcactccggcggtctccgtgggcatttaaccctttcagctttaacgatgaagtggatccccttcagcatgacataactcatagaggagaccgtaacgagggtgggcttctgccacccaaatgcggccacagactcctgccacgcctggcagtaaaaaaaccagagttcagggcatcgacaacttcaccggggctattgcgcaggctctgcgttccacgcaggcttattaggaagaaaggggaaaaaaatttcccagagacacgtggaaccgaggggccaaccccggcctaggctctccaccgcatcggattctggaatttacgatcacgaaagttctattgtcccgcgattggctcccgggccgcatgacatcatagcgcttgattcatccttcgggtcccgattggctggccgcgccattgtgacgtcacggtcagcccacgttctgattgtagatagccggcgccttcctcttcccatcgcgcgggtcctagccaccggtgtctccttctacatccgcctctgcgccggctgccacccgcgctccctccgccgccgccgccttgctgctgctcaaagctgctgccgccccttgggctaaaaggtaaagccgtcagctccgggaaacttcgtcgggggccgccgctcggccatgacacccgcgcgagcgcgcggccgggaagcggtcagagagaactgccgttaggtctcggacctggtgccgagaaagagctgccggggcaacccgcgctccgcccgcggcctccagctccgccggctccggggtacagcccggctcctcgggcgcggggaaaggggtgcgggtgcggg

SEQ ID NO: 36420 - DNA, 2300 bp, Homo sapien
ctctggctggagaactaatgagaacatgaccgtaccaacatgtttgagaggagttaataatctaataatcctgggatgtgactatctgacagaggattggaactctggagctgaaaagtgatggtgatggtgagggggagtaactgttcacagattcactcatctaacacgtatttattgagcccttatatgccagggattgtactaagatctacagatcaataaggagcaaaattcaacatgttttccccttcaacggagtttactacctaaagcggtggtctttaaagtggggtacatataccccaaggattgagtgagatgatgccatcagaaagcaactacaatacagggtggtgatgctataatggaaaccaagatacacacatcaacaaagaactgtgtaaaaacgcagcctttgggggatgggaaaaaacagcaaaacgtcatacttaatcatacaataagaaaaatcacttgatatttaatgcatagcttgacagttatataagcctgaacttaaagatattttggtcaaatgggcttaaaacattttattgataggtaagcacaattcaaacaagtgcggcgtaaaacttaagacttttggaatctcaagttaaattagaaacttttaaaacctggaaaggcaaaacttagatgggatgacagagatgaaccctggccttggactactggcagaagcgtgaagaatgaaggagatatctcaaaaaaatagtctatgccaccagcatatgcttttctcatgtcccttgatgtccatagcagcatttaccactctgcattgtagttgcttcctgactgtatcattttccaggcccaagaagtccttgaaggtttcaaattttgaatacctaacatagtatctagcaaattgaagtcattcagtgtttgtggagctcaatggcaactgacaatctcgattctttgtatatgtttaatttacttaatttgtacatggtttgtatacttgcattcctattgcaatggcccactgcctggaacacagctggcacgtgataagcattacattgtaaatatgtaaaagaataaatttgccggccaggctcggtgactcacgtctgtaatcccagcactttggcaagctgaggcgagcggattacctgaggtcaggagttcgagaccagcctggccaacatggcgaaacctcatctctactaaaaatacaaaaattagtcgggtgtggtggcgcgtgcctgtaattccagctacttgggaggctgaggcaggagaatcgcttgaacccggaaggtggaggttgcagtgagctgagatcgcgccactgcactccagcctgggcaacagagcgagactctgtctcaaaaaagaaaaaaaaagaaaaaaaagaataaatttgcctacattaaatagccgactgttaggtggatgcacatagaggagtaagaatacagcaagaggggcacacgaagaaaggctaaatctctggggtttgaatggggaaacagtaggatacaaagctaatgaaggtctttaattatccaaatatcagtgaaaaacagcaaggatcttccgtttatgccctgaaccccctttgtcttaagtgcttaaatatgcttagctgaaaagacactgattccatctttcctcatttaacaatcctttagaataatttctagagtagaaatggagttgatagtggcttccaaagaaaaatcagaatccctaagaaaaatacacggtaaatcctttgcaagggagttatggttacaacagttttgagtcgttttgttcttgttcctttatcttgttcaactgcagaccttcactccggcggtctccgtgggcatttaaccctttcagctttaacgatgaagtggatccccttcagcatgacataactcatagaggagaccgtaacgagggtgggcttctgccacccaaatgcggccacagactcctgccacgcctggcagtaaaaaaaccagagttcagggcatcgacaacttcaccggggctattgcgcaggctctgcgttccacgcaggcttattaggaagaaaggggaaaaaaatttcccagagacacgtggaaccgaggggccaaccccggcctaggctctccaccgcatcggattctggaatttacgatcacgaaagttctattgtcccgcgattggctcccgggccgcatgacatcatagcgcttgattcatccttcgggtcccgattggctggccgcgccattgtgacgtcacggtcagcccacgttctgattgtagatagccggcgccttcctctt

SEQ ID NO: 36421 - DNA, 2300 bp, Homo sapien
cattttatagaatattgagaatgaaaaggggcttgctttagggattatctagcttatctcagcctctgcttaccaggaaagcacaatagtgaggaatatatgtttcccagccaaggttgcccaccaaggcctcttcacttacagtagtcctttcccattcccttctgttatggactgaatgtctcccccagatccctgtgttgaagcctaacccctagtatgagggtatttggagttggggccattgggaggtaattaggtcatagggtggaaccctcatgaatgggattagtgtccttagataaggagagatacaagagaaatgatctctccaacacatgggacgcagcaagacaaccatctgcaaaccatgaagagcgctcaccaggagctgaatccgccagtgccttgctcttgcacttccagcctccctaacagtaacaaatgtcagttgtgtaagtcactcagtctgtggtagttatagcagcctgaactgaaacatcttcttacacttccataagtatcacttggcatgtacttccagaattgtttataggaaatgttaaatatttatacgaaagcataatggagagaagacagcagctgatagaactcagtggcttatcttcagggaaagcaggggaggcttaacccaaacaaaaagctcattagcagggcctctgaaaatcatgcaactgagcagcttatttacagttctgagaaggaccccctcatctagccaagctctgaaaggccctggcaccacaggtccccctccccctggcctctttcccccatgtcaagcactacaatggcttgaaggacacttatttccacattttctcttcacgagacttcaggtccccaagaaaccttccaactcctcagaatatggcctaacccacaacacatcctggatttctacgtctcctaatttttgttttgggtggtgatttggaaggagacatccaaggcaatggattttccctcaatttctgaactgaaggctcacagacagcctcagagatgagctgagcagcagaggcatcctgggaccaggaggaaacctcttattcacacaggggactagatgagcagaaaactagtctttaggttagcagcaggttaagtaacaatcagttgtatcccaagttaggatctgaaggtctgggcttggccacaggtatttctaccaaggagaaagcactttttgcttgttttaagatttacagttctgttcctaaaatcccaaattcttagctgtgttcagatggtaaagctcatgagagctgtgaggcttacattctctgtcctggagaaagaagaccactatctggtctttaataagagaaaatgtagacatatcacattagacttaaaagcaagtgttatttgagacttgatattgatgtgtccataactcaggtagagaaagtccttattattcatggggccagcaaatccacagcatcagcatcacctgggagcttgttaagaaatgtgggccccaccccagacttaccaagccagaatgacaccccaaagagatttgtatgtagactacagtttgataagcactgccctaggaacattcaaataaagaaattagagctctgagaaaagtgtgtttctcagatgaacattatttcacgaactctgtgtgtgtgtgggtgaatactgatccaaagacaggagtcgaaaacagctctctgcaggacttgctgactcacagtctaagtatctcctgcttagaaaagtatctcctgcttagactgcagtgtgcacagcacccaggttactcaacattcattcaccatgtacccactgacccagcacaacagcagttgggagtaaaaaagaaaaaaaaaatcttccagtggcacagcagtcaattcagtcacacttcaagttctttctccccaccggggttgatagctactaggggagatacggcatctgtttgtcttcatcactatgcttctttctagaaacatctgaggtcgcaatgatgaaaaaataatttcatggtatttgggttaattacaaaaaccaaactcttctactatttgtttagctgtggaactcacacacactcaaaggtttctgaatgaaagctaattccattcttttatttcctcataccacaaacatttcaatttatctgcctttttacaacctgatttacacaagcaaattgcaaacgaaaaccaggcattctttaatcatccaaaatgcatgtataaaatatagaacaaaccctagtatttaaacataaacagggttagctgaagcagctttat

SEQ ID NO: 36422 - DNA, 2300 bp, Homo sapien
tggatcaagttagggctaaaagtatgccagaagtcttatctagtgtcttggtttgtttgggctgctgtaacaaaaataccttacagtgggtggcttataaacaacaggaatgtattgctcacagttctggaggctgggaagttcacgatcaagtcaccggcagtttcggtgtgtggtgagagcttttgctctctggttcatacatggtgccttcttgctgtgttcttacatggtggaaggagctaactagctcttcagatgtctcttcgtaataccagttatgagggtagggccttcatgacctcccaaaggaggtcctcccaattgcctcccaaaggccctactttctaatactgtcacaatgggcattaggcgtcagtgtatgaatttaagggaacacagacattcagaccatagcaccttgtaaggggatatggaaggagatgaatggtagatactcattagtgcttgacacttagagagttataatttcaaaactacctctttaaggaaaactattaatagtatagaaacaggatttattacttttaaacttgctggcgaaagggtggcaaaatgaaccacaaatacatttcagtgccacaaaattgggtgtggggccaggggagtgatgaaacaatagcccatagaacataaagtggtgaaaataaaatgaaaacaaatttgaatagactaaactctatcctattaaacagctgaaacagataatataaaatagcaacacagtttgcataagatgtacgtagaacaaggacagatgccgacaagagctgcatagtgaccttttggaatgatagcaggaatggcaaagcaatatcaggcaaaatgtgaggtagaaattattaaatgggatagagaaagcagttttatatattcttccaagatgatgtgaaagctgtggtcctttttgtaccatgaaatgtaacatgaaaagagtttagtgtgatgggtaatacatggctttgatgtgagaactaaatgcataaatccctggtactatttactaggcttttaacctggacaagtgacttattctcagtgcctcagtttcccacatgtatcccagaggggaataagtaggctgttgtaagcccgtgtggggattaatggaggtaaaccacttaacagagtaccttgcatgttactcagtaactgacaggccatataatcaaaggatgggaaaggccatgggggaattaaaggcatggttaataagcttggttgtatgcgtatattacgtatctcataccacatcttttttcaaatgccatgagtaagatttacaaaaattaaagaaaatcttcacttctcaaaagtagacataatacagcatgcgttcccgctaaaattcaacgaaagagatactctggagaaatttaacattggaaattaaaaatgtctttccaagtagattttagattaaccaaaactagaattacagattgtgtaggaaagtgaaagacatgctggcagagctgatgtctaaggaaaaattatagctttaaatgtcttaacaaaaagattttaaatctaagtcattgagtatctaaagagcaaagtaaaatatactttgaaaggaagtcatcaaagcacaaattataagtggtcgttatgaacttttttcaagactaaggaaaaaagaaacaaatattaataatgaaagcagatgttcacagccatggtggaatgtatactatttatttgagtatgctcctagagtatctagattcttcagaaggtcctgtgtgtctcttaaaaaatgaaaccataacaatcgcactccctgcataatgaatatgggaggagacttggtaatcaagagagcttatgtaccatctgtcccatgtcagcctggccctctaactggtcactgttgtatatattgaggtcccacataagatttcattatagaaaataagggattactactaaaacgttttttaaattctgctttgagagtcttaaaaagtcattggagatacagagaattcacaaataaaacagttttcggtttcatgagtgagtctacatgtccggaggcaccagatgggtaaaacagcagtgatcttctgcccttgggagggctgtaaccttattccagatatgacaacctatgaactgtctttgcctttcctcactaaagtggggaggcaaaaccccaatggcgaggcagcaggggaagagcactcaacttagaagaaccgggttataggccgggcgcggtggctcacgcctgtaatcccagcactttgggagtctgaagcgggcagatcacttga

SEQ ID NO: 36423 - DNA, 2300 bp, Homo sapien
caaaatttccaaaatgctatatcgctatgtaatcaatataaaacttttaatgagatatttacatctttttattctactgtcttagaatctggtgtgtgacttacactcacaacacatctgggccactaagttttcattggaaatacttgatctgtaattacatttcataaaatttacagtcaaaaatggattcacatttccaacttgtttcaaatttacttaaaagttttccagtaactgaatggaatatcagtttttaaatttacatttaaattgattaaattaaaatgaaaatttggtttctcggtcatgttagccacatttcaaatgtacattggccaatgtggctgatggctgtcgtgttgaacaatgcaggtctatgagaatgtcagatgacattatgagaataacccaatgatccttggatgtcttacctacatgggaaacactgtttctccccctctcccactacctgcttttcacggagaagctaacatttattaagcacacactctataccaagcacttttctagaattaaaggtacaaaaggcataagtcatctgtgccccagaggaattcactatttagtgtggagctatctttaaaatgactctatcattaatgtacgaatgcaaccaaaacacagagaggaataactgtgactcaagagatgaacatgagtgtgtcagatggagaatttcaagcaggaaaaacaacagagtgccagaaccatatacagatctggtgaggttggtgggagggcaaaggaggttgttgaaaaggctgtggaaaaattagaatgtggtttgatttctatcccacctgtgtgatgaggatggaaacatcttctcctgagcttcaaacatccctaccacacacagacacacacacacagacacacagacacacacacacaccattgtggaaatcccagccagaccttgggtattcatgcccccaagccctgtgaggggcacatccaatatgaaggctgtgggagaagagaatcctgctatcatgtactcactcatttagcaattaataagtgcttactaaatgttaactctgtagtgcgagggaagagggtatgataaatacacactttctgggtaggtacatgtatgatctagttgccttcacttttcccctgacaggtcattgctctgtcaacacatatttattaaacaatcacttgggggcacggtacctccttcctctcctttccctccgagataaggccaactctaggtgttcccactatcttcaaccccaccccacggtaggctcacaagaacgtcattttgatcacttaagggatgaattttaggtttagatggaggataaacttttggagatggttcctcatatggtctgtctggagactttttgcaataaatggtgtccgtgccatccagagaacataggtcaccagttaatcaagacagtagggaataatgatttacacatgttgacaaattgattcctcttaataaccaggtcaattttttggccaacactatacacatgtacactatgcacataattacgacatctataaaagatagaattaatctaattttatgcagatatgggaagaactcgtcccaagtctcacagtcagtaagtgatggagcctagagttgaactgtttcacttcactaccatgttaatacttttctcaacacattctgccgctctcactctaagtgtgaggccctgtccaactaaaacataatatggtgagttcgtcattgattcaaataatcaactttcttcccgaatcccaagtttatctcttctgattaggaaaaaaaatgcattttgatatgtcgcgtttgcgtaaagcgaggccgaccgcacgcccccttctcgcgagctgctcccctcaactgcgacccaatcacccttgcacacgcctcctgagcccccgcggttcccaccgggcttcaggccacgcctccgccgctgcaccgcctcctctccccgccttcgcccgtagtctataaaacctggagcgcaggatcgcgcccaggagcggcgagctagcggacgcaaagactgggcatgctccgcggcggcgcaggttttggtcacaagtaggaagaagccagtgcaccagaccggcaaagagaagcgggagccgccgcggcagcgcggccgtggggtccgccgccgccgcatcggagcgggaggaggagcagcggggagggcgaggccgccgggccgagagccgtcccgcctgctctcggtcttctgccttcgcctccgcgcggtgcgtcggacccagggtctgtcacc

SEQ ID NO: 36424 - DNA, 2300 bp, Homo sapien
ataggtaacaaaacccataagaaaatgtcctcctctaactttgtaagccccacattctacatctgaaccaggtaggaaaaggagacccagaggagcaataagttagcaacagacaacagtgccctgaaagcaggaaatggcagtgtctggacaaattgtcacggtcatattaagcaagttaagtatttactcagctggcaggagtattacatttttaattgttacccactttaaccaatatttagctagtgtcctctgcatatggaggaccatattaagcattttggaaaaaacccaaatgcaagaaaggatctcggggagcaatatacactcatgaaaaaaataaccttaagcatattcaccaagaagtatacatgtgttgataaattagtattataccaaaaaattaaaaacccccactgttcacacaaaccctgagaagccattacagtagggaaagtttaagaagctatgcttctccttgatggtgtaaggttttaaatgggtttagaaaactaaggggctatgtggagttaagagtgccatgaatggggtaaagatgcagagtgggaggaaacaaacgtatgtggacttagaagggaggaaattcataggctcaccttggaaggctgaaggaggctgacaccatgttggatgatcaaaaatcagcattaactcattcaccagatgggttggaataatgcagatgaactcagggtcacaggtgtcaggatggggagactgtctcaaagcaggggaggctttaggcttgggagttttgttttactttttgacaatgttaacgcaactaagtaactatgaaagagaagtatgaaaacagcccactggctcaaggtcagaaggaaagcgtgggaggctttagagaaagtgatgtgttcacaggtggtgaagctgaagtcaggtggcagcaagttcaggtggaagtggatgatgaggaaatggaggtggaaaggtagatttccccccactctatacatttttttcatggatagatgtagaaaatgaaattataattagacactgaagtgaggtcaaggaaggagtattttttaagtaaggagacaacactacagactggccacaaattccctgagactgtgtctaaccagagctgtagatattaatataaaatcagctctcggctgggtacagtggctcttgcttataattctaacattttgggaggctgaggtgggcagattgcttgagcccagaagctctagaccagccttggcaacatagtgaaacctcatctctacaaaaaatacaaaaaatagctgggtgtggtggcaggtgcctgtagtcccggctactcaggaggcttcggtgggaggatcacctgagcccaggaggtcgaggctgcagtgagccatgatcatgccactgcactccaacctgggtggcagaatgtctcaaaacaaacaaacaaacaaacaaacaaaaaatcaacttttaaggagtgcttctatgacttctgtcattaggaaaatgttcagaagtaataggaagtatgagaaacatgaacatttgtgcagaaaaggaggaatcatagaaataaaacttcagactgttgtgcaaacgggcacattgcatatgcttaaagttaaaagggaggaaccaggggaatgtgatcagattaaaatagcaaagcaattaaaaattttacatacaaagcttaaaggcaaacttaagagattgtagtaaccacagcaggcataatcagcactcagtaggtgtttactctgtgtaggatgatgttactgtagaagcaaaggccctactgacagatccaaagcacaggtggagacagtgactttttcatcacagctcagagttttgataaagaatagagatggatttatttactaactcaataaaacactgctaaacactaggggtacagagatgaatttaatatggctcctcccctcaaggagctcctgatccaatagaacaagcagacactagagtccaatgagacactagctaccaagagcaagggcaagaaacattagatgtagggctccaccctgatatagtttggatctgtgttcctgtccaaattttgtgttgaattgtaatatccggtgttggaggtggagcctggtgggaggtgattggatcatgcgggcagatttctcatgaatggtttagcagcatcccctttgtcctgcccttggaacaatgagttatctgtcagatctggtagttaaagagtgtgtggcacctccccctcgctctcttcctcctgctactgccatgtgagatacctgccccta

SEQ ID NO: 36425 - DNA, 2300 bp, Homo sapien
cactgccaagtttttgcacaacctaatttatcaagctttgatagatgaaaaatcctctagtttcagtatctcttctcattattccatcatgtaatgttgcaattgattgattctcatttcatttcaagccctaggtcctcctcttcatacaatacttctaagatgtcaatgggaacacatctattggtgtgcatcaaggaattacatctattcactcacttatgatctgtaacccacaataaaacacccttttctccaaaaattaaccatatactataggcttctcagttgtatgagtgtgtgcgtatacacacatatacatacaccaaggtaatataccatatccacatataccaaggtaaaagattctttgtgtgggataaggaaacagcccagcgcttttacattaataatatcttgttcttaatttacagcgtttgtagcccttacctgagtgttatcattaaatatccagagattgaacttttcatcggggtaatgatataaaattgttccacaaagtgtactatatgaaccacttttcacagttcaaataacatattttagaaataaatatcataactagcaataacctatctacacaaggtggagaggatgagattaacaaaaaccaaattatatttccatatatctcatgttcaattcctaaatagcttgttttatttttcaaaatccaattgcacataacccataattgataggccacttcctctccaaaacaaataaactgtcaaagaataaagtgataaattataaaaaaggaaaatatgtatcatttactacagtcattccctttccccaaaacttggcaaacatataggaaaagtgctatcaagtgggtacactttgattataaatccaaagctcatttggagcagatgagattaataaaaataggacagaatgagtatatatttttatatacgtgagatgagtgcttgatttttacttaagaaatcaggaggatccatattaaatgggaaacaatggcatttatcaacaggagaacccattcatccagttactaccaaatctacaaattccaaatgtttctatcattcttatcatataaaagattggggcaaataaaattattgttattggttgtgtaaacttcaagctctctaagcttaaggctaatggtccttagggacatagttttatttggtgatcttcgcggggtgtacattagggccaaggttgcctttaaccaggttggtgtagtttttagggtgagggtaaggctcccagggtatgtgaaattcttctttaatagaggacaagggataaaatgcaaatccttctagttgaaacaaccaaatgacttaaatttatgctataaattaaatgattcatatcaattacttcattgagagcatgattttatggtagaaaataaactggggcctgaggcatggaggaagaggaatgtccgctaacacaaaggttatcaaatttagggtccctgggtggaatccctattccttttcggtcagatcttgttttaagctttattacgttgtcatgggatatctttcaaaatcctttactcaatcacatatggggggaaaattgcgttgaaatacagaattaaatcttaagtctttatggagatcgacaatttccatttttaaataaataaaatctatatgaatatcttcaacttcctaaagaaaaaagagagagaggaaaataaacttttgaacatgaaatcacttacataaacctcaagtgtactaacgtgtagaggaaaaaatctcaaatgtgggtgtaaccgctatacatttaggaaacatgccgccttgggagagtgcctataacgaattccgtctgccacccagtggccgctgaaataaattgtttcttttgttggccattgccctgtattttgctaaaaaaaaaaaaaaaaaaaagaggtagattatgccataccaggaatttaaagccatcaggacatgtgcctcgacatattttacaatacaatcagtgtagtaaatgttaaatattttccttttcgcgaactcagaggttaaccacgtggctctacgaataaataacgtgttcttcctgcgtccctgcatctacctgggctcagatactgactggcacagaagataccgaactggcccgggattcccgagtcacgttgttgggcatcgagagggtgcagcaggacacgccgacagtggcctcgggtagctcgtcgtcctccgtccactcgttgagctcggggctgaagcactggatgcacttcttgtacttcttctcgccctcgttcc

SEQ ID NO: 36426 - DNA, 2300 bp, Homo sapien
ttggagctggcttgcactggctcacaagagctgattgatgaattttcagaaatttggtaaactaattgttaagcagttgatagcttgaaatcagtcatgatgagagtatttgcaccaaagaaatcatcagattaggctgggcaaggtggctcatgcctgtaatcctagcactttgggaggccaagacaggtggattgcttgagcccaggagtttgagaccagcctgggcaacatggtgaaacccattcttttcaaaaaatacaaaaaaggtagacaggcatagatagtgtcatgcacctgtagccccagctattcaggaggctgaggtgggaggactgcttgagtcctggaagtcaaggctgcagtgaaccaaaatcacaccactacactctagcctgggtgatagaatgagacccgatctcaaaaaaaaaaaaaaaaaaagttaaaaatacttgttttcccagtctgttgcttgccttttaaggagtcagttttgtttcatggcttttatttttctatattctgatatttcagtcttttcttttatagcttctggattttgtgtcagctgagaagggccttccctaacctaagttataaaaacaaaaacaaaaacaagatccctagcttgttctggtcttatataagtttgtgtatgtgtgtatgttacttagatatttaattcatctggaagttattttagtgaatatatagagtagcaaatcagttgacctaatgctgccattacaagttctttctcattgatttttaagtgccacatttatcttaatatatatacttacacacacatacactatataaatatataaatatgcacacacatatatactgtatatatctacacacacatacacacatatacatatatgggtttctaccctttattttgttcttctgaatttataggtttctacctcttatcttattccactgaatttctttttattcctgatccaaaatttttagttcctctaattttttgcatctggtaagaattcctttatttttaaacaaaattcctagatgttcttttatactcactccctcagttaaactctgaaatcattttattaagttccaaaaagaaaaaatatcttatagaggtagcaactaaaatttcactgaaatgacatccatctcttcatacaggaatgtagagtccctgtctgttaaatcctctggcaaaatcctatagtacttatatgtgtctcactaaattagagtcaagtatatatatctcttaaaatataacaggtttcattgctactgcaaataaaataatctttccataatattttctacatttcacatgtattcctgaattttagtattttactgaggaaaatcttcagagtgtttataattcactttttcatgacagtaaactaagccctttaaatgatatttaactactattctactatatagctcaatcagaaaatgttggttgggtatagtggctcacatctgtaatcccaacactttgggaggctgaggtgggcagatcacttgaggccaggagttcgagaccagtctggccaacatggtaaaaacccatctctaccaaaaatacaaaaattacctgggcatggtggtgcacacctgtagtcccagctacttgggaggctgaggcagaagaatagcttgaacccgggaggcagaggttgcagtgagctgagatcatgccactgcactccagcctgagcgacagatagaggctctgtctcaaaaaaaaaaaaaaagaaaaaaagaaaaaagaaagaaagaaaatgtggtcactttttctatataattacttggcaatacagttatggagagatttcatttgataacataaatcttcctagaattgtcttcaatgcttcatgctgaagtaaactgtctgtaaaatgtacatctagtttaatatgtctttaaatctattttaaaaattaatctattttatgccatgaaaactattatcttttgaaaaagtttctcaatgtagtatttcaaagtctaaagcacaattaaaacaaaaccatgtttttttttttctctttttagcaagctcttgcctgtaacagtgtatttgccaacatggcacccaaaaagaagattgtcaaaaagaacaaaggagatatcaatgagatgactataatcgtagaagatagccccctaaacaaactgaatgctttgaatgggctcctagagggaggcaatggccttagctgcatttcttctgaactaacagatgcttcttatggccccaacctcttggaaggtttaagtaaaatgcg

SEQ ID NO: 36427 - DNA, 2300 bp, Homo sapien
taattaatatttattgattaaagtaatgtgtgtctgatactgtactaagcattttacatatgtcatttcatttaatccagataacaatcccatgaatcatcctcatttgagatatgataaaactgaggcttatacaagttaagtaaactgtcaatttctacgaagctagtggcataacaagagttcaaacacagatctctttagctcaaaggctgtgaaaacatggttcacagtacaaatgaataaaagaattacattattctaagaataaagtgatttaggtggtctttttaaactttgtttaaattgagtcaaactcatttgtatgtggcggaagaaactagatgttttatcaggcgggaaaccctaaaattcttcaggtgagtaaaaagttaattgcttccctattctgtagttgacaaggtgttgtttcattttttctctcttactacgctgtttcaaattcttggcagattattggaaacaaggaaagtcaagaattctcccagtgactacccatagaattaaatcaacaaaaactgttgatcattgactgtgcatatggcactgtggcagcttcccagatctacaaagcaagtgagacagtatctgttgtttaagaggtcataatctctttcggattaaggtgatacaaaaataataacacagagaagctgaagcatcatggagaggcacacaaggaatgcttattgaggtctgaatttttaaaagactggacacgtctttaaaatacatttggtgttcgttaaaataatctagtgtgataacctctggaaatcacattattttaaatggagggaactagccttctttaattttttttttaaaaagcagttggaaaacttgaagacagggacttacttacctttccacatgtctctgtcaggaaccagttttctaggaagggtggcagaaatgagcttcatatgtttctggaatgcaagaatgtagaaaggggggtggaggttcaaagtccaggtagccctctgtgagaacgcaggaatcaaatcaggacaaacaaaagaagggtgaagtgggtagggcaacggagtttcgggattgactggaatgagagttaaggtgataatgctggggtggaaatgaaagtcagacccctccttacggactgggaagaaaggagccctcctagtaaagttgaaaagaccaagtgtcctcttctccatttcaccggggaaacgctcctgtgcctagtcgtaaggtacaggagagtctatggagcccatggagagtctaatgcaaaaactagtttccgaccaaactttgccttggccactgagcatgctcagctttgtcttctatagaaaagtgaactccgtggctccagattttagctatagcagctggagggcgggagtgagtgtgggagagccagcgtggcagcggccgcaggtggaaacctggagtttgagtatgcttgaaagggaaagtgtggaacgaaggggcggccgggtggggaatcagagaagcccccaaggaaatgattcatcattgtgattgaccttgactttagcaacccttcattaaaggagaaaatttggttattcggagatggggactgtgttgcaaacagttacaggcaaagaggggcagttcaggattccggccgtggtccgcaggaatgagtcggggcgagggaatggttgttataacccaatagtgagcctccccggtcatccgggctggacgggactggggttgtagcagaaaagcaggagctgtatggaggatgctcacctggcagcctcgatctgcccctcttccctcgctcctccctccgcaccagccacagctagttgtcaggggccaacatctgggccgggctggaactggctcagaaactcgcgtttgcctgcttatttctgcagctgggctccttgccaggtgcaaccacatctatgagaatctcgcagactctcagactcctatgcctttgctggtacagggaggaggatttactatcactcactgcataaaccatgatcaccagagatgtgctcccaagttacaaagcctgcaggcggtgcccgaggaccagagggccgggcgcggccagctcacacttctggggcagccgtgagcagcgggcacacgggcagccacgaaagcagcagcgagggtggtgcaaacacctcaaaactacaccgaatccagtagcgcctggcgcccccggcgcgcaaggtacgctttggggcggtcctgtgtgaccccggaagagaaagttgttttggggaaggggagcaaggagaggagtgcgagtt

SEQ ID NO: 36428 - DNA, 2300 bp, Homo sapien
tgtgataacctctggaaatcacattattttaaatggagggaactagccttctttaattttttttttaaaaagcagttggaaaacttgaagacagggacttacttacctttccacatgtctctgtcaggaaccagttttctaggaagggtggcagaaatgagcttcatatgtttctggaatgcaagaatgtagaaaggggggtggaggttcaaagtccaggtagccctctgtgagaacgcaggaatcaaatcaggacaaacaaaagaagggtgaagtgggtagggcaacggagtttcgggattgactggaatgagagttaaggtgataatgctggggtggaaatgaaagtcagacccctccttacggactgggaagaaaggagccctcctagtaaagttgaaaagaccaagtgtcctcttctccatttcaccggggaaacgctcctgtgcctagtcgtaaggtacaggagagtctatggagcccatggagagtctaatgcaaaaactagtttccgaccaaactttgccttggccactgagcatgctcagctttgtcttctatagaaaagtgaactccgtggctccagattttagctatagcagctggagggcgggagtgagtgtgggagagccagcgtggcagcggccgcaggtggaaacctggagtttgagtatgcttgaaagggaaagtgtggaacgaaggggcggccgggtggggaatcagagaagcccccaaggaaatgattcatcattgtgattgaccttgactttagcaacccttcattaaaggagaaaatttggttattcggagatggggactgtgttgcaaacagttacaggcaaagaggggcagttcaggattccggccgtggtccgcaggaatgagtcggggcgagggaatggttgttataacccaatagtgagcctccccggtcatccgggctggacgggactggggttgtagcagaaaagcaggagctgtatggaggatgctcacctggcagcctcgatctgcccctcttccctcgctcctccctccgcaccagccacagctagttgtcaggggccaacatctgggccgggctggaactggctcagaaactcgcgtttgcctgcttatttctgcagctgggctccttgccaggtgcaaccacatctatgagaatctcgcagactctcagactcctatgcctttgctggtacagggaggaggatttactatcactcactgcataaaccatgatcaccagagatgtgctcccaagttacaaagcctgcaggcggtgcccgaggaccagagggccgggcgcggccagctcacacttctggggcagccgtgagcagcgggcacacgggcagccacgaaagcagcagcgagggtggtgcaaacacctcaaaactacaccgaatccagtagcgcctggcgcccccggcgcgcaaggtacgctttggggcggtcctgtgtgaccccggaagagaaagttgttttggggaaggggagcaaggagaggagtgcgagttaaataaaactaaatatcaaagttgttctgctctgctcaggccgcctctactccgcctcatctttgtcccaagtcctttcacagtctgccttcctcaaacggcccgatgcgcccccgtctttgccggagtaagcagaccgccagcagccggcccgcaggtcagtcgaccctctctggatgcaggtcgccgggaaaacccggagcggagcatccctcgggccgggaaacgccctcggcgcgcacccactggcgcgcatgctcagtccgcgcggcggctgcgagtaggaagctccgcgcggcggcgggggcggcgacggcgactggcgggtgggagtggaggcaccggctggcgggcgggggtacagggacggggcaggggctcccgctccaggttccttgaagcacttccgaccgcgaagcccggcgcgagaagcgagctaacccaagagccaacaacgagcgcggagagggcagcggactgagcggagccgccggccagagcgggctcggagcccgggtctccgccgctcgggacccggctaggcggcggcgggggcggcgatgttccactgcatccccctgtggcggtgcaaccgtcatgtggagagcatcgacaagcgccactgctcgctggtctacgtccccgaggagatctaccgctatgcccggagcctggaggagctgctgctggacgccaaccagctccgcgagctgcccgaggtaagggtccggcctcacctgagcgctctgcccgctcgtctgctgtcccttccgctcccat

SEQ ID NO: 36429 - DNA, 2300 bp, Homo sapien
gagtacttactatgcgccctacactgacctagctgaacacagcctcagctttccagaacaccaccatgaggtaggtgacgcgatttcctttgtgcaaagcagataattaagactcaaatagttttaggaatgtgcccacgatcaaacagtaagggacaaagtcagaattcaaattcacatctccgttgacatttcaatcacccctttattttactttgctccccttccccagccaaagcactgtaacctgtaattacatttagagttgtatttgtcataatggtgatggttctgtttttgtcaaaattacataggctataagttatagactaagactggcatggaactgagtgaaatttaatgaaattgatgcagaattgggccttcatttaagcctagtgattgcaaacactgtgattctgcattctctaacccaggggtccccaacctgtaccccagggccaggtaccagttcttggcctgttcggaaatgggccacacagcaggaggtgagcagtgggcaagcaagcattaccgcctgagctcctcctcctggcagatcagcggcagcattagattttcataggagtgcaaaccctattgtgaactgcacatgcgagggatctaggttgcacgcttattatgagaatctaatgcctgatgatctgtcactgtctcccatcacccccagatgaggccatcaagttgcaggaaaacaagctcagggttcccactgattctacattatgatgacttgtataattgttttattacatattataatgtaataacaatagaaataaagtgcatgataagtgtaatgcacttaaatcatcctgaagccaccctccctcactggtccatggaaaaatcattttccatgaaactggtccctggtgccaaaaagatttggaacagctgctctaaccctcccaccaccttcactcacttcttgtatgttgtcctgggctaagggctgtggaaatgttcatggggtctttgttctaccatctcaaactatgtgcaaatcctaagaaacttgtgagataaagtatttggctagtgggaaaaaaaaaattgataacgtttttaacattaactggagtgacagtttggtaattggctctctgagaaagcttcagcatattctgaaaattggcaggtagctccagagtgagctaattagttaggaatgacttttaatactcactacctttaatagcctacccttggagaaaagacagataatgaacactgggaaatctatggtgctgcaacttgacctttgtgccatttgggggaaatgaggaagatgagtcataatttattatttaaagtcctccttttataatgtgttgttgtgaaagatttgacaaataatgattgctcctttagggactaatttaatcaaagaagcagaaaacaggaagaatagaaaacttgtgtgactaagcaatgtttaattttatttgaaactggctccaccaccctggtgataggaacagaaggtcctatggagtcttcccatagcaagaaaccaggcttgtaacagggtgtaatagagtgacaccccacacctgatgccctgtaaatgcagagtctgcaaatgcctctcttttgatgctttctcaaggtaagtcataaatgaagtcttactgctttaaaaaagtagcttgccaacagttgcccaggctccccatgggactgcgcttcactgagcacctgaagaaagtattcactggaaatgggctctcctgggagactgtctggatcccgagtgtctggcgttcatgttcccacacctggctgctgcttcttgcccttccttggctgcaggtgtgagtgcttgtttgtttaaacctcgctcagcactgcttggaaaaacaaaacaacatggttacttgtctgggcattgaatgttcttcctgaattttggtcctgcccattggcccagaggcggaatgggtggggcaagtttcggtgtgagtttgggaagtttcgagaagacgctatgggctgggtctgttaggttggggttgctcttggttttaatccttttggaatgtcttgagggtcaggagcgttgccattgatggctatgggagttgtcaggctgtggctctctttctcacagagaatgccagaggcactcgggaaggcatttgccagggctctgacagatgtaaagtaagccttatccatgttgtgttctcacctggacacctggaaggtgctcagtatagaaaagtcacgagctagatgagataccagcttgatgtcgactccctccccaacaatgg

SEQ ID NO: 36430 - DNA, 2300 bp, Homo sapien
gccatcttctcagtgagtcttcacagggccttccctctgtgagtgcctgtgttctaatttcttcttagaaggaaccactcataatggattagggcccatcctaatgccttcatttaaccttaattacctctttcaagaacattctttacatacagtcacattctagggtattgggggatgagaacttcaacatatgaattttggaggcacaaatttagcccataacaatggggaagataataatatctaccctctagagtgattttaaaagggaattgaaataacatttggaaagccttaaagcggtacctagcgcacggtgagtatgccaaggaactgtgctatatgagggttattatcctgctactatccagtcgcacctcggttgtgagtttgttgagggccaaaatccagggattgtatttgtaaattgtattattattttcaattattttatttaaaaaaaactacctgcccctaggataatctttatctattacaggcactcagcacatgtttgtgtaactaaaacttttcatgcctaccacatctcttccaaatcactaccatattctcatctgccaaccaactctgcatcacacacaccattccttttcctcctaaccggatcctggattcagtcttcaggcattaaactcgcatgctgagcacgaattgagtttccttttgcagccacagcatgattcttttttttttttttctagagaggtttaggaagttcgttcacttaagattttaacaattgccttacttttgacacataccgatcttgcatgttaatcaatctttaagacttttgttttccaacttgttagaacaataaccagcataaataatttcctttctggaatttacatttgagtgaaaagaggaagccccttttgcccatgaatctaatatggtgtttctgaatttatcatcctgaaggataggtttattgcctactcagtgtttcacttctggagtcttcaaaccttccatcatgatgcagaataaattctggagcaaccctgcctgacaacagaggattgactgcaatcgtttgaaaggacagagctccacaacacattttctgaaatgttttcttatgaaggaaaagctgatagggaatttgagttaaagtagacaaaacagaacaaaacaaaaccaaaaccaaaaaacaggtgttaaaaggatgttttaaacaggctgaagtattaaatcaccatagagagcagtcttagtttactctgaaatccgtttctattcttctattaccttccacatattttgttttgctgcaaaacacagggagaactatttaccattaagttgcccaattaattttctttaaggcatgtaacattttctaaagaaatctgaaagtacttgttccactgaaaaaaatgagatttatcttctatatcataactttgctcccagtgaaaaagccaggataatgaagaacaaaatccatttttgtgaaggaaaacacttttatttcatggtatttttaaacatcattttgtcaactctccatggaataaagttgacaacaccccttgaatatatatttgcatgtctttatagttttaatttgttatacttttgctcttcctctttaagcaacattttgaaaaatctacaaagtaatacaaacatatctacagtactaggttgcaaattggaatttggaagcgctagatctgctgattttatttgctatctgactatcacatttgttctttttaactgatttattaggtctgtattctagagtatattttattctgttgcaacagctattaatgaattctttgatcgtggatttttgtcacatacatctgtattggttcagggagcctaacctgttggaacattctgctgaagagtttgcttttatatctagggacatttatcattatctaaggccagctgcctgacttctcttcagtgctctgtttatagggtttgaacatctataaatggaaacactagctaaccagaaattatcgctagggctctctgatagtgtcctaggctctcacaacttggaatgtcctgcaatatctaacatgtaagcacgtcgaatcattttctagacagaatctgaacctctgtgtctctcagtctttctctctttctcattctctttcaatatggaacttgaaaagcgtgaaaaaagaagcttattaaacaagaatttagaggagaaactgacggtaagacatgagatttagcacacacagatttataatgaaattgacagggtagtagagcaactgtcatagactggaaaa

SEQ ID NO: 36431 - DNA, 2300 bp, Homo sapien
gtttatgtcgcccaggctggagtgcaatggcgcgatctccgctcactgcaacctccgcctcccaggttcaagcgattctcctgcctcagcctcccgaagtagctgggattacaggcgcccgccaccatgcccagctaaattttttttgtatttttagttgagatacggtttcaccatgttggccgggctggtcttaaactcctgacctcaggtgatccacccgccccggcctcccaaagtgctgggattacagacgtgaggcaccgcgcccggccagggtccatatgtttttatgagaaaatgttaagacactgacctcgccccagcagacttttggatacccatgattactcaccttcattttattaattttactttcattgttctttatctttaagtaggactgtttgttcttttacctgtgcttctgtcacatttttcagcttatttgtttttaaaaatatttcagacatatgaccaagacaaataatgaattttcaatattaattgaaacttcttgtgtagctctccctgtctcattctccccaactttgcctagtgtttactatgctagatttagtgtttctaattctcattataactatatataaatttatatatagttgcttctgcatttcttgaaacattactcatatgataacatggtagttattcttttgtaatttgattatttttagaatgtttctgagatgcaggtatgttaatacatataattctaggtaatttatttctttgtactatttcatggaatgaatatattatatttatttatctattcctctgttgatgggcatttagataattttcttattttcctatttcttctcatgaaaaacatcaataaaatattcatgtacacgatttcttgggctaggtgcaggagtttggccagtttggaggaactgccgaacatgtataaaaccatcagatcttgtgagaactcactcactattgtaagaacagcatgggtgaaaccactcccatgatccaatcacctcccaccaggtccctcccctaacacttggggattacaattcggattacaattcagagatgagatttgggtggggacacagtaaaaccaaatcagacgatgtatccatattcaccttttttggaatattgacaagtttctctccaaagtagatttaccaatttattctccctttagcaatatgggacctgttgctccacattctcactagcatttggtattgccaatttggtgggtagaaaatcatatttcattatgattttgatttgcattttcctgattactagtaagattgaatatctttcattttttttttggtcatttgtatttctgtgaatttcctcctcatataatttgcaaattattttatttaaaaaaactgaattatagagcacttaatatactttgacttgcaaatcctttcttgattttattactgcaaatatattctccccagctatagaatactgtagtatttttcataactctctagaagcagttaactcatgtgtaatgttttgtatttgtctatctgtttttctcataagattataagtgagaacagaaatagaatttttcatttttatttcttcagttcctggcatatccaccaaaactgtctgaattaatttgagagtaccagttaatttaatgtagaagctattgtaaggttgagtttcttacttaaggctttctatttgaaggcatttctgtcaaccctaagtcatgtaatatatacatatattaatatatactaatatacatattaaatgtgacatagtttttgtagccaagtcagattaggtccttttttaacttttaaaatagagcttccctcaatttccaggcaaagagtttctcttagaacactgctaaggtcaagataggttaatatattcagatgggattgaaataacagatgcattgctatttccagtccagagttgttggggaagcagggaggaaggagggcataatttgtacagtgctttgtcatctttgcagctcatcaatatcagcagctgacacaggcaagtgtttgtcaatgagttctattggctgacactgaccttgccgttacaaccactgctttcttgacatctgctagtttgacacgtggcaccggattccatgtgcagctggtaccttggatttgaatgttctgtgagttctatgacattattagtacaattccttgatactgtcaccctgttatacatttaacatcaatgatagctgtgtactgtctttgtatttcttatttcgtattgcagtagttatgttt

SEQ ID NO: 36432 - DNA, 2300 bp, Homo sapien
ccaatgtgtgcaaggtgtaaaatgatataaattaagttcagagagagaaagttggaggtccaccttggatatgatcttgtggcccatagctgttaaactgattcatgttggaagtctgagggaatatgaggtatgaggactagaggtgggaatgttgagaatgtcagtgaaagtcaatttcaaatgatcattgagaagggaaggaagtgaatccaaaagtgggcaggtaaattgggagcattgtgaagaatgggaagagaaccaagaaagaatgaaagcatagaaagcaagggaggaagagtttctaggtagtgggtatgcttattaatgaaaattaacatttatttagcatgtgtgatgtgctaagtactttgtgttattatcgcatttaaatttcccacccatctgatgtagtaataaatattaatatccaaatgtgcagatgagcaaattgaagcatagagtaagccacatacccaaagacatgctgctagtcagtggcagaactaggatatgaattccattagtctaacttttatgctcccttcctctcttttccctgtagttttgctgaggtataattgacaaataaaaattgtatatatttaaaatgtacaaattgatgttttgatatgcatatacattgtaaaataatcaccccaatctagctcatgggcatctccatcacctcacatagtttccattttcttctttctctctctcttttccctccttccttctctctttcatcctttttttctttctttttttggtgagcacacttaacatctactctctttgaatgctgcataagacacctgtatgacaaggataaatgcagatccatgggggagtggctggtaggaggtcattggtgaaagcaggtgggaatggaggcagtactttgcagtaatttagtgattcagtagatggcaaggaagtggaggcagcaggtgttggattgaagagacaggggcattatggatagtgacatcaagattatgtagactttttttttttttttaaaaaaagagagactcacattggtttaaagcctgagaggaaggtgccagaagaaaacgacacaatgaagacaaaagtgtgagttgaataaaataaacagcaaggtcaaggaacaagtttgtagggttggagttatgaaatagtctgggaaaggaataccccatttcatagacaaataactgaggaccagagaagtaaatggtgaacccaaggttatagaaccaattaaacagtagctcagggaccagagtccgggttttctgattgccaggacaggtgctttccactagtccacccagcaactcttgctgaatcatcctctgctggttacttatccccaatccaaaggaagttgttgtagttaatgagtaaatacagtgtagccaaaaaccagtgaaaacacacagctctataaaaacacaatgacaccttgtccttccagtttccttcacaacaccctccccccatagttcattcacaccgagtactgacttttcttgactataagctgccttcaagatactgaaggttcccagtgtttgtgctaagcagggactcaggtggagagaactaaggtcaccctcagggaatttcttgctgaattaggttccactaagccttgaaatcaaaacgcttctggtaggtaaatggagtacagatgggaaatcaaaccagtgtgtgactgggcatgatttagagcaactgttattgatatgacagatcctagcaggcaacctcatgagagcctggatgttcgtttcaatgcaggcaggtgaaacgaataattgcatttttgacttttgaatttcctgcaccttgccagtggttattacagccataatctgggccatgtatattctaaggaggctttcgatttaagaacctagattttttgagaggcatgcaatagtcaatgtatctctatgcataagattttatgtagatattttgatgatgcataatttctacactatatgaaatataagttttttaactttgggggaataacaatagtttatttctaacatacattatcttggtcaaacattgaaattcttgattaatgtttaactatgagaagtatactcattcaagtaaaggatcagtttcagggttcaggctgaagtgtcttaatgactagaattcaggttccaaggagaagcccacaaggctaagggtattggatataacggaaagtggaagctatacctgacttccagagaatgtggaccggatataagatcttaatcttctcttatcttactacagaaatctgg

SEQ ID NO: 36433 - DNA, 2300 bp, Homo sapien
tataattctcacaacaatcttagattataaataattttgatctcattctgtgagaaaattactccaaactttatgtctaaatgtatcttccaccactcacaaccatgtgatgcccatggccaaatcaggtaattgatttgcgtggttctggaacttgcttttagcctttactctgctctttcagcatctaatcacatgtcaatttcattctcctgacaagtttgctcatcagtcgggacccaactcaaattctaatagttctgtgaaattctgtccacattcctcacccaccttctaggctccttaaggggtgagatcaattttatctatttttccatcccattaaggatggaaaggtcttacatagcataatacctttaatagattctccctctccacgtctattttctgatcttttgtttgcttttaataatgaacactcgagtagatatatccttctttctttgtgatttcacttgacttagcatgagtgcatatcttaataaaattagacttcctatgggcctcatttaactccaaatattcttgatatttttaacaataggataagtgcatctcaaaacgttcataagtattgcacctttaagagacattcagaattattctcaaaggctgtagaaacacgccagtatattaagtaccacatagagaatattaatttagtcaatggattgcatgccaaaaatgaggaagagaactgaaaaaatattaaaaagtgagatgtgaaaattaggaacagaaggaaaaaataaatacataaaacaagacaattctctacattcttttgaagaaatgaaactacaaaccagacaccaagatctggaagattagctttgtactaatcctggaatttgcttttactttcctgtctttggcctttgctctgatgtttcagtatctagactaatgcgaatttcattcttcagtttaaatcagcacgtcagtcagggattcatccaaaccttaatggcttagcattttcctcaactgttttatttggagcaaaatcgccacgaaagtcatttttaagggtcaattcaattttatgataatttatatattatgccagacgcttaaaatatgcctattactaccctaaattccattcttacagtactaggctgcattttagacatttgctgcaaatgactttatcttgaagtctacgtgattacacaaattattataaatactcatgacagatttactgaggtgtaggcaaggaaattaaaaaataaattttattaattactgtattttatgtttaaattatagtgtctccacttccgtaacattgctccgcagtatcccacctagagggacctgctttcacgcacatctccctattttaaacaatatcctttcatcccaaatctgtaactaggacagttgagagtcagtaccaaaatctttgatgatatttgaaattcttttacataaaaaagtaaaggcacaagcactttttcttctacttttccactccccacgtcctctccaagcctaaagactcttaggcactgagaaggagtctgcactgcgggatgcccactggaattacctactgtgggctgaatccgccccacactctcgaaggtgctacaacccttgctctcacccgcggcccccaggcctctcctccaggcattcttgagcccagggaaaagcgaggacgggaccacggccccgctcggcctagatccgccttcttcccaggtgagcgtcgctgtcctccgggatcgctcctcgccccagaccaggagcagggtgtcgggacttgtaattgccccgtagccccgagggcgggcaggaaagaaaggctttttcatactccgctgggagagagcagggtgtttgagttcagacaggttccgagcgctttctggctgttcggggtttggcgtgccaccacttgggacttgttgtaacccgtctccactcccgccccctccagcgctgcaccttgtctcggggaggcgcggttcgagccggaatcagcctccctccgcggacctgacgctgggcaggtaactcccctcccctccctgcccgcgcccaggcgcttgctgcttcctgggaggcaaaccttcggcggccggcgctgtgcggcgggcgcggttgcgcgcggcttggggcaagtaagtggggtttgggctcccttgccccggacctcggcggacgggaccccagcgggtgcagggttgaggtgcttggggtactgggggggcccggggcttcacccgcccctggccggcgcggcggacgggagggataggggactc

SEQ ID NO: 36434 - DNA, 2300 bp, Homo sapien
tgtttaaacttcaaattaacagaatgaaattaatatatgcacatatcaattgggtcttttgcttatatatcatctcttaatagagcctttttgaacaatcatttctaatgtgacctttgggattttctactcatcatcacctcatcctgtttggtttgcattatagcatctatcccttcctaacgttttccctatgtatttgttagtttgtttttttttaatctaactttactagaaagtaaaatgcatggaaacagcaacctgtttaactttgtatcactaagagtggaaaaataaccctcaggaaatatttggtaaaataataaaatgcccattgatgcccttctcttaaaaagaaatttaattagtgcagattggggaaatacaacaatatttctcataaaatgtgatatctatacaataacagaagtactatgtcccaaaaagtattctataaatagaagaaagaacagatggttttgctgctgattaatccatttatctttcgtaaatcatctaatttccccaggaacagcttcctcatctattaaagggggttagtaatagctaagccctcaggggtttaaaaatgcatatgaaataattttataaaccataaagcacaaaacaaatatgaaaaattatgattggaggagggggtggggtagttaactaaatctcagtgtaaaccaccaatgtcttgtgtgtgttgaaaaaataattacatataaaaactggttgcatccaaagaataatgtactttttgcactggcaagactcaaaccatattattgttacttcctcccagttacatattttgcaagatattgacaattgtctaaaggaagaccaaacagatgtaggtgggagctactgtcatttgaacaacattgaaaagaaaaatactaaaaaagaaacatgagggcatataaaggagcgctggggctgtgatgtttattttgaatctgtgaagcattgtcatgtggaagatttattctgtgtagcaccaagatgcaaactaggaattagaggtaaaagtctcaaaaagacaaatcgtggcttgagaccttggtttaatgtaagaaacagttttctcacccttagagcactcccataaggatggaagtagtgaattgtggtggtcacattcaagctagatggggacatgtcagcaatgttatcaggaggcttctactctgaagctgaagttcagacaagatttccaggctcttcccaagtgcaagattgtaattacttaaatgcaatatttttaccatgtttattaagaataaaaggatcatgaattcacattctgacaaatgctagaatacttattattagagacaaaaccagtgcatgagagaatggcaggtgacatcagccctgaatcaatgggaagaaagacccaatgggatgtggtatttaccagagagagcacttctgcttagattgctacatcctacagtgaatgtttaatatcattgagtatattggtggtctgtcatgcttgacaacattaactatgatcatatttatgacacttggcgtccttcaagaatttgtagctctatttcacatgacacttaactatcgcaaatacaaattccagctaaatagacccttcagtttaaaaacagtctcattctcaaattttaaggagaaagtgaagacggagatgtcttaaagactcggcaagtactaagttggcaaatgtcaaatgttaaaataagtttatattaaatgttaaagtgtttgcctggaatgacttttccattgtcctgcttgagaaacacagaggcacctccttattgcttttatatttgctttacaaagacaaatgtatcaacatgctctgtattaattgtatgttgacatttttgtcatatccacagactgatgcatgtctgtgcatggtttataataagtgcacgtaaaaatagagaaaataagtagaaaaagagagagatttaactctcaccccccaccccccaaaaaaacagattaaattagttttcattacttttttttttttcttcagcttcagctctccctcagcgagggaggaggctgtgggctgcggactgagtgctggaatgaggagtaattgagcttcagctgagccggacgtagctttctcctcctggtgtcattgctgcagcctccagtgccgggtccctagttcctcagctgcctatcttcccggtgcaacatcgcctgtaaagacagcaaagccaccgcagaagttgcccggcagaagactccggaggcattggctcagtaacttttcacgtcattttctg

SEQ ID NO: 36435 - DNA, 2300 bp, Homo sapien
ggactgatggctcaatgaacaggcattcagtggtaacacagctgatattattttgtgttggataaacagctatatgaccacaggtgctttctatacctataagttatagaccgaagcagctgtacttgtctggcaaagattagcaccattcacagggtcttatattcaggttctgtggatcactgcactctagaaagtcataactatatcgccttccttgaacagaaaattatgttattctcttcctttgtttcataagtttattttccttgtggttgctcttcttaaactcagcacttagatacattactaagcatgtggtttttgctgccccaagatcccttcagctgcttcttctaataccataattttccttcgtgatgcacaccttctgcaccatcagattctgtgctttgaaaagggccaactacactgacaacctgtatctatgatactggacatggggtaagttccttttgtaaaattgattggcacttgacacatctagaactgatgtgacttaattctgcaactttaatagtaaaagaatgacactttctaccctgctttctaagagagaaggatgtttgccaagggcttcacagccatcttcccaccagaaggaaatagcctttctgggaatagaactggtagagaagaatgcaggtaagagacaggaggaaacaaacaacttagacccagagaaaacagtttaaaacacacctgaaattaattcttcccacggactcttcaactatggtagtaaccaactctgtcctagtttaagtccttttaagttggcttatatctaagcttgtcttggtagaagtcattaggaaagtttagtgactcaatcccttgaaaagaagaaaagattgattaattttatgatattataatccttctattatgtaataattaagtcagtgaatgtaatataatcaatttttttgtgatataagcccctcatatacataccttatattacagcaagaattaatacaattgacacattttacaaaggagtgaataacttccaatgctaagtcactcatctagatctatagagaaaagcagtgttataatttttgtttgttggactctagagtctgtgttttttcattatgcctgctgaaaacaaaatatagtataacttctctactggtataaaataaacatgaacaatatgcaatcaaaaactcaatggtgtaactgcacaaatacttctctcccatccctatctcttcttaatttcttgccaaagcagcattttattttttaagcattcattctagaaaggcctccaggtgatttagaaatagaagtctcatgacaccccaagaaagatgatgtgctgtaggtttacatgaggaagggcgtagccaaaccaaggcataagataaataagtcccttcattgaaactaggaaaaaaaatagttgtcaagtgatgcacacaaatgtagatgattatctttccagtggaacatagaatttctgcatcactgagaagagtatgttttttacactgtagctgtacttggaaggtatcagatactgtagctgaagtggcataatttttaagcatactggggtttgtggcacatgtaatacaacattctttgtttgggaagcagcttcccagtatgtttgagttatatcaggctaattctagtagaacttcgattttgcatacattttccagggctattatgcgtttttagcttttctatatcctcaaatgacatgaaattgccttaatgaggctaattaaacaagtggagactgagtatgctcaagtgtctttgaaaattttgggtcatatttgggaggcttttacgtagtgttgtattttagttaaggaaaataaacctttttcatgaacgtgcagattatgtatcatttctcttagtatttggctcatgggctttcttagaggcataatatcctaatattcaagaccagcaccctcaggagaataatcgaatttgaatataattagaacagttcacaacttaggaaacactggggaggaaatgatgatataggaagctgacttgaattggtaatgcctttaggaagcaaacacagaggctgaagccttattctggacagttactcttaagaaagttgtcagaagaaacgcatctgcctttttttccaggtgaactgccgtgagttgtccagcatgatagtgtttattttcttgggtaagtgaatggtgcttctggtttatctgaattattcataatactaattctttgtaaactgaataccatcacacttaagcttaacaggggct

SEQ ID NO: 36436 - DNA, 2300 bp, Homo sapien
aaaaaacacgtatcactatggtcaactaattggtatatgaaattttcttcagacccttttaatttagaaaacgattaagcaataatttttttttccctaaatgttcttgttcttagtagcagaagatcatatcatatctgacttatcttagaggtcttattctccaaaagtttagacttcaattttaattgccaatcctttttgaggtttagaatgattgttgactccattatgaaggttgccttgttaaattattgttgttgaagttggatcttttaaaattatttttaaatatcatgttccctgttgcagaatttaaatatagagagaaaaatgatagtaagcatagatataaccagtaccgtccatttcacttgcagtggaacaataactaacagctgagctctgctggtacagctaatagatttagctctatgaatgtacacctatatgatagtcatgcttaggtaaataacaaccggagttttggtgctttacagagttttaagcgcatccaggaattggataacttcactttagcagttcagggaatgttctccaggttaaacatccggctgggcgcggtggctgacccctgtaatcccagcactttgggaggccgaggaggtcagaccacgaggtcaggagatcgagaccatcctggctaacgcggtgaaaccccgtctctactaaaaatacaaaaaattagcctggcgtggcggccggcgcctgtagtcccagcagctggggaggccgaggcaggagaatggcgtgaacctggggggagaagctttcagtgagccgacatcgcgccactgcactccagcctgggcgacagagcgagactccgtctcaaaaaaaaaaaaaaaaaaaaaaaaaaagaaagaaaaaagaaaaaaaaaatccttggttaactgtgagaagaagactatgacctcctcatcctctttgccctttctagtgcagttttaccgaaggatctacacgatttctcttccactctttgtctttttcctcccttaacccatttatttttattacctgtggaagtctcactgcccaccccccaaacccccacccatgcaacacacaagtggtaaggatggtttgactttgaatggtaaatttcttctgtgtgtttatactacggtgtgcatcggttggctcctggtttacatttgctccatcagccaccagggctgatgcgtattcctggccatggacaccctggctgggtctccggaagaccctaggtatcctgcacgagactattcttgatgactatgtcattttagctgcaaaccactgaacccactgcgaagattattagggtgtgacaatacacgtaagtttacatgtgaaagtgagggggggaaggtaggccggtggtctgctcgaaggctattttttcaaaccctctcttccactaaaaatgtctccaattctaatatcctaagaacttgtatagaattttccgtttggataaatctagtccttagggctttaataattttgtgccatgagacttttaaacacgcagttccatttcagcgcttaaccgcagcaccaacttacagcttacctctcatttaggaacgtacctctgagagtacctctgacatgtaacctaatttaagactatcttttccttttcattagactgttggatatgttttaaccttgctgattgcctcaaaaacatttttaaatagagcttattgttataaagcataaactccgtgagctcaacggtaggcaaatctacacttgagcacccaaggctgcagctgggaatgaacgaactcatcaacataaacactcacgccccttccttttattttagaccccttttcttctacacctgatctatgccaggtgagaagtaggtgggcacgttaagatacagtcagccctgggcgctcagtgtagtgcggaaaatgagacacccctggacatcctctggctcagctcctttctctcctgttcaggtgctcggcatttctgtcgattcccgcaggtgccccgtgcacccgctgccccaggcgcggccacctgccacgccccactccccgccctctcggcgccgccgcagtgcgcagaacagctctggtcctcacagccagtgcaccggaggggcgcgctcccgagctggcgcagtttcccagcgcggtgcccgcccctcatcctcctccagtctccctcccctcgccgactgccgccccaggctccgccatggggaatgtgccatccgcggtgaagcactgcctcagctaccagcagcttctccgggagcatctctg

SEQ ID NO: 36437 - DNA, 2300 bp, Homo sapien
ttcaaattgctctcacatacaagtctacctgagaattcaaatgatggagtaaaatacatatacttttaattgaaaatgaatctgactttttgtttggcgattactatttcctctttattcctggaaggctttttctttattttctttctctcactgcacaagttgatctttttgaaaaatgagtgtttgccaaatctagtctgagttggaagggaaggtcggcgggaagggtgattacttaatattctgactaagaatactagcaactgatttccaatatagaggtaggctatatgcctggtgaaacaattaaattataattacactgattgatattataaatcatgctttgggaaaatgagtttttaagacttgtgatgcctagtctcatttttatttttcacatgtatcttagaacaaaaatccacacatatggaagatagtaagagttgtttcttcctctagtgtggtaaatttttactttgtaactctatgctgtgctctagagacaaatgaagcaaattcataactttgatgatatattttaaaatattgagaactgtagcctgctttatctaggatgttttgtaaatgcagagaaactttttgtcttgaagtaattgatttgactttgtttcttagtttggtttggatgttaaataagcaatgtcaagaattttagccatttaaactatttctttttgaagtggtatttcttaacttactttcaacctgcactattgctattctttgtgatatctattttacaagggtgttgcatgtatgtcagcatttgcatctgctactgtggcatcctacatgactattaataattaaatttcagtaaagcaaatattaaatagcaacatcaagttttcgtgcaataactttgtataagaaaatgatgcgtacaataagattctgcaaaccctttcagtattctgcattcaccaataactgaagacttctaagaaatatgacttttctttatacattcagaggaaatatttaaaaagaaacaagaaaccaggcgcctctaggtagagtaaaggaaaaacattaaaatttcataacagctctagaatttgctcgataaatttacattggtatcagcatactatcccagacaatgaaagtattgtgagccctaaggttaagtgagagcctgtaaggaaaattatagctgcacaaaaacattgtagacttccaaattttaaaggcattaaacattaaggataaacacatactttgctcatttccttggattaagtatggtattttagaaaggtgtgcattttccccattttacccatcaaattttaaaaactcaaatttcaatctgcatgtagtcatgacgatttgatttgtgtttatttgcatgggttaaaacaagtcaaagtattgaatacaatttatgggaaatatctaatttgtaagtctgtgtatatttcaactgaaataacttaaaagttatgaatcatgacactacatcttaggatatttgtatttcaactttctgcttaaaattttaatacttaaagacacttaaagctaggttatctaattactgttattgaattattacaactactattttggcagctagaatatatttattagtgattaattgtctgctgtattttattttaaaaggatctggctgtcattaagaaacagtgaattaacctcaatttacaactcatccttttattttttaagaagtgcattttaatgacttacaaaaactagaaataatctcaaatacagaaccgagattcatcaagctaacttaggcacaacctgagacttaatacagaagtgtattaagtacatgtcactgaaaaaagatctaaagaagtactatgtaaaatggatggcaaaattttcagtgtactacttgaaaactgccttttatttcccctagaatttgtatgtcccatgcatcactgtttcatgttagatgcgtggttataaaattgtgaaaatggagacttttctggtagcaaaagggttaagttctttttgctttaccagtttcaaattacaatgagaagcctcttctttcccagcagggttgtgcttacactactctttagatctctcttgaagagggctggtatatttgtgcctgctggaggtggaattaacagtaagaaggagaaagggattgaatggacttacaggaaggatttcaagtaaattcagggaaacacatttacttgaatagtacaacctagagtattattttacactaagacgacacaaaagatgttaaagttatcaccaagctgccggacaga

SEQ ID NO: 36438 - DNA, 2300 bp, Homo sapien
gaatgaaaggtacagagacaagacaaagtgagggaaggctgttggacgctcaaaatttttataggtaggaagcaggctgataaaactactcaacttcaattatgtactatctttcaagtaaaaaagaatagtggttccaaggctggcagggcctcaagcccagaggggtattcctaggtcatgaaatctgatggaattttttctgctggattcaacattgcagagggtcagcgaccttttcttctttttgaatgggtatgttgataacttatcctttgcctgtcttaacatcgtaatcgggaaatagataacttgctctgtagtctataggttcacagatggaaagggatattgtcctaggatggatcatacccatacctgatttagataacaagatttaggacttcagagcgatttattaatttagataagaatttgaaattcactgtaaattgttgagacttttgtggacattggattggggtggatgtatactgtatgtgggatgaatgtgaatctttgaaggccagagggtagactgtgtcaggctgaaaattacccttccccgagacatcagctcttaatccccagaatctgtaaatattaccttatttgaaaaaaaggtcttttgtagatatgaatgagtatcttgtcatagggagattatcttggcttatcccagtggaccctaaatgtcacactagtgtccttgtaagagagaggcagaggaaaatttcacatagggaagaggagggagtaatgagaccatggtggctaagattggagtgatgtatccacaagccaaagaatgctggcactgaccaaaaattgagaaaggcaagtaatggaatcttcccttgagcttctgggggacacacagccctgaaaagactttgacttcagacttgtgcattccagaactgtgagggaataaaattctgttgtgtaaaccaagtttgtggtaatttgttacagtagctattggaaactagtacactaggcttttcatttagtctaattcttaatcattttatgtaatgaacctatataaaaatgtatgtgagtatgtattggtgtatattgcaaactgttggtagcatatgtgttgatcaaaaatatttgggcttcagcaagtcaataaacaagtctgtttcaatgacaatttgaaagcaagactcttcagtcaatattttctatactatcaattttgttaaattatcatgtatttttaaaaacttaatttgtctatttctcattttcctacatttttcattgttgtatttagtaacttttagcccatatttcttctctgtgttatcatattgtaaatttgaagcaattaaatggatgatacttaatgtgctatatataatagttaaacaatatataaatatgtatgcgtaaaaaaggatctgcatggatacaaatcgtatggtttaattatgtttcaattacttcgcttatttttccccagttgggtttttgttgtctgttatgttgcatttttcttgcctttattttatgttctcccatgagcataaacataataaacataaacatatgttctcccatgagcataaacaaaaataattattgtttttgtactataacaacaattgaggcctagattttgagtgctttttagtgtttttttttcttttaaaagatgccaactttgctagactacattttggtttttattctaagaataaaggacaagattgcttcaaagaatccttaatattttggaaatttcttttcctaacttaatattttggaattttcttttcctaaaatcactctgattttatcttgggcagctaggtggatggtgaggacagagcaacatgagggcaacagtagaataaatttaccagtagttgaaaaaaccgtaacagaaaatactcattttcaactgaattcaatgttagaccaagttatcatgttgacgagttagtcttctttggtcaattcttgccaaccaaattatctgcagaatagtttccactgctgctttgtcatagctatttttgtcctggtgctcaatcctgatggcatgttgtatttggtgttaacattttcatcaggcaatctaaatcatttgctttctagttctctgctcaccagctagccccattgtgtacagggagccttatggctcacagtgaaaatttgtaggcagggactgggttctactgtgagctgagatccctggagctccatgaaaaggagaaaaagaatgccgtgtttcctggatctatggaggtgagtgcatatttcttaatgaaggatggccttag

SEQ ID NO: 36439 - DNA, 2300 bp, Homo sapien
ttatattgacagaatcatacaataagtgtttttttgtgtgtgtgactggcttcttttagctaacatgctcaggttcaaccatgatttagcatgtagtgtttcattcctttttatgtcagaataatattccattgtagcgatataacacttttcttatccattcatccgctgatagacatttgggttgttactgcctttggctttatgagtaacattcctatgaatattcatatagaagtgttgatgtggatatatgtttttgattttcttggctatctactgaagaatgaatttgtcaggttataagttaactctacattgaacattttagagaatggcaaactgttttccaaagtggcttaatcatttttacaagcccactaggaatatatgagtgttccaatttctccatatcctccctaacacttattgtttttcttattttagccatcctagtggtataaagtgtatctgcttgtggttttaattttcatttccccaatggctaattatgtttagcattcattcatgttctcattggccattagtagatcttctttggagaaacgtctaaatactttgtgcattttaaaactgtctttttactcttgagttgtaagatttttgtatatctggacacaagaatctaattgtatagatggtatgcaaatattttcttagtatgtgggctgtttactttctagatagtgtgatttgaagcacaacattttaaattttgatggagtctaacttattttttcttgaattgcttgtgcttttggtgtcatatctaagaagatgttaccaaatccaaagcaatgttctcctatcatatttttgtaacagtagaatctaacatgaatgaataaggaaattcaggaaatgatcatttgaagatgtttgtatcacacctgaattaagtgagatttagttattgaagaaggcatttctttgtgaacctgttcccacagggagaaattaattcacacattcatttagccaatatttattgagcaccttgtatattccaggtattgttctaggctcaggggacacagctgggaacaagaccaatttcctgccctcatagagcataccttgagttggataggaaacacacacaagcaatgaagatatgaaaaccttcagatagcaataagtgatctgttgaaaccaaagtggggttgggcattccatttggatgggatgtacaggaaggactcactctcaaagtgtctcaaagtgtcacaaagagtggataatttgatgaacagaagcaagcaactatgataaggtctgggacagagttttggaggcagaagaaatgccaagtgagatgagaacacactggtgtgtataagaaagggcaaacaggtcttgtgtgtgttggggtaggaggggtgcacacgggtgagaaaagaagagttgcagataatagggaaagcatatgaatgttaaataactttctggctgctctgtgaagaatgcactcaaaggggcagagcagacagcatctttatcttgtcataaggctgtcaccttattccgaggcttcctttgtaattgctaaacccttaaaggtcactgcctacttgactatttgaaagtgaacttccctcaggttttggagcagctgttacttttggttgaaagcaaggaacatcagtccgctgcaacgtaccttggcgccccagaggggggttcttcttgggcaagggaggcaggcctccttcgatcagtgcaggcgatgctctggtgttgcccaagtctttgcctcctttagtgcttgccctttcaactgagttgcctttcctgctttcctggcagtcccttattttgcctctctcctcgcgcttccctggtcctccttcaccctcgttttcaatcctcaatcgtgcattttctgatgctagcaggatttgaactgagtgtttccaccagggcgacactagcagttcgcccttcaagatccagatccaaaatccaccctctggtcttcggccaaggaaagggggcgggtggggagcgcgaaccttatctcccgggctccgcctccagggggctgagagcgagtttctgagcctctgagctctgcactggccgctgcagggagaacggactccgggcggagggcagccaatccgtttcagcgcaggtcttgctcgggttgggcttgccactgcctggaacatacctgtccccctggcgcaacactcagctggctgcgacggcaaccccgagcctggacactgcgccaggtaaggagacacctcctactcccctctcgctgccagaatgac

SEQ ID NO: 36440 - DNA, 2300 bp, Homo sapien
tatagaaccttgttttgtcatattgtcagaattatttttctggttccttctcatttgggtaggctacttcttctgtttgttcttggtttatatgtgatttaactgtgtttattttttaaatttcctttttccctttaggatattactttaatgtttatagttctttgtaacctaatttggcctttggtgctttcagaggtgaagaatttgtatgagttccttggttttttgtatgaatctttgtattatggctttgtcagatgttgattttagtagcaacgtgcttggtgtgtgagcaagtgcactgtctcctatggagttggaatggtagaggtttcctgaagtttatcttattctctgtgagatttatctctttaatttttccccagtattttatttactaagttgaataattcaggtttcaggccagtacataaggtgcccctggatagaaacttgttgtggctaaagcagatagataaatgcaatgcccagtggtgggcagaggtcccagccttgacagaggtggctgggggctcagtaaaacatactgaggtctcatcagggggaagggtgggagccacttcagctcccctactgggccagcagggaagtgatccagctctgagactcactcctaatccagtgttccagctagtccaatcagacaggcacttgttttcatctgcagatatgttggtgttccaagtagacagggattgtggctctacccatgtgcaaacctgaacctatggggatgctgttatcctgaagttttccggaaaggctgtctatgggtgcacccatgccgacctcctgtgggagaagacccagctgtgtctgtagtggtggataagggggaaaataattccccttcttcaagacacttcatgagcaccagggctgccagaccattgtagagtcacaggcttctcctcaacctccttagcccagcacttcacctgtgcctctgctgaaagagattttctacaagcagaaaagttttgggacttaaggcctgccacctggattcttttgtcccatggggtgttcccttaatgtggtgcactcccccttcccctaggagtaggagtccctgagaaccagactactgtgaatgctgctgctcctctgggtctagccacccagtggagttgccacactcaaggctagtactggggaatgtctgcaagggatctagtgatgtgatctatcctcaagtctctcagtagcaggtaccaccagcagcactggtggaggtggcaggggggtgacatagactctgtgcgattccttggttataaataaccttactgtgttggctttctcaaatgccagttgtagtcatgatgaactggtcaaatggacactcagaacttcctagtcagcccgcttgttacaggcaatggcgatagctgaggtcatgtacaagttttctccttcctgggcacttcattatgctacccggagatgctgcaatggattgtgtcagttggcctccaaacaggaggtgatgcttgcaagagaacaccagctgaggtggtagtggtgggatttgtgcttgccttatgttacccaggagaggtactttggtcagtttcaggcaatgggctaccccatagagctcccacaatttctgtcctttgtgttgagctgcaaaagcagatagaggggtaaagccaggtaggtgctgggtcaggcaagtccatgctctagctctgcatgtgtaagacaagcagaaaccccagtggaggtctgtggccagctctctggcctctggggttatgttccaggaagtagcacagctgtctctgttgcacagaagtttacatcggtagtggggaatagcaggtagaggtaagccacactcagctcccacacacttggcaaggcaggcctcacatccgcagggttccactagcagcagctagctaagttccaggcagtctgggggcaggactcaaaactgccacaggccataagctttcccagtggagatagcaaccatagctttcaggccacgcccctcccactccgcctatgaggccagggcacccagctcctgcattgtggctgcagcacacttcccactcacacccctggttctggccaagggagttcatacccactcaaagattatattacgaatttcagatgggagcttctctcaacctgcagccaccacatgagttagctggccgacttctgtgaggttcccagtgaggtaggatcaagaatggcttcggttcatacgggttggagattgggcatgcatgtgaggctcttctcgccgtttctac

SEQ ID NO: 36441 - DNA, 2300 bp, Homo sapien
aaagacacagtccctgccttactggtctgtcttctcagtgtgatgagagggtaatgaaaccatgtgggcatctgtagctggtggattaatgatattttagcatgagctttccattttcatgctgacactttctttaatagtggttattcttgctggtgtctagtgttagaataagcacactttattttttcctccccgaactcacctgtatccaaaaggaatgcattgtaaaggaatgcatttaactttttgttatgctgagttggagttggcatggcaaaaagatgttcttgaaattctcaacgtgatctctggtgccaggtggccgttcttcccattaacgattgagcgcctcttcttttccgtcttttctttgtgtgcattgttgtgtgtgtataacccagccaaaggaaggacaaacatggaactgcgtgagaagttcattttagcagatggtgccagccagggtatggctgctttccgaccccgaggccgaagatcccggccatcatcacgaggcgcttcacccaacagatccacttctgtgtccagtcaggctgcgcaggcggcctccccacaggtccctgccaccaccacacccaaggtaagactcaggatgaagacttttcctccacctttgcaatcaatgtcccaagtagacttttgaatgttctatttagggccctagaatttgtaggaccagctatctccatttgtgcaccttctcatactgtgggaaatacaggaatttttttttgaatgtatgcttttgcctagtggcccacatagagatgatctatttaggaagcctttgtgatcttccagattgatttttctttttaaagcttcattcatttttttggtgtgtatgatttgccattggatcttttcacttattttaaattattattcttactgtgaaatgtgactctttgctatgaatatctctttctgtggctttgttttttttatctgctatccttttcatttgatttgccattgttccatacagattctccatcctttaacacgcaattatggtaaaccatggttgacaaacagcaaaatgtcaactccttgtaaagcagcagagtgctcagactttcccgtgccatctgcagaggtattgtaaggccccagagtccagtcttaacattctcctttaactgaagctatcactcactaacatcgttgcaccactccctaaatatatgtactttgctaaccctatgtctttttatacacttctataagataagtatcaaccgagcagttcttggaagatgtgagagtaaggggttaacagaaaagatagtctgcagctctttaaacagtgtcaatttgacccagtcactcctgcagactacctcctttttgttctcattcgtacttagttccactgttatctcttgggagagtaacatagagtaggttatagccagacttaagtaaaatttcttttaaagctactaaatatactagatataatatgggcaagaagtgcaacacattcccttcaaatgggagtaaaaggcagtatgatttgcaagagcatcactgaaaagaatgtttactgaatgttcactgtgggcatggtccttctggatgtctgttacatttatacctgccccaaaactttgggcaggtgtgacataagctctcagtatcagtgcaggggggtcagaggggtaggcttaggtatgcagaaagttatttgtcattttcaacaggtaataaatgtatgggttttttttaaagattttaataactaatttaagcatgctctaactttttaatacggcatgatatatggggagaagatatttaggtgatataaaatttgccaagatgaactcatgtatcaggtcatttacattcaattgaaaatcagctgtatatctttttaagaaatttcactgtgaaacaacagacataggtacaaaataatcagatattttattagaatcccaataattagtggggaaaaatccctaaataccttttcttgaaattgaagaaggtatttcaccttaatgataaaggacgtaacttaaaggccaggatcctcaaataaaagtaatataataacttttaaaagccctcttatgcttttcaaaacactttcttgtctgttacttaatcctcacattaataataagtgacaggcagagaaaaaatgtgttaccttcatgactccatggcaatctcattgctgagaagtgggagaattggaacaaaaacaacccattctttagcgtttcctcatttcttcctcctcattttcccaagcccctcatttc

SEQ ID NO: 36442 - DNA, 2300 bp, Homo sapien
ctttgtaatcttttttttttcaaactgtttcctttgggctaaatcagcatgcagccgtctaacacaaatcattacaaacccccttttctgagattttactaatcgctatgaactaagcaagaaattaaagtcggttgctttagctactgcaaattgcacatcatcctgtagtttagaattattattgacaactagaggttctttctttcttcactgaacagtttggagactcccagcaactgcgactggtccggatcctgcggagtactgtgatggttcgtgttggaggtggatggatggcacttgatgagttcttagtgaaaaatgatccttgcaggggtaaggagatgcttatcatgataacatcatgaaagtatttcaattttatattatatccagcaccaaaacatactgggcataattttggtcatttattccaatagtgaatgtttcacattggtctgtcagcctaaagttcccaaagaacctgtggcagtcatgtaaaccatattcttctcatttttttctttcttttttttttttttttttactttttctggataaatatggtgggcgggaaatactagaatccattttctttaggagacttttacatctacgattttccaaacaattataccaaccaaggaaaggattttgtctgttatgacatagcaaagtaagagaaaagaaaattgaggtgatgaagaccgaaaatactggataataaaagtttaaaggtcaaagtttttatgaaatgaagagcaggtgaggaaagccataattaaaaaatttttaaataataatccaatgctaacttgactctttgaagttgcagattagaacattaaaaatataaacatataatactatagctctctacatatcttccagcccaagtcctaagttagcttttaatttttctgttttgagatccttctgtcaatttttaagttctcaaccaatttacgttacacgtggtcatttgattgcaatttctaattaggtaccaattactcagtaggcccatttttcttcccccccaagaaaaaaacaataaaattgttataattttcttttacctgtgagctcactgtaatcctttttagcaaacaacaaatgttcacgtcagtgctgtctccttcagctaccaagtgggatcccaggtttcctcctgtagggcctcttggttttggtgatggtgtcaccatctggtacacatagacatatcagtcatcaggcttctccaccaaggccaccatggattgttatacatgttatacagtagccctgctctctcctggccaaagacacacctgcgagagaagtaaaacaagaacaaaagctcctgtttgttttatattttgaaaataatgtagcctaaggtaaaatgcaactccatttatgaagaaatcagaatacatagtgttctgttgggttgcttaggaaggttagcatggctgtggcacagtcttccaaatacatttttcttattgagccaatcccttgagtgcttcttttcctgatgcaacttttcttctaaaatgtgtgctaaaggccagatgtgagcaccctttgcatattcaactactgtactttgtttcttcttctgctaacagtattctttaatgtgattggtatcctgtgtcattttttctagttcatcatcatgggagtaaaatgttacgttcggaatcaaactcttcaattactactactcagcctactataggttggcaacctctctctttgcctctcccctctttccttttctctttcctacttttccattcttgcttcagtcatttgttttaaaataacatgcttcatccatcgcgtatggcttaactcatatccagctgagctggtgcttccaaatttaaattctgaaaatttgatgactttggttgtgttacacatgcaggtgttataagtgatcaaacacatgctaacacgttgctcaccgggttcttgtggagtgttctccgtgtgcgtatgtgtttgtatgagtgctgcatcactgactacctcacagatccttgggtctggtgtttgttattgcatgttggtaaaacagtttttcaaggcataaaataaaaatactagctgcctcatttaagtgaaaaatccagaagtttatatgttgtcatcatgactaacaagccatcaatcattgtgtgtaattatattctttaatttatccccatgttgaaatactggcattctctttacctcaatagtacatgcaaaagacacagtccctgccttactggtctgtcttctcagtgtgatgagagggt

SEQ ID NO: 36443 - DNA, 2300 bp, Homo sapien
agtggcactacatcatgatcagaattttgaaactaaggagatactctgttttgatttaaacatgttcatgaagcttttattttattttattttattttactttggaaagaaccatgctatctatagtatctgaccatattacattagatatgactctgccactccattttaaagccatattacatctcaagcttcaaattatctattacctttatttattgcaagcaaataatttatttaaaatagaaatagttacttggaatagatttttaaaacttccattagttatactataatactgaaatgttacttttccattcttgctattttcggagtcagcaaatgggagagcatcttttatttgcagagagaatgagagaaatacctcaaaaggttttactcactgaaagcacagtcagcaacattagtctattttctcttgtcttgtgatttggttactgggaatatttagagaaattctgaagatgatgttagttgtctggagaatgcctaattaaaacagaaaattatttgtattcattacacttgaaatatcatctctataaggaacttttagttatttccttataacttttgttttgagtataatcttgaaccaaaatcatctagtcccattatctggttccttaagggtaattttctttaaatcccctcctttccctttgcttattagcggcaccaatttttttctaacaaaataaatttacacttttatttttaaattttaattaacatttcaggaagaattataggaaagtttaagtctcaatgtttaaggaaaaaagatttagaaatagtggtttttaaaagtttgatggaaaaacacatgagttcctgctggtgcattttacatgctttctaggtccttctgagttttaggatcctgagggatttggttggtattgtttttgggttttcttcttgaaactcagtattaaaacactgaaaagtagcagatttttttctacctagagttttctgtttatccatcatgagcccaaataaagtcacaattgtatgttacctgctttacaaagaagccatttatgtttaattgactgttcattttgctttcttgtctgctgggatgacaaccgtgaaattcagtctggtagtttttatgagttggacatgaacctattagaaatgatttaaagtataaaatcatttctcacaggctttcaaaacataaacctgtgatcagaaacctggaatctagaaatttattcaggacttgcagaatttgtagcatatctacattattggagatctattgaaagggcaagaaaaagatgattgcctgttagtatcaacagttatggtacagacaactatgagagaaaccttttagatttggcagctgtatcattaataatgtgtcattggctattctaatattacagtaatctaaaatggcatattaatccagcctttaacaaattggtttaccagatcattagggatgcagaaattttagttgactgtgaaatttatatgagtcatactcatttactttattctttttaagtgaaaactgcccttacagaaaagaaaatgagtttataaagatttctcacagagttcagtggaaaacggttttactgtaagagagagtttaatgaagaagaatcaaagcttattaaatttttcttagaatcattttattttggataagccctgggcaagtgggccagtgcttactttcatggctatgtttaattcctagaaacattttaaaattactgccttactaatattgtttctgtcataagaaagaaaaataatttttagaccaaagctttggtagtatacttgataacctttgtaatcttttttttttcaaactgtttcctttgggctaaatcagcatgcagccgtctaacacaaatcattacaaacccccttttctgagattttactaatcgctatgaactaagcaagaaattaaagtcggttgctttagctactgcaaattgcacatcatcctgtagtttagaattattattgacaactagaggttctttctttcttcactgaacagtttggagactcccagcaactgcgactggtccggatcctgcggagtactgtgatggttcgtgttggaggtggatggatggcacttgatgagttcttagtgaaaaatgatccttgcaggggtaaggagatgcttatcatgataacatcatgaaagtatttcaattttatattatatccagcaccaaaacatactgggcataattttggtcatttattccaatagtgaatgtttcacattg

SEQ ID NO: 36444 - DNA, 2300 bp, Homo sapien
tagaggtaagttttcagatttcaaacaagaaagctactctaatccagaaccacaaagttaaaaatatggactcattttaataaatatgaaaagagaggataatgtcttctccacttgtgcagtaatttttgcttttattcaaaatctcaattaactcggttcactctcttcaaaacagaagaacagtgtgacttcattactctttctctatttttttttttctcttttggaacatctcttatatgtagtagctagataagaaatgtgctgagtttccccaatacagtgtgctacttctaaatgaaatattatttttatttttatacttaaaaaaataatcatcaatgtattcaaaattttaacttaaatttgaaatcctaagattttcaaaaatatgtgtacagaaaatagtctgattatttggtttgaaattgggacaactgggtgcctgcacatctctaaactagatactacatccagaagcacagagtgtgagtatgtgtgtatgttctagagtcatacagaaagtttcctgttgaactaattgtgtctttcttccatttttcatttttatcagttcttcctgggaaatcaggtataaaccagtggaatgtattctcaagttcctgatgatttttttttaactttaattcatagtcattaaagcttgccatggccaatctttcccatgctgtctccctagctactacattgttggttggcgtggtgtttctgtaaacgctataagggtccttgatccaggattcctttttgccttgtgtctctcagatgaggagattacttttaagcaaaccagataatgaattgtagcttggcttgctacaatgttacgaatgcaatttttaattcccattttttataatatgagcatatattttatgctagtactcattggaacacaaatttgattctccacacatctctgtgttaggctcattggtgtttaactgtttaggacatacggtctacagtagctgagaaggatcagcctcaggcagtgacacaggaagacagagagccaagaggtctccttggcactcagccacaagtaacaagttctctccaaagaagctatttgccatttgttcaaaatcaccaattttggggcttggcatctctgagtagaaatgttaactcagtaggctttaagtaatattccttttgaggaaagttatcgctataatatatgcagaatcttaaagtcacattttatgccatcttgatcgaatatttatattattggcacttaagtcaatataaaatgtttatgttgacatttaagtcagtataacctgtgtagtggcactacatcatgatcagaattttgaaactaaggagatactctgttttgatttaaacatgttcatgaagcttttattttattttattttattttactttggaaagaaccatgctatctatagtatctgaccatattacattagatatgactctgccactccattttaaagccatattacatctcaagcttcaaattatctattacctttatttattgcaagcaaataatttatttaaaatagaaatagttacttggaatagatttttaaaacttccattagttatactataatactgaaatgttacttttccattcttgctattttcggagtcagcaaatgggagagcatcttttatttgcagagagaatgagagaaatacctcaaaaggttttactcactgaaagcacagtcagcaacattagtctattttctcttgtcttgtgatttggttactgggaatatttagagaaattctgaagatgatgttagttgtctggagaatgcctaattaaaacagaaaattatttgtattcattacacttgaaatatcatctctataaggaacttttagttatttccttataacttttgttttgagtataatcttgaaccaaaatcatctagtcccattatctggttccttaagggtaattttctttaaatcccctcctttccctttgcttattagcggcaccaatttttttctaacaaaataaatttacacttttatttttaaattttaattaacatttcaggaagaattataggaaagtttaagtctcaatgtttaaggaaaaaagatttagaaatagtggtttttaaaagtttgatggaaaaacacatgagttcctgctggtgcattttacatgctttctaggtccttctgagttttaggatcctgagggatttggttggtattgtttttgggttttcttcttgaaactcagtattaaaacactgaaaagtagcagattt

SEQ ID NO: 36445 - DNA, 2300 bp, Homo sapien
ttggaaattcataccctcaacaccacattgtcatttgccctcattcctcataacacattgccattgccaaaatcttggtattttttaacttttctgataataagcaaactcttgctatttgagtacatttttaaatttccaaaataaataccacaagtatgtgtgattttgtgaaatattgatatatgggatttggatttagggaatcaatgaagtaaaaaaaatgattatgttttaacaatcagaagctgattccttaagaataaaatctaacttgacataatgtttgctggtgatgctgcctggaaaatataatcttttatatttcagatcttttgattgtgtgtatttgattacctaagatttcaagttttagattctgcaattgggaaatttttagaagccctggggagttaagagagtggctaatagtgcagagggagagagattgaagggttaggtaagtgctgttgatctggacctgctatcccagtgagcatgactagtggtggtacttagagccggaccacctttatgactttggcattaatcagaaatttacagcttaagtttttaggaattttatttgtaaagaaaaatcagtgacagcaatggaatacattttaaaggcaaaatgtttctaagtcccctttgcaagatcatacctctttttgaaatgggaaggatatgtgtactacctagagaatcatttcaaaagttattcatatagtatagtctacaattttagtacagcattaactcaatcaaaatactttttgtccttttagctgagggaatttgctaactttgattttgatatctggcgcaaaaaatacatgcgatggatgaatcacaagaaatctcgagtgatggacttcttcaggagaattgataaagaccaggatgggaaaataacgcggcaggaatttattgatggaattctttcctcaagtaagttccaagacagatgactatgactgatacaatttttaaaggaaataagcacattttaaaagtgtgggtctggtaaacttgtgttacaataaagcattgtcttataagttgcctaggaagtcacgacccttaaaaaaatgtttttttggtaaaatttgtggctctggagtcaggaacactcactaactgtgtaatcacagatatgttgttccctccactgaggctgagaacttgttagaataataaagttaataatatatgattcttaaggtgttttctgtgtgtgtgtgtgtgtgtgtgtgtgtgtgtgtgtgtgtgtgttgcctggcatatgtgtaataggaagtcaataaattcaagtccctttttcattctaattcacattctgatctaactttgtcattagtaggaaattagaactctataaaacttcttaagatacttatcacctttttgtttgatggcccaatcatttgtatgtgatttccctgacagatgttactagatgtcattcttaaggtaaatttcatataatttattctttgactagcaattgacccatataaaattgccagtgttaaacattttcaacctaaaaaaacagcattttatatgattcacctaaatagtaattaaagataaattaagattatatataactcttcatttgctgtgatgtaaatcagttttttaaaaaaggattttaatatatttgatcactgatgatttaaccagctacactgagattgaaatgtgcaattgagaatgtcttgagaaagaactaacaagtcactacttaccattgttttcaaaattttagagtttccaaccagtcgcttggagatgagcgcagttgcagacatctttgacagagatggcgatggatatattgactactatgaatttgtagcagcccttcacccaaataaagatgcatataaacctatcacagatgccgacaaaatcgaagatgaggtactcattatcttcccattgcgtacaacactgatagtatgttctgccacgatatcatgcacaattcatacaaccattttattttcactctaattgttgtgtcaaagttttaaggattgtactatgtaatattgacattaaagtaaatatttcatcattgtttttggcaggtgacaaggcaggtagctaagtgtaaatgtgcaaagcgatttcaagttgagcagattggtgataataaatacagggtaagttttcaaagtaatgttgtagttcctttaaaggacataaattgaaatctgtatacaatttgatctccattgttttccaggagtcttatttatttacttttttacctcatgtcaaaatttaat

SEQ ID NO: 36446 - DNA, 2300 bp, Homo sapien
tgttgtttcaatgtagtgaaaagtataaatgcgtcaaggttgccctgagagagcaaacagagatgaatatatgatgaggagcttgggactgatgacctagaaaaatagaactcttaaattttactttcttaaagtgatataacttgagggtatctcaatttaggaagtctgtgctgcctttgaagctaaagaagaaacatataagagtctgatgcagaaaggccagcagatgcttgcaagatgcccaaaatctgcagagacaaatattgaccaagacataaataacttgaaagaaaaatgggaatcggtggaaaccaaactcaatgaaaggaaagtatgtgctttgattaatataatagaatcagtgttttagttgtttcatgtcttggacttggccttatttctgagtagagctatcaggagtagaactttcaatgatttatgtttaaacattttttgtatatatttggagatttcatggggtagttgaaaataatattctgttttaacatgagaacatatttaaaggggtgggatatattcaaaaatagataaatatatagatcaaatgttacttagttatatttttaaatgttaagaactactcaaattctgggtcattaaataattaattctattttaatctaattaaacaaaagactatatatatgggtgagggagagagggaaagcaagagagtgagatgattgtgtatattcttttaagtacttacatttaaaaattcatgagaatggattaaaatgtatattaaattatgaatatgtctttgttacttttttaaaaccgcaaaactgacaatctaagaaatctcaatattgcatgaaaaaaacaataggcaagaaatacaagattatatgccatcactgatggagcataaagtatgtatttcataatattttgagtccccaaattaattgtatgaatgtcaacttttctttttacagattatatttagtaattgtgttctttggttaatttccaaaaaacatgctttagcgtatattaatttttttttagttacagtgagatgctgcttactaggcttaaagggttttggtttgccagtattttagtgaggcccattacatttataagatatttagttaatatattaatagatatgcataaataaagtggggataggaaaggaatctgccagagaatatttaaactgaaacaaacaaaataaccaaggcccttaaacatcacatactaaacaatctgtccttgcagactaaactggaagaggctctcaacttggcaatggagttccacaattctctccaagacttcatcaactggcttactcaggctgaacagaccctaaatgtagcttctcggccaagtctcatcttggacacagtcttatttcaaattgacgaacacaaggtatgtagtgagtcaaatagataggattctcttttcagacaccaggcttttttttttttttttgagactgagtctcactcctctgtcgtccaggactgtggtggtgtgatcttggcttacttcaacctctgcctcccggttcaagcgattcttgtgcctcagcctccccacaggtagctaggattataggtgcccaccagcatgcctggctaatttttgtatttttagtagagatggggtttcagcatgtttgccaggctagtcttgaactcctgacctcaagtgatccacccacctcagcctccaaaagtgctgatcacaggcgtgagccactgcacccggctgacagcaggcctttttaaagtcaaaagcatgcatttggtatttcgaaagctttcgtttgtcctttaaaataatttcaggtttatgacaccagaagcatttttaagattgatctgattttcatttgtttctacttatttcctttttttctgggaaaggtttttgccaatgaagtaaattctcatcgtgagcagataatagagctggacaaaactggaacccacctaaaatattttagtcagaaacaagatgttgttctaatcaagaatctacttatcagtgtacaaagtcgatgggaaaaagtggttcaacggttggtagagagaggaagatctttggatgatgcaaggaagagagccaagcaggtaataaccctttagaaaaattctctgaacttgtcaataaaccacttcttgctgttgaaatatatgttatggatgtacttttatcacaggctgtattaggcataacaatcatggcatggtgccatggtggttctttcctaaaagggctgtggcctcagtttggatgctgacatcactttttga

SEQ ID NO: 36447 - DNA, 2300 bp, Homo sapien
tgtgccattgtgtcttttgacactactaaagtggggccaatttgggaaaatagtgtcttcagagggttgatatgtacctgagactgaccacatgatagtttttgtgcccctgatagcaatggtcgggtatgaagtatttaataccactttgagtagtaatcagccagccatgacttgagatgacatgtgggaaggatcctagagcatggcgtactgttaaggtttctcccctctggaactttaaaaagaagaggatggattatgttaattacgttattttaaaactcaaagaaattttttaaaattttacattaattttttttaatttataaaaaagacaacattttaaatttctctttctgtacctggcttatttcacttagcatggctgctaataatgtactgtatatttcaaagttgctaaaagaatagattttaaaggtcctcaccacaaaaaaatgatgagtaggtgaggtgatggatatgtcaatcagattgatttaatcattccacaatgtatacatacatcaaagcattgaattgcaccccataaattcaattattattcatcaattaaaaatggaaaaaaacaaaaaattccacatttaccctcaattttttttttgtatttaagacttactgcttactttaatttctacatttaatactatctccctagaagtttttgaaaacttcagcatattgggaaattataccaattagaaatagatttagaggtaaggattaaggacacataactggaaacacattgcatttgtgcgatttttgcataatacagtgtctaccattcacaatttaaagttaactcccagagtcatgatgcttagccaacaaaacctattaattgattttgcttttttaattgctagaagctttattattaaaatgtatcaaagtaattagttctccttgctgccaaagcacctgttgtactttgattatatcatgactttagtatataaaaacctgtgccaacacagtttgtatgtcttacccttctctttaaacaagttcctcttaccttctgccttggtggtcctgatctcaaaatactcttttagctttttacttctgggtaactgtcaaatctttactccttaattagcagtcaggatcattaaggaagcagtgaagcatagtgtttcatacacttacgccttcctcattgctggtagcacagtgcctgtgcacagcagttgctcatgagccatttgtttgattagattagagcaaggtaaaaggctaattatagcaaacatttcatttcaggtgctttgaaatgtttaattagaatcaaattgaattttgtttctggtgctaaatcctgaaatattagtcttatttagccagctttggagatttctgacatcttctaccctctcttcctgttgccaatgatgtgtaaaagctgttttagtttgcagcctcacacagattttaggagccagttccacctagtaaaaggagccaagagcctctcgttttagccttgttaacttgtgaacttgggctgagtcttaacttccttgtctataatggattgtttaacgtgggaaagggttttgaaaacagtaatgatttataggaaccttttgtatcttgacaggacagatagttgttgaatgtttaaggcagtcttatttcattccgataatggagattttgcacttttttcatgattcattggagttatcctaagtggcaccttctaccgtattattctatattaaaaaattagtaatgagtttagtggccttaccaatattagttttgtctactgtgaaaagcccctgccacagtgtctgacccaatagtaataaatcattaaacaaatgagttacctttaaaatctcgcttttcagatcctttcatatgtgcatacatacaaaatacatttttgtcatacttcaaatgtacttagaatacattgtactttatattcatacaattattcccttgcttttttatatttaatgttttgtctcaagcttctccagagattgttggatgaccgaaaatctacggtggaggtaatcaaacgagaaggagaaaaaattgctacaacagcagagcccgcagataaagtgaagattttgaaacagctcagtctcttggatagcagatgggaggcattgcttaataaagctgaaacaaggtaacttatatacttccagttcttttgaaagagtagcagtggcctctgtctacaaaactgacattttgtattttgttaatacttcaaatcatgattttcctatgtttatcatgtatgtgaacag

SEQ ID NO: 36448 - DNA, 2300 bp, Homo sapien
gagcatgcctgcccggcaccgtgctgccctgaggagccgcggacagccccggagctcccttccggagttctttctgctgcctccaccgccaccgtctctctctagccccagctgaaatgaaggccataccgcggccacagaacttggttcagtttcaaaggctaatgtagtccctgggttttctgctcaatgtgaattacgctgcctgtgccttagaggaagccgcggagctcttcgttgctgcaattgcctcaggtggaataagccttcctaaggaggaccagataagaatctttggaaatggctttttttttttttttttttttttttttaaagaagcttagtagtacaccatgctttctgtttactttaaacggttgctggattgtactgccctgggtgtctaaaagtctggtgtttttttctttcttcctttgagtagttctgaatagcattgaagaagcttaaaacaggaagaaaacctgccttttcaatcaagtttatttatagctactcccccctccaaaaaaaaaaagtaaaagaaaaatgtaactttctcataacgttagacttaacttatttttctctgaagatttgttctgtgccttgatgtgaacaataccaggtccctgtgtttgtcttttaaatttctggagcatggtttatttaccagaatggtggagttctgcaagccatctttaagtggattacagttaaccagagctctgccgaaattaacattcaggctgttaaaatgcttgctcatttggaaattttaatctggaaatatcagactaaaaagggaaatggactgacaatggaatgttctgagtgtttgagccactgttaagtgtgtgtttgtttattttctgtgttttggagtgtgtgaacggggactttgggagctgggaaaggtggacaaaggagatttttgttctctgttattgatgcactttattgtttagaatcatcctaaaatcaaccaggtaaaaggatagttgcatttatactgatgcactgctgatgaccttaaacacctcatgtattatgaaatatattatttgagcatgtgtctttatgctaaagacactccatagctctgttcagaagtatacttttttggaagatgctttatcttatttcttatctgtgtcaagagctgcaatatttgttttaactatctgcaaaatggggaagccactcagcagaccagactgtttacgtcagaatcccccatgtgtagggaagggtgaagaagaggaggacctaaatatcgaagactgttacgtcccacagcggtcaatctatgatactgttagactaaatgaacagatagactctggttcaaaaggtagtctatcttccaggcattttacagatcgaactttaccctacagtcacagaacactggatgttagttctttatgctctaatggtgcccttacttcttccagtgtatttgagctgagaggtcgggaagctaacaaactagatgaaaagatgatctttgatgcactcaaactaaatagtgatatcattcgaaccacaggattacctaaagccaaatctcatgcggaaaagaaagagcatagacggtcatggcgaatgtttgtcccggccaattttatggattatgcaaacaaaagtgaaagctcttttgttgaacctgctgatatgtcagatgctgttaccaaggccagcaagtgcagatggggtactaattctctcacttcggaggaggatgactctggtttatgtagccctccagcagagagggaagaaaaacagggcattttaactggagaccagtcacgaattaaaagtttgtcttctactgaagatattcttgtaacagaccaatacagaccatttttttctgttaattccattagcgaacagaaaatcccactgctttcatgtcaaagtgcccaccctgatgaaaatttcaaaatgattttacatgatgtttctccactagaggaagcaaaacatgtaaatggtcaaagggaaatccacgatgaaaattgttgcctgcagaataatttgaaagagagccctgtgaagtgtgacccattaattatgccaagaaatagagaaaatgagcatatttttaaccttggagaagaggacgaaacatacggacctggagaatcccaaatcacagcacaaagtagggaactcttgaaggattcccctcaagatttagatctctctcacacagatctaggggagagtgatgtagattgtggtagcaccagcttagtagaaaatgtgacacttttgacacaatatgattcagg

SEQ ID NO: 36449 - DNA, 2300 bp, Homo sapien
gaattcacttcatcagaaagccctgatgaagaaagacacattttgttgttaagtttgttctgtttgaaaagtttctagtttcttgcacctagtagatactcaagttatgctttttaattgattggatttactgatcacagcaactgtttcagacttattcctttatttgacatgacattaacaatagtaaatatcagctattatcattattattcttaatggtatgaacagttatgtgataggtattaaactaaaagctttacatgtactgtaatttaatctgtatacctactattaatattgtcaatttacagtgggagaaattaggcttaaaggtttaatcatttgcctggggtcttccaactctgaagaggttaaaccaagatacaaactcatgtagtttttatgtgctacattatgttgcctccataatatgtaaaagtcatagacgtggccaggagcggtggctcacacctgtaatcccagcactttgggaggccgaggccggcggatcacgaggtcaggagatcgagaccatcctggctaacacggtgaaaccctgtctctactaaaaatacaaaaaattagccgggcgtggtggcgggtgcctgtagtcccagctactcaggaggctgaggcaggagaatggtgtgaacccaggaggaggagcttgcagtgagctgagatagcgcctcaacactccagtctgggtgacagagcgagactctgcctcaaaaaaaaaaaaaaaaaaaaaaaaaaaaagtcatagacgcgaaaaagtcatatttaataagagatggattatttatcaacataattaagaactttgccatcatcacttctccatactggaatagagaagacaccagcacagcaggcgatgtgtggcatggccactccctgcaccttgatgcatttttacttatttccttattctttgttttcccctctcatctgtatcctgcatcttttcttgattgtgtattttcttctgcctacttcttgcttcttttcccctttgtcaataacttaagttcacttgtagttcttatagtcaatgctaaaagcccttgcttttcaacaattctatatattcattcagagatttttattttggcttttcatagattaaattaacattttgatgtaaaataaacatatcttgtaattttatttctagagaatcatgtccagcaccttcagtcggcctgtgcaagctctcatcaatttcagcaaatgtctagagattttcaggcttggctggatacaaagaaagaagagcaaaacaaatctcatccaatatctgccaaactcgatgtcttggagtcattaattaaagatcataaagactttagtaaaactttgaccgctcagtctcatatgtatgaaaaaaccattgcagaaggtgaaaatctgttattaaaaacacaagggtctgagaaggcagccttacagttacagcttaatacaattaaaaccaattgggatacatttaataagcaggtgaaagaaagagaaaacaagttaaaagagtcattggaaaaagcccttaagtataaagagcaagtagagactctctggccatggatagacaaatgccaaaacaacctggaggaaataaaattttgcttggatcctgctgaaggagagaattctattgccaagttaaagtctctgcagaaggaaatggaccaacactttggtatggtagaattactgaacaacacagccaatagcttgctcagtgtctgtgagatagataaagaagttgttacagatgagaataagtcactgatccagaaggtggacatggtcactgaacaacttcacagtaagaaattctgtctggagaacatgactcagaagtttaaagaatttcaagaagtttccaaagaatctaaaaggcagcttcagtgtgcaaaggagcagctagatatccatgattcgctgggatcccaggcttacagtaacaaatacctgaccatgttgcaaactcagcagaaatcacttcaggccttgaagcatcaggtagatttggctaaaagacttgcacaggaccttgtggtagaggcctcagactcaaagggaacctctgatgttttattacaagtggaaaccatagctcaagagcatagtacactaagtcagcaggttgatgaaaagtgttctttcttagaaaccaagcttcagggcattgggcatttccagaataccattcgagaaatgttttctcagttcgcagagtttgatgatgaactggatagcatggctccagtggggagagatgcagaaacattgca

SEQ ID NO: 36450 - DNA, 2300 bp, Homo sapien
tcaaacaccagtttcattttttttcttttagattctaagtggcaagaactcaatcaattaacaattgatagacaacaaaaactggaagaatcctccaataatctaacccagttccagactgtagaggcccaattgaaacagtggcttgtggaaaaagaacttatggtcagtgttcttgggcccttgtcaattgacccaaatatgctaaacacacaaaggcagcaggtgcaggtgagtattacctaataacctgtctctcgtgcatagcaatttgacttactgagaccaatgttttcattataaatatattaactttggtcagtaggtgttttatttaactgctttgaagtatatatgtaatgtttcagatgcccataagatactgtcctgatattagtgggaatccccaaagaactaaagctataaggcatcttagaggcctcctttgaatcccatgaatgggccaagtctcctgattatttcagtcatattgtgggtggtacagatctggttaaaagggccttctttgaagtattaatgcaattaagtaatatctttatgagaggctagtctatactttttactgtttagaaattactcctttgaggttttatttattttgattgtggtagtagataatgaaacttgtaaaactcatgcatttgagtcctgatggaggagagagagaatgagaagaggacaaagaataagggaagcagagagggaaccctgaaacccagggtgttagttagactagtctagttacaaagcagataaatccacaagggaaaaaaatccaaaaaaatgagttttatttttaatgtttaatgttttacagtcaggcataatagcagaagctctgtggtgatttcagttagttttttaatgtctgagtactggctttagagcagggaggctgttttataagctgaaaattcaaataagtttttgtaaaagtcagatgtttgaattcatatctgttcataatccaaagacaatgaaaacaaaagataaaagtaaatatctggggagaaataattgcctctagtcttggtagtctcccagagatagatagataaataaaatatagataaaagtataaaagatagataaaatatgatactaaaagaatgagatttttggatcattaattttatgagtcaagttgagcctatacattctgagcagcatgatttgttgactaaaacctttataataaagactgtaaacatcaataaattttatgttacaaaaacctttgcaactcaatgcatcatgagttaatatattctaacacctttatcactgtgcattttctttaatataaaattctatagggtattccaaaaatcctacgaagacaaaaacatgagtgggtaaaaacaaatttggtgtaagtgcagtgtgaacttgtttaacagcagtgtttctctttttatatgaaaatttacacatgaatttttgttcattttgtccatatttttcctttagggggatgggattagtttagacaggatatctctgtgaagcactgtggctcttcggatttaagagaattgtactgccctttaagtaaaaagtaggaaagtgataactaaaaaacaaaaactggagaaataattaccatttctgtctgtttggacaccaaatctgtgttttctacaatcaattatataataatttgcgtttgtttacccttgttaccttagattttgctgcaagaattcgccactcggaaacctcaatatgaacagctgacagcagctggtcagggcattctgagcaggcctggagaagacccttctttacgtgggattgtgaaagagcaactggcagctgtgacccaaaaatgggatagcctaacagggcaattgagtgacagatgtgactggattgaccaagccattgttaaaagcacacagtatcaaagcctgctgagaagcctttctgataaactgagtgacttggataataaactcagcagcagtctggctgtgagcacgcaccctgatgctatgaaccaacagttggaaacagcccaaaaaatgaagcaggagatacagcaggaaaagaagcagataaaagtggcccaggcactctgtgaggatttgtcagcactggttaaagaagagtacttgaaagcagaacttagtaggcaactagaaggcatcttaaaatcatttaaggatgttgaacagaaagcaggtttgtctacttttaatacatatatttcctggtcagaaataaatgtcatatattgcctatttccaagatgttgccaataatccaggaccccaaag

SEQ ID NO: 36451 - DNA, 2300 bp, Homo sapien
gagcccaggagtttgagaccagcctgtgcaatgtggcaaaaccctggctctacaaaaaatacaaaaaaattagctgggcatggtggcatgcacctgtggttctagctaattgggaggctcaggtgggaggatcacctgagcttgtgaggtcaaggcttcagtgagccaagactgtaccagtgcactccagcctgggcaacagagtgagacgctgcccccccaaccaaaaaaaaaaaaaaaaaagaaaaagtaaattccgctaattacctaggctcaaaatctttggacacttctactcttgtctcctcttgtcctttgttcctgccctctccagcagtgctgtctactagaacattctgtaattatgaaatttatttttttaaatttttatttatttatttatttatttattttaagaaagtaggaatatcactctgtcacccaggctggaattaacagtagcatgatcatagcccactgcagcctcaaattcctgggctcatgcggtcttcctgactcagctcctgagtaattgagactacaggcacagactaccgtgcccggctaattttttaatttttttttgtaaagacaaggtctcactttattacccaggctggtcttgaactcctggcctcaagtgatcctcccaagttggcctcccaaaaagcgttgggattacaagtgagccaccgcaccagctggaaatactttacttatattttgctctgttcaattggtagccactagccacagtgactacttagcacttgaaatgtggctactgtaaccaaggaatggaatttttaattgtttaaaatttcaattaatttaaattttaaaagctacctgtagttggtagctaccatagtggcagcacagctttgcatagtgttaccaagtcctttggactcttcccaactctaactaattccaccttctcagtccaaacagaccgaacggtggaattgtcttcagcccttggccttcagtagtcctcactgctttgttactgctgaagttgtccccagctggtatctctcctttatttcgtttccattggacttttcccatgcagtgctacaaatttagccttcctataggacagccctgagcatctcaaccccttacccaaaagccctgcataactccccattgctatgggataaaatgtaaactccttagcctgatgtttgaagcctttccaggcctatttctatttactcacccataagcattgtcaaactggatgggactctccccttctcctgtgattcttctgtcctcatctttgtgtcttctgtttgttctgcagggagtggttctcccaaatccacactttcttaaggagccatctcagtgtcattaccattgaggtggccctcatttccctcccatttttttcctgttaacttccagcagcattttttcagactcacctgtggcacttaccacttcctgcctcgaaccataaaatccctgaaagtaagctttgtgtctgtttttatttttgtatattcacaaaatgtagcaaggctttttgaatttgttagatgttcagtaacttttattgaattaacagaaataaacatgactcagtattgagtcaggatctactgatttgggcgagcttatttatctcctttcctggagtcagaagtggtctcaaattttggttgttgtttgttttagtagtagttggggtattgtacaaagcctagaagtaggggttaagggtataaagttagagggttgtatgatcaggaaccagggaaattattatgaacatatgctcaaaggtttatttcaaaacttaatttgtgttatccagactggctgatgcttttgctaatgctgctttataactggccttattcgaagaactctggagtaagttgatgatgaaagttggtatgatgaaaagtttattctgtccaattttactttatcttattagaaatcattttttccacattagaaatctattatttagtcctgctgagtataattgaaaagcgtttaatcctacaggctttgcaaggacagatatcaagtcagcaggttgctgtagagaaactgaagaaaacggctgaagtgcttttagatgccaggggatctttacttccagccaagaatgatatccagaaaacacttggtaagatattcatgtccttgcttcctgtctcacaggtaaattctaaagaaaggtgtcctaatagatatggagaaaaatgttcactagttatagattgtgttctatgtgctctttctctgtgaaatggtgttcctgcatctgggaa

SEQ ID NO: 36452 - DNA, 2300 bp, Homo sapien
acacatatcaaatatgttaacctacaaatcacaactaacttctcttttgatgtccttttgcagaattaattctatgtgtcgcaggtttcaacagcttaagaaaatgggatgtttcttcctgttggtcagaagttccatctcttacaaatatgcatggccagtattctcttgagcagtttcatctaaacatgatcactttctttgtatatgggatatgctcatattttctgtctcaccttgctcagtttgtaccctactgctatcatgtttacagcatacttataaaagcttattagacaaaacttggaaaatgtgttctaataagaagctatcacaatagcgattttgtgaccaccatacatttaagatgttttgggttttcttcactttagattgtagcagagcgtcagcaggagtataaagagaaactccaagggatatgtgatcttcttacccaaactgaaaaccgcctaattggtcaccaagaagccttcatgattggagatggcacagttgagttaaagaaatatcagtccaagcaagaggtagaatttggttttctatcagcagatctatgttgatgttatgttcgattactatcatttggaagtcagtgaagattattgaaaataccagtaattttagctttttagaagcaaggcatacccaagacgccctgggcttgagctttaaactttatactaaaagttagatttccaacttcaagcaagctaggtaatttttttgactttttttggtaagagatattgagtggaggaaatattaaaggggatttgataatgaaaataccttgtgtgatgaattagaatttggattcatttaaggccaacctacttactacttgcaaatcagaggaaatagccatcactttgggttctttctctttcttagctccttcttactccttctttcttgtgatttgttcctttttattgaaggaaagggcaaaaataacagtaacaacagataaagatatctttattttggtgtcaggacagagaacattttcattgtaagtagatagctcctggttcagattccagactctatacattgttagctttataacagtctgtcacagcctcagtttcttcataggtcacactttgttacattattataaaagttaagtaaatattgtgtaagtcactagcacagttaaggtcacatagtcatggctcaattaataggatttctttcaattcaaatacttctaagacaaatttgaagaagattaaaataaagtatggaaaaaataatattaaaactcagtatcatatagagaatgaaaatgcatgataaaggaggaaaagaagaggaaaaactacatggaaaaatctagacataggaaagctataactactaaggagagatcttaatcttgaggtacctagcagctaggcaaagaagcaaacattacatattacagattctggtgtttagaaaaggaaagtatcttagttcactgggaaaattagttcatttttatcctgagtgataaacacattaaaaaataaaagtttagaaacaataaatattagcatatatttacaagcctttgtacatgtgctcatataatattaaaaaatctggtgtgtgcaaatttatatagatcatatactgaatacttatgtgttttcagtgtttcactgactgcattctttcgttaaacatgaaaattcatgcttttctttaatattgtttgagtttcaaattatattaagtattgtgattgaaactcaaattaacatactcaatatgtttattcaagctacatatactagactctctctgtactcactctgtcttttagaattacaactctggaagaactaaataggtaataatttaataaaatatattttttccttttgtgttataaggaattacagaaagatatgcaaggaagtgcacaggcattggctgaagtagtgaaaaacacagagaacttcttaaaagagaatggtgaaaagctgtcacaggaagataaggctttgattgaacagaaacttaatgaagctaagataaagtgtgaacagcttaatttaaaagcagaacagtctaaaaaggagctggataaagttgtgacaacagcaatcaaggaagaaactgaaaaggtccttattcaaatatgtggtgcactattgctatgtcaaaaagcttaacagctacttgatttattattaatatccagtggtagtaaataaggattatcactaaggattattatgggattctgggtttccaggtacataattgaccaagtactacaaaaggtt

SEQ ID NO: 36453 - DNA, 2300 bp, Homo sapien
gaactcccatttacaaaaccgtcagatctcttgagacttattcattaccatgagaacagtatgggggaaatcgcccccgtgattcagttatctccacctggccccacacttgacacatgaggattattacaattcaagatgagatttgggtggggacacaggcaaaccatattacagggtaaggcctgtgtggccagacacacctctccagcccccttgctctctgcacagtagccacactggctgccttacacctaaacattctcagatctcagctccaacattattttctcgagaaactttccatggttccctaggctagttcagatatcttgcttagaactctcatgtttccatgtattgttccttcatagtgcttatcttggttgtatttttatatttatttcggtgattgcttaagtcttgcctattccacagatatgagctccaagaatgtggagagaaacccttgttttttttctgtcccttgcgttgccagtgctttacacagcgcctgacacaacattagaggtgctcagtattgtcatgttctctgtgccttacacattgacttcaggattcaacgttgtgaaataatgcataaaataaatatatgagagcatgtctaacctgtcagtcctttattaaattactgattacatttatgttaaagtataataatatgtgtacataactggattattaaaaccaaaacaagccataaatatacaggatgcagcttttacggaaaaggtaatttgagtgattgaaatgagatactatgttaatcatttgaaataatggaaaagtattccagaggatacagagtagatttttagtcatcagaacagtagctgaattttaagatatgttcataaaagaaagcagagagtggttgagagttcagggcctagaagccactcaattttaaattagattattagctcagcctgcaaagttgtatgatgttagacaagttctttaaccgtctaagcctcagtttcttcatttgtaaacaggatgtaatagtgcctactacattgggtggttatgagtatgagatgagttatgtatctaaaatgattaatttcttgcacataataattacttaataaatgccaggtgccactgttattgttttgagctattctgttcactcactatatttgatgtggcactctcacacttgatcttagccaaaaggccaagaagcaattggtgtggcactctcaaatttcccctttcttgacccctgaaaagaaaaatatctattcttagagtggagaagtaacagtattattggaggtaggaaaatatttaggaggctggttggataaatgccttcatgtttcttcatgcgaattttttggcattgtctatgtattgcgagtaatagctatgtggcatggaagtgtatgaaaaacaaatgggaaagagccagtgttcttatgccatgtaatatcctatagaatggaaaaacaagcacagacaaattaaatttgtaagcattgcatcagtattctacttggcactttatagtaggtttagaagtaacattactgggagcgtgtcatataaagaaaggtaaatggatactttttccattaatttaacctaataaacaaatgacatggtggttaaaatggaagcgtactttgcttctcatcaaattcatttgtttataggtacttcataatttctagctgtttgccttccttacattattcagcacagacctggtcttttgcagaagtcagactatgattggatatttgtgttcttttagctaatgattggtattgccagaataatctttactagttgtcctggacatctgtgaggcatctgagttgttttttaggtggttgcaattggatgactcttagtgcaaatatttggcatatcctttccagtgacgcccaatctgcctgctttgttcatacttgtagggttttaatacaagctacaaaaggcaaacctcagctagcaaacgaatggctttaggctagattcttttgaatagttatcagcatattatttgctgtgtgttgcatatgcatgttgaagcatatttaaggagccactaaaagctgtaatattcagctgccacttttcaccgttagaagtagagctttttccagacctcctaccttttagtctactttgaaaggtgaaagaaagaacatcgtttcaggaataaaaatgcacagtagtagttatagttaccgtagcagtgattctgtgtttagtaacactaccagcactcgaaccagtcttgattcaaatgaaaatcttctctt

SEQ ID NO: 36454 - DNA, 2300 bp, Homo sapien
caggctgtttcaaacaactaactctttttttttttttttttttttgagagggagtctcgctctgtcgcccagactggagtgcagcggtgcaatcttggctcactgcaacctccacctcctgggttcaagtgactctcctgtctcagcctcccaagtagctgggattatgggcacgcatcaccacatctggctaatttttctatttttattagaggcagggttttaccatgttggccaggctggtcttgaacttctgacctcaggtgatccacctgcctcggcctcccaaagtgctgggattacaggcatgaactgccgttgctggcctcaaacaactaactcttaagtgggtaagaactcattactgtggggatggccgaaagccgttcatgagggagccgcccctgtgacccagacaccccccactaggcccatctccaacattgggagtcacattttcaacatggaatttggaggggacaaatatctaaacttcatcagcagagatggagggaaggattgggggagtgcagatcactggttgcccctccatcatgttagtacaaatatcagccattatacatttatagtctcttgaataatgtaccactcattacctttgaatacactgaaaatcaagttaaaaacaaaaaaaaatctgggaccttatttttaccagcttctcttctgggatgttcagtttttgctaccggagaatgtttttaaatgattaaggaaaattttacaatgcaggatctgttattgacaaacatctacagtatcattgctaacttgactaactgagtattcttacttagtaaaatataatgagttccatcttttgatcagtctaaagactacctagtgaaaggcaattattaatttttttagtagtgaaatgatttgtacttatgtgtaaatccatttcatgctattctaatttttttttttttttaccatatctatgactcagtgttagaaatatgcacaccttagataatcaagtctcatactgattcattatttttccagcaaggccctcataaaaactgtataatatttaactagggtatgattataaaagttacatataaagtttaactacatatatatatatgtatatatatatatatgaatgcacatatatttccttttgctaaatctttcatgctttaaattatataatttatctatttggtatcacattaaagtcctaataattagataaggtcatggcttggaaatttatattatttgaaaagtattataaactattttaaaagattgattttttttagaaacaattttattagagaattataagcatttagcacttatctctcctgctagctattgaatcagcttattattttttatgacttgttttgaataagagtcttaataaaatttacagagatctttgagcttttgatgtgtttgtgtgcaagtaccaaaattagttggtatttcttaagaaaaaaaaatatatggtagagggtagagagtctctgaaattcaatttgaaaggcactttgaatccaaatttgaagggcactttcctaaatctctcctgactggtgtttgctttctttttgctctcattcgttgaaccaccaaatagtttcaaaggttaagtgcaaacttcattagtgtatctgcatttcagaaaaccgaaggttaaaaacagtcataatcttctcatacagtgaagctaagggtttgccttgagagctcatcagtgttgtaatttgacagtgagcagtaatgtttgtctaagaggattggtggccagaaataagccacagtgtctaatgagacacggaccggctgggcaggatgccacggcatttcttgtgtgtgcctttctcataagcaaaatggcctcagactgaagaggatggtcataaagtctgtgtggaacagatgtcagagtggaattttcagacttaatggagaggatctaagtaagctctggattttgaaatgagtgaatctatggagctgtgatctcctacaaatcaaatggggaatgtctgtggatgtgtaagagctgagaaagaagaacaatatgtagatcctgccaaaactcctttgaaccctgaaaaatactctcctggaagaaaatatttcagaagaaaaccgatcaaaaaaactggaggtgacaaagagtcagttggggcaaacaatgaaaatgaaggcaagaagaagagcagcagtcagccttcaaaagaacagccagctcctttatccaggggactggtacagcaggaatctgttaccctaaactctgcactgggaga

SEQ ID NO: 36455 - DNA, 2300 bp, Homo sapien
aattgctttttcttttttgtcaaagatcactttactaaatttgtgtgggtctatttctgggccctctgttatgttcctttggtcgacttgacttttcttttgccaaaaccacactgtttcgacaactgtagctttataataggtattgaaattgggtagtattagtcattcaacttgttattttctgggattgtgttgtctattctaggttggaataattttttataccttagaaataagcacttggtaaatattctgtgttgagaaactttttctcggtacacaatggttacctttttaaacacaagtcagatctgttattcttttgcctcagctccctccagtggcttcctattttagtgagaatcaaattgaaggtcttcgaaatggcttatatggtcctgtggtacctggctcttctgttacctctttagcttcatcttttaatactttttgtcttggtctctttatttcatacctaatggcctccttgctcttgtttgagtacaccaggcatatcctgtcttaggtctgtagcagtggctgttggctttatctgaatgtctttcttccagatatctgtatggctaactccttcatctcttttaagtcttattcagatgccccccttctcaatggggactctctgatcattttatttaaaattccatcttgcctctcacttgtccctcaacctccacaccctcaatttctcttaacctgctctgttttatttcacagccatcactatgaacatcctctaatacttatttgttttatttatttatttatttatttatttatttatttatttatttgagacagggtcttgctctgtcacccaggcaagtacagtcgtgcgataccagctcactgcaacttccgcctcttgggttcaagcaattctcgtatctcagcttcccgagtagctaggattacagatgtgcaacaccatgccacgctaatttttgtatttttagtagagatgggatttcgccatgttggtcaggctggtcttgaatgcctgacctcaagtgatctgcccactttggcctcccaaagtgttgggattacagatgtaagccatcactccctgccacttgttatttttattattattgattgctgtttctctttttgttagaatttaattccacattgtcagggctctttgttttgtttaccagtgtatcttcaactcataaagcatagtaggttttcaataaatattagttttaaaaaatgtatgaatgtgtaagttgagactgatagagcattagctgtgtgcaagaatgctgattcattagatcttacctgatctttagctgatgaccttctaagatgaactgaaaactgaaaccaagccaaagaaatgtttttagaaaattcattgattttttttgacaagctgcagctgcttgtggtggtataaataggtttccttactgtgttatttaagagtagcttaagggcatgagccaagtcaaaacagaaaaaaagcactgactcattagatttttaaagcatgggttgtccacttgtgtttctaggttaagagaattggggtttcccatataatcagaactattaaaggtactgcaaggctgtgtgcggtggctcatgcctgtaatcccagcactttgggagattgaggcgggtggatcacctgaggtcaggagttcgagaccagcctgaccaacacggtgaaaccccgactctactaaaagtgcaaaaattagctgggcatggtggcgcgtgcctgtaatcccagctacttgggaagctgaagcgggagaattgcttgaacctgggaggcggaggttgcagtgagtcgaaatcacgccactgcataccagcgtgggtggcagagcgagactgagtctcaaaaaggaaaaaaaaaaaaaaaagataccgcagcaattgcagagaaaggccttatatgtctgatgagaaactgcaagctttagaaagacagcagtgctatcttcccaaacaacatgatagccagcatgtcaaagccagatttcttttacccatctttgtatctcggcatctagcctggttagtacttggcatgcagtaggtgctcagaaactacttgttgaaagaatgcattgtcagtgaacagtggtcacattcatgatgtggaaatgtcatggacatgggagacattatactcatgtgttctcatgtgttcttgttttataagaacatgctttttatactgtatcatagaaattgtattaagcaaattgactttgacttgaagtctcaggcatgtaagctttctacaaaatgtg

SEQ ID NO: 36456 - DNA, 2300 bp, Homo sapien
gggtgtcagtctctgatgaaggctcagacgtgccttcaatgaccttactcattgtaaaggagacatttttgagagacctatgtctatacatgtgtggtctgtaaatgaatgactttcagggacttaattgctaacccttttatttcaagaaggtgtcccatatgatgcctggttgttactttatgaactaatgtgcatacaaatgcatatcgagctgtaagaaaactctagtaaccttaaagacttactgggacagtggttcaaactcagattataaaccagtggtcaggatagaaaaaagagatgtggtcttgctttgtttggagtaacagaagtaggccaattgctgaggagtgctccagttctatctcaagtcagtttttttttcccacgagtacacaattttttctttcaagaggaactcatccctatctaagcattaatggaaaatggtccatagttcacaacacccaacgctaacaaagaaataaaaaatcatggagggcaaaaggtcagtatatgtgaaaggaggaaatagggaaggaagatttagacaagacgtgaagttgacataggtcagactgtcaacaatcagctgatttatctaataatagcagtagcaatgaggtatcatcctgtcactgtactccagcctggatgacagagtgagaccccacctcctaaataaagtagtaggtgcagcagctaatccttatataacaccagacattattctaaacttcatttactatacaactttatgagttaggcactactatcgctgttttactgatgaagagagtctcagagaggataagtaacttgcccatgtgacacagtaaggagtgaagattctatgtacagcagcctgacttcactgttttttttttttttgagacggagtcttgctctgtcgcccaggctggaatacggtggcgtgatctcggctcactgcaacctccacctcccgggttcaagcagttctctgcctcaacctcccgagtagctgggattataggtacccgccaccacgcccggctaaattttgtatttttagtagagacgggatttcaccattttggccaggctggtcttgaactcctgacctcgtgatccacccgcctcggcctcccaaagtgctgggattacaggcgtgagacaccgcgcccggccagtcattactcttaaacacatccatttacatgcctgggtatcagttggttcctccaatggacgcttaaactcacccactttagtatatgatacacatatatctaatttaagggaactgtatccattttactcagtttaatggatactagtactatgtagaatgaataataaggagagagcaggagggaggtgataaatatggggcagttgtgaacctataggcccgccgcggagcccagcagcagatgcgcctgtgggctctggggggcagaagggagggaccgcaggctggtactcggcagcctcgcggcggccgggagctcaggcgcaggcgcggcccggctgtcaggcgctgatgcgcggggccacctgcagaggcctcctcaccctgtccccgggatgtcccctagacgcggacccccgtgccctccttgccctgtgctgtcacagagtgacctgaatcctcccacgccaaaaagatgggtggaagaaagtatttccaaccctccccccgatcatcccttacccagggagagccgctggcccctcagcagggggctgcgcacagcggtggagcgatctgcggctttgtttctcaggcacctgttgtggatcccaaatagaaacgtcgcccttggggatccgggaccgggcagccagtgtccgggggtgggcgtgcttggccgcacggtccaccagggtgggcgggcctggggagggggcctggggcgcgtggctctgcctgggagggaggggccgagaggcgccggggccggagctgagccagccggggcgctgaccgccgcgctcgccccctcccttccgccctccgccctccaccctccaccctccaccctccactctccaccctccaccctccaccctcctccctccctctctccccggcgcgggcgagtgtctgcggcgcggcggccaggaaatgccgcagatgcgccgcgcagcatccccggtgaaggcagcgcgccggtcctcccgcaccgctgccgcggcctcggcccggcccgaagcacgcgcctcgtgcagggccagcagagcggtcagcgcggccgcagagggtccgggcgcccgccggcccccgcccgccctcgccgcacgccccgctcctc

SEQ ID NO: 36457 - DNA, 2300 bp, Homo sapien
tatgaagtctttgccaacatgagtaaactgcaccaagcagcaacctccaagcctggcggcgtgcaactttcctaaaaagaggggaaattatcttaggataagtggaggttggcctgaaaactcctaaagaaatcctaggtcaaggagcgcttgtgtttcttcagtggagctggttcctgggtgcagtgattaggagttacttgccctagagggatggtccacgttttgagagtggagactagcacaagcatttaagcacacactaccatcatcgctttgcaaaaatcatcagatggtccccaataaaacatggagagctttaggagaaaacagaaatgtaaacttgaaaatcgaaaatgaaatgcatatggatcaaattgttctgcactaacctcttcgtttatccaagtgaacaaccagagtcaactgacagcacccagaaaacacttccaccagcaaaatataaactgtaaactcaagtgacatccaccctgtggctaagttttttaaggtctgcagcacttttagggtttgccttttcccctcttgtacaacagctccactacacaagaaatttgctaaaaccgttcgctgggcactaatatgaaatcacttaaaaggaaacatgccactttcggctaggggacagcatgttcgtcattcagtgtcctactggtttcttaacacgcatataattaatattggtactcaggaaagagaacttcttctgaccttgagcgtgcgcgctaaataaattacctcagaacgaaagtggtgcgatctcaaaacagcatctggggagaaaagagataaatgagacttcatttaactccttgttcttcacctaccgagtgactcatgacttacctgggagaccagggttgggaaagcacatcgcagactcctggaattcggtgggacatcctgggggagggaggaggagtcctggggccatcggtctctacgtgatttctccgcgagaagtttgcatgaaagttctgggggagttggggagccccgaagtttccatgccttactttcttacccctacgctccagcgaaggatgcgtgaaggcgaggctggcgcagccccggactacgctcaaattacccttaaggctttagcaaactgactaaaaatttgagttctttcctcccctccctgccctcggcatcgccgtggttattcaaacctgggagactggagggcggaggtgacggcaaaaagggcaaggggcgttaaagaaacgcactcagcctggggagtgggcaatgatggggctaggggcagccgaggagaagggagcgagccgcgcttcactctccaaatcggcttaattgttcctggtagcccgcagaaacccgtcgcggcgtgtcttacctcggcttcttgaacgacccgagaagaccgatttcatcggatgcctccctttctggagcttgcggtgccagcagcagaagaagacgatggtggcgatggtgcccagcagaagcaacaagaggaagagggcacattggatgctgtagggtctcagcaagacgaggaaagccgcggcgatcatggtgcgggcgaggcgagggcgactcgacggcggggctggagggcggcggcacaggcacccgcgctgggcgcacgccgggacggcgggcacgggtgagcgcggctcagcgcgtcatgcctggcgctcgcggccccgcgcccagcccaatggctgcgcaccccgcgccagccgcgctacgcgagtgatccagggctgcggggagcgcttgccatgactcagcagacagcgacgaggctgcgactcggcggctgggatcctctcccctccctccccaggcgcccccgcccccgtccgtgcgcagcccccgggcgcagccccgccggggacgcggcgagtggggaggagcagcgccgccgccgcggccgcccgggccccgcgcatcgtcctgcggccgccgccgacctcagcatcccagaagccgggcgcacgtgggtcggggcggggacgcggcgctcaggctgcagccgcggcagcctgcggggggcgggaatggggcgccgcggcgggggctcggctgatgacatcacggccaggctgcggcagcgcgggcgcgcggacatggctgcggcggtttcggcggcgtccgcgggctgcacccgggcctgagagcccagcgccctcccgcggggccgcccgccagtccgcgccgtccgcgggtgcattggccgggtgcctctagcttcccggacacccggagcttccgcctatccagcctccctcggccaaattgctgcggag

SEQ ID NO: 36458 - DNA, 2300 bp, Homo sapien
acccatgaagcctatcctggaattcagtgcagcctacatgctgccattcaaaattcccaccttatgcagtgtctccaagcaagggcccttctgagttcaatccaaaacaactgaatgaatgagatgcaacatgtcaacaattcgaatgtttattttgtttaaggaaaccagctgtaaacaaaacgtatctgttgttttccatgcttatgaatctggcactaagagactgcattaaccaatgcctttttaggtttaatacttacacacggtaatatgttactggctttaaggacatcaatgattaagctttcatgcagagctgtacggttttgtatagttggaaaacaacactgattttgagatcactacaagcaaataaaacttttattcctcccaattatttacctgcttttcaaatttttataaatttttatgacacaatttcttcagtctattaaatattccaaaaaagaggctaatacagttgttataagaaactccgcaaatgcagtcaagtgttaccttgtcactataattaaagttttcttatgcgagtaaatgaaacaaacaatccagccccacacagggaaagccagcattgccttgggggcagcagaacgcggcacagcaccgcccgccaaggccgcaagatgccgcagaatgactgctgcagcagccgcttcctggccaggtggccgtggccgtccgcagaaaggcacactgcagcgctctcgctataccttccgtgctggcattgcatcagtgttaaatcccctggccaccaactgccatatactttttgctggttatgaagaaacgtggggaggggacaaaggggagacagagtgtgcctgcaagtgtgagagatcactattgcctcacactccctaaaaaatttctcccccaaatgtttataagccaagtaccaacttacttcatctgccaggtccctaaatctgaaatcgccttgcccttcaaatgcactaaatgagtcagggttttagggcaaacccagggatacaagaagatcgaaagtgcccaattcttagctgcgagataagcaccaagtttggggtggaagagttcacctctgccgaccagagcgtactaccccggagcgctcctagtttagagaggcttggagaggagtgggcctcccgttcctggagtatcccaattcccagggaaggcccttcccggcgctcgcgcttcagagtgcgaggaaacccccacaagcaatagctcacccggctgcattcttcaaagccccaacctcggggcggggcgcagggaggtgggaggtggagggtagcaccgccgggaggctcctgtcagcgcctctcggttttccccctggctccttggcgccccctgacgacgggctccgcagcaatttggccgagggaggctggataggcggaagctccgggtgtccgggaagctagaggcacccggccaatgcacccgcggacggcgcggactggcgggcggccccgcgggagggcgctgggctctcaggcccgggtgcagcccgcggacgccgccgaaaccgccgcagccatgtccgcgcgcccgcgctgccgcagcctggccgtgatgtcatcagccgagcccccgccgcggcgccccattcccgccccccgcaggctgccgcggctgcagcctgagcgccgcgtccccgccccgacccacgtgcgcccggcttctgggatgctgaggtcggcggcggccgcaggacgatgcgcggggcccgggcggccgcggcggcggcgctgctcctccccactcgccgcgtccccggcggggctgcgcccgggggctgcgcacggacgggggcgggggcgcctggggagggaggggagaggatcccagccgccgagtcgcagcctcgtcgctgtctgctgagtcatggcaagcgctccccgcagccctggatcactcgcgtagcgcggctggcgcggggtgcgcagccattgggctgggcgcggggccgcgagcgccaggcatgacgcgctgagccgcgctcacccgtgcccgccgtcccggcgtgcgcccagcgcgggtgcctgtgccgccgccctccagccccgccgtcgagtcgccctcgcctcgcccgcaccatgatcgccgcggctttcctcgtcttgctgagaccctacagcatccaatgtgccctcttcctcttgttgcttctgctgggcaccatcgccaccatcgtcttcttctgctgctggcaccgcaagctccagaaagggaggcatccgatgaaatcggtcttctcgggtcgttcaagaagccga

SEQ ID NO: 36459 - DNA, 2300 bp, Homo sapien
ctgtctcaaaaaaaaaaaaaaaaaaaagaaaaaaaaagaaaagaaaagaaaaagaaagaaagaaagaaaagaaaaagaaacattggaagcaacctaatttccaagtgagaaaaggagcatttaaagaagttacaggaccgggcatggtggctcacgcctgtaatcccagcaatttgggaggccgaggtgggcagatcacgtgaggtgaggagttcaagaccagcctggccaacatggtgaaagcccatttctactaaaaatacaaaaattagctggcatggtagtgcacacctgtagtcccagctacttgggaggctgaggccaaaggatcgcttgaacctgggaggcggaggttgcagtgaaccgagatcatgccactgcactccagcctgggtggcagaatgagactctgtctcaaaataagtaaataaataaataagttacagagcatgaatatattggatattagggaaaatagcccatcgacaggtgaatggatacattaattataaagtaatgaaatgttagcaataaaaaggaatgaattatggtacacacaacatgaatgtcttaaaatattatgcagagaaaaagagacaaaaaaaggagaatatactgtttgagttaatttatatggaattctagaacaagtaaaatttatctacagctaaagaagtcagattagtggttgcctctgtggtaagtccaaggattgatttagacaggatgtaaaggaacattctgggaggatggaaatgttctatatcttgattaggtgtgttttaaatgggcgcacccatttgtcaaacgcatcccctttacctatgtaatttctgctcagacttcatgtaaggttttgcctttaattgtatgtaaattaggccttacaaactcatattttccaagaagatttaataaaacaggcaaaatattcaccttaccattttaattgggaaaaaaagagccttgatacaatgcaatgtatacagcatggttctaattatgtaaaagaaaatacattaataaaaatagagatacacaggcagaaatgacaagaatgatgtatgccaatgaacatgtacaaacataatttgaaaaaaatagtaaatattcttgtagtcccacttcataccaaattccctttttcttcttacattctagatttggccttcattcagttcctcatatgaagaaggtgctattcctgtgcctctaacgaccccctcattctctacggcaatttaatccctgctcagccttaagttgtcagatgaatcttgacttcctcagagaagccctgcttgccccacccaagtcaagccctcccattccccatcctgggtcaagcacctgatgcttcttctttgtggcgtttaagaattgtgattttttattttttgcatatacctcaagtaaaccaaactgcaaagttaagggcagtgtcctccccactgccaagagtgcctaatacttctgacaccaactacacgttcaggagtttcccaaaaccaccctcatattcaataatttgctataatagaaaaactcacagaacatttgttacaaggaaaggatacaaattagaatcagcctaagaaagagggcagagtctgggaggtttccacatacgtgaggctttggttgtctcaggatgccttatgcccatagcatctatatgtgacaatacacataaagtattgtctatccaggaagctcaccagagctctactgtccaaactttttattggagcttcataatgtaggcatgattgatcggttgattgactgcacatgtggttgaactcagtctctaaatcatatggttggtctttctggatttcaagctgtggccagctgccaccctaaggctattgcatgacttggccccaccgtgagtcagctcattagcataaactatcaggcatggtcccaggagctcatgatgagtggcgaagatactcctgtcagtcaagaaattccaaggaacagttacttcccaggaactgggacaaaggccagatcattctttgagcagggcaaaattcttgctacacagcctggtttgtaaataagtctccccttcacccctcagactgtaagctccaaaacgacatggatcacatctggttttgctcccagttttatccctcacacctagcgtagtggttggcaaatactgagaatctgtgtaacatggacttgggaggcagccagtctgaatttgaatcttggctcttctcttcactaactatgtttgactctggacaaattactttacttcttcttgcctaattgacttc

SEQ ID NO: 36460 - DNA, 2300 bp, Homo sapien
accattatggaaaacagtgtggatattccttaaagaactaaaagtagatctaccatttgatccagcaatctgactactaggaagaggaataaccacagaaaaataagtcattatacaaaaaagatccttgcacatgcatatttataggagcataattcgtaattgcaaaaatatagaaccagcctaaatgcccatcaatcaacaagaggataaagaaaatggtgtatatacacatacatacacacacacacacacacacacacacaatggaatagtactcagccataaaaaggagcaaatactggtattcacagcaatctggatggaactggagactattattctaagtgatgtaactcaggaatggaaaaccaaatgttgtatgttctcactgataagtggaagctaagctatgaggacacaaaggcataagaatgacacataggacttcagggactcgggaaagggtgggagggggtgagggattaaagacatcgggtacaggatacactgcttgggttatgggtgcaccaaaatctcagaaaccaccactaaagaacttatgcatgtaaccaaacaccacctgcttcctaaaaacctattgaaataaaaaatacatttttatttttaaaaaatgtccatactacccatactacccaaaacaatctacagattgaatccaatccccatcaaaataccaatgacattcttcacagaagcagaataaacaattctaaaatttatgtggaaccacaaaagaccgagaataatagcaaaagctaacctgagcaaaaagaacaaaactggaggaatcacattacatgacttcaaattctactacagagctatagtaaccaaaacagcatggtactggtataaaaacagacacacagacaaatggaacagaatacagtacccagaaataaatccacacacttagggcatggctacacggaggaaggggtttctgagcacaatactctgtgtgtgttaactttgtagttttgaagttaacaagaccctgggctcgctatgcagtccgtatgtgatgttgaaccctttacacacagcactagacggttttgaacctatcaaaacactgcttcacttaaatttcaccaactccttaaaatcctagtaagtctatgttttcctttgttcctatgttctccttttctcccactttgtgggttgtctgtttactctgctgattattttttttgctgtgcagaagctttttagtttaattaagttcagtctatttatctttgtttctgttgcatttgcttttgggttcttcatcgcgaagtctttgcctaagccaatgtctagaaggtatttttccggtgttatcttgagcaatttttatgacttcgggtcttagatttaagtctttgatgcatcttgagttgatttttgtataaggtgagagatgaggatccagtttaattcttctacatgtgggtcaccaattatcccagcaccatttgttgaaaagggtgtcctttccccactttatgtttttgtttgctttgctgaagatcagttggctaatcagatacctcatagctcctttgttgtataattttgtgcattgtagatcagggtcaaaatgataaaggtgattttctgggactacagacttgtcaataacaggtggtcctaggctgatagaggtaaacaaataaaagctttaaaagaatattctctgttaaaatttgctttcataaatttcatgtttaaaatcatttgtgaataaatgttaaaataaaaaggtgagccacgattttggtaaggcaatttctgagcaaatcacacacaattttttttcattcccattgatctattacatagacgaatatttggttgtgaaaaagtgagagaaagaactcggctattttattatagtagagcaacaccgaagggagacgacttcgctgtagctcagagtctttttccattcttcacccacgcgcggggcagtcgcgcggcgcggtcgcgcggcgggtaggaactaccatcccagcatcctctgcggcgcggggaaggaagcccgggaatgagagaaagaggctccggggagatagcggaccagtgagggctgcccctcttttgaagcggttttcgtctctttccgccagtggcctcccagctcacgcaggggcgggtcccggtagcgcgaggcggtgcagggcgggaaggggagtggtggcggctgcggcagtagggacagcaggagcagtggtgctgtcagcgcggccgtcggagacatgggagacccggggtcggaagtgagtagt

SEQ ID NO: 36461 - DNA, 2300 bp, Homo sapien
tttggatttgtgtcctcacccaaattccatgtggaattgtaatccccaatattgggggaggggcctggtgggaggtgattggatcatgggggcggatttcccccttgctgttctctaataatgagtgagttctcacgagatctagttgttaaaaagtgtgtagcacctccctgctttgctttcttcctcctctgcccatgtaaagaggttcctccttcctcttcaccttctgccacaattttaagtttcccaaggcctccccagccatgcttcctgtacagcctgtggaactgtgagccaattaaacctctttcttttataaattacgcagtttcaggtagttctttatagcagtgcaagaacgaatacaacatggttctaattatcctatatatttcttgaatttttgaaaaatatgctttgagaaatgttaggtaaacattttcagtggagataaaacactgtaatgttatctttatagcatacataccaaaatttaaacattacattccccaattattagacatttagatattttccagtttttgctgttataaaaaaacctgtgatgtatcttcaggaaaatccctgcaactacagttactgagttgtatggtgtgagaagtttttgggtctagccacatactgcttgttttccaagaattttacccattaactcctgcctcaactgattaaatattagaggacactttcaccagcccactaggaagagcttttaaatacaagttttgcctacacattaacgttttaaaaatatttaatttacacacagcttttgaagaactccccatgcacgtctgtcattctcaattggcttccacaagtctcaaacttactaggtagaaagtaactaaagtcataaagcacttggtggaaatgcaggaaatgtcaaatattaaacaataattactacaggcttaggcaatcagatggtagttttgcatacaaacaaaaacaggaatctgagatgttaaataatttgtgtttttttttttttttttttgagacagtgtcttgctctgtcacccaggctgcagtgcagtggcatgaatttggctccctgcagcctggatctcaatctctcggcctcaagcgattctcctacctaaacctcctgagtagctgggactacaggcaaggaccactacgcctagctaatttttgtattttttgtagagacgaggttccctcttattgctcaggctggtctcgaattcctgggtttaagtgaaccgcccgcctcggcctcccagagtgtgaggacccgcctggcctaaaataatgttatcacttaattcttttcataaactttattgacaacgattggtgtgtttttttaaaaaacctttttaaatttttggtaaggtattacctgagaacagattaaatgcatagttgaatataaaagatctattttatagactggtttatgagtgtgaacacacaaaaggttaaaaggtcaaccttacagcagtctataaatagatctctcatattctctcagtatatctgagaatattgaaaaagtgcatttcaaaatcactggctagggtttagtgatagttaggtagacctcggttccctttcctattgggccctggatttcccatccctattttcttcctcaggtgtattaatactggcagggcctgggagactgacgctagggaagaggtgtgtaatgtaaggatacttcagattctttcctgatcctaggattcagctaaacctccacatagcccctgtcctcaaaaatgagtaaatacataaatttaaaaatgaaaggaaaaaaagagaaatccgttcccaccacccaccttcagggctaaaacagaaaaatcaatgagctgcgcttcacaaccataccaaaaccaaacaaataccaactcaaaccctccttcacatcctcccacatcttcccagtgcttcgctatctcacaggacccagctggcccctggcttcgccccacccactgcagctggcgtcttttaggcgcatggttcttttcctctccggcgaggggcggtctcggggcggacccgaactacaattcccagcatcctgcgcggcgcggggaaggaagcccgggagtgagagaaagcggctccgggggcatagcgggccagtaagggccgctcctcctttgaagaggttttgcgtctctttccgccggtggcgtcggcgctcacgcaggggcgggtcccggtagcgccaggcggtgcagggcgggaaggggattcgtggcgacggcggcggcagggacagcaggagcagtggt

SEQ ID NO: 36462 - DNA, 2300 bp, Homo sapien
atgcatagttgaatataaaagatctattttatagactggtttatgagtgtgaacacacaaaaggttaaaaggtcaaccttacagcagtctataaatagatctctcatattctctcagtatatctgagaatattgaaaaagtgcatttcaaaatcactggctagggtttagtgatagttaggtagacctcggttccctttcctattgggccctggatttcccatccctattttcttcctcaggtgtattaatactggcagggcctgggagactgacgctagggaagaggtgtgtaatgtaaggatacttcagattctttcctgatcctaggattcagctaaacctccacatagcccctgtcctcaaaaatgagtaaatacataaatttaaaaatgaaaggaaaaaaagagaaatccgttcccaccacccaccttcagggctaaaacagaaaaatcaatgagctgcgcttcacaaccataccaaaaccaaacaaataccaactcaaaccctccttcacatcctcccacatcttcccagtgcttcgctatctcacaggacccagctggcccctggcttcgccccacccactgcagctggcgtcttttaggcgcatggttcttttcctctccggcgaggggcggtctcggggcggacccgaactacaattcccagcatcctgcgcggcgcggggaaggaagcccgggagtgagagaaagcggctccgggggcatagcgggccagtaagggccgctcctcctttgaagaggttttgcgtctctttccgccggtggcgtcggcgctcacgcaggggcgggtcccggtagcgccaggcggtgcagggcgggaaggggattcgtggcgacggcggcggcagggacagcaggagcagtggtgctgtcagcgcggccgtcggagacatgggagacccggggtcggaggtgagtagtcgagtgagggtcctggcgttctcagaggcgaaccgcgaagggtttgtgttttctgcggtctgaggcctggtgctccgtcgcagcctcggggcgatacctcttcagtgtcttgggccgagcccagctctggggcctggtgcgtgtctgagcgaggaacccgcagcaacaatggccgcccggccccccgcacgggccctggcgttcgttgtggccgcggctgggccagtgggagcgacgttttaaggcaggattgcccttcggtgttgagcttgcgttcctcctggagtagataaggggaattgtgagaggctggtaactaacgcgttttcagcgttgggtccctgcagctccgcacactctgtggcaagagccagagctcgagttccgttcctagtcgggtttccgtgaaattgtgctcagttcgttttcctcaagagctctctgtctttaattgttcctttcggaaacgctctcttcctacacgaatgtggctgaacagataagcatgttttggcttgtttttatagataatagaatctgtccctccagctggccctgaggcatctgagtcaacaacggatgaaaatgaagacgacattcagtttgtcagtgtaagtagcaatgatgattggggttttcccagagtaaaagactatggtgggccattatgtaatgttacctcacctggtcatttaatgttcatgagtgtctaatacatactagacactggagcatggcgcaggattgggaaatttaccaaaagagctatctgagccacccccgtagccatcacaaagagcacgtcctaaagaacgtgctgtacacttaatctcgccccctgcctttcatttaaacttaagataaaaacgctggtgtctaaaacgctgttttgaaatggagcaagagtaacttctaaaggcgacacggaggaaggagctgctaatgatgagcaaggacgtagaaaacaggaagggttgtgagagcccagaatcttagcgttatggtgcttctaacatgaaggcaaatagcttgaagatttctctaacctctgagatcatcatgttacggcatagtacagttgatgctcataatgaagaatcctacatcactgggaacatgctctatttttctgagtttgttccctttgagacagtagttttcaagccttagtaagtataaacaggcagattcctgggccccactgcagacctaccgaatcagaatttccaggcgggggcctaggaatcttcattttcagacaagtgcagggacataaggatttctgagcacactttgtacagcatgggtttccaaagcagaagagagtgttttatgatgtattttggggtgattt

SEQ ID NO: 36463 - DNA, 2300 bp, Homo sapien
aactaggggcatgacatttgtctgacataaaattaatcagttctttatttttatttcttatagattcagggggtacgagtgcagttttgttacatgggtatattgtgaagctcagatatctgggcttttaatgtcactatcatccaaatagtgaacattgtacccaataggttattttccaaccctcacccatttcccaacctcccaccttttggagttttcaatatctgtttattattccactctatatgtccacgtgtacccattgtttaactcccacttagaaatgaaaatttgcagtatttgacattctgagttatttcacttaggataatggcctccagttccatacatgttgcttcaaaaggcatgatttcattcttttttatgactcagtagtattccatggtatatataccatattttctttattcaataatccattgatggacacttaggttgattccattcattatcgctattgtcaatagtgctgcggtaaatgtacaagtgtaggtgtctttttgatataatgcttactttttcttaaggtagataccagtagtgggactgctggatcaaagggcggttctatttttagttttttaagaaagctccatattgttttccatagaggttgtactaatttacatttccatcaacagtgtataagtgttcccttttctctgtatccttgccaacatcagttgttttttgactttttaataacagccattttgactggtgtaagatggtatcgcattgttttaatttgaagttctctgatgattagtaatgttgagtatttatgggccagttgtatgtcttcttttgaaaaatgtctgttcatgtcctttgcccacttcttaatgggattatttgtggatttttttcttgttaagttcctagtagattctgaatattagtcctttgtcagatgcatagtttgcagatattttctcccattctgtaagttgtctgtttattctcttgattatttcttttgctatgcttaagcttttaagtcccatttgtctattttagggctttgttgcatttgcttttgaggacttagtcataaattttttgcctaggccattgtccggaaggggttttcctaggttttcttctagaatttttatagtttcaggtcttagcctttaatccatcttgagttattttttgtatatgatgaaagatatgggttcagttttattcttctgcatatggctgtcaagttttatcagcaccatttattaaatagggtgtcctttccccagtgtctatttttgtcaatttcatcaaagatcagtagtttgtaggtatgtggctttattgctgggttctctattctgttccattgatctgtgtgtctgtttttataccagtacatgttgttttggttaccatagccttatagtatcaacattaatcagttattaaagaataggaactgggttgtctagaatcttaaccatagtgttcttacatacagtttaattaccatggagagtctaataatttgcctgttcaataaggtcctctgtcagtgcttttgatacagattttagttttctaaaatttgcctgaatttaaaaaattttgaatctagttttagccttttgtattttaactagaaatagataaagtgcagataatactcaagtattttgagatgatagaacatcattatgtcatttgcatctttattgaaaagtatcttttagtgcttatttatacgttggttattttataattcctgcaataaaatgcagcaatggtatatttagaaaatacttctgaaagactttctatttctttttatctaatttagagttcattgtcgaaatgctggacctgtagctgtagctgagaagagcattacccaggttgcagagaaattcatattaagaggttattgtccagattgcaatcaagtctttgtggatgaaaccagcacccaaaatcataagcagaattcaggacacaaagtccgagtcattaactcagtggaagaatcagtcttactctattgccacagcagcgaagggaacaaggatccttcttctgacttgcatttattgttggatcaatcaaaattttcatcacttaaaagaaccatgtctattaaagaatctagctcactggagtgcattgccattccaaaaaagaagatgaatttaaaagataaaagccatgaaggtgttgcttgtgtccagaaagaaaaatcagtagttaaaacctggttctgtgaatgcaatcagcgattcccaagtgaagatgcagtagaaaagcatgtt

SEQ ID NO: 36464 - DNA, 2300 bp, Homo sapien
gtatttatgggccagttgtatgtcttcttttgaaaaatgtctgttcatgtcctttgcccacttcttaatgggattatttgtggatttttttcttgttaagttcctagtagattctgaatattagtcctttgtcagatgcatagtttgcagatattttctcccattctgtaagttgtctgtttattctcttgattatttcttttgctatgcttaagcttttaagtcccatttgtctattttagggctttgttgcatttgcttttgaggacttagtcataaattttttgcctaggccattgtccggaaggggttttcctaggttttcttctagaatttttatagtttcaggtcttagcctttaatccatcttgagttattttttgtatatgatgaaagatatgggttcagttttattcttctgcatatggctgtcaagttttatcagcaccatttattaaatagggtgtcctttccccagtgtctatttttgtcaatttcatcaaagatcagtagtttgtaggtatgtggctttattgctgggttctctattctgttccattgatctgtgtgtctgtttttataccagtacatgttgttttggttaccatagccttatagtatcaacattaatcagttattaaagaataggaactgggttgtctagaatcttaaccatagtgttcttacatacagtttaattaccatggagagtctaataatttgcctgttcaataaggtcctctgtcagtgcttttgatacagattttagttttctaaaatttgcctgaatttaaaaaattttgaatctagttttagccttttgtattttaactagaaatagataaagtgcagataatactcaagtattttgagatgatagaacatcattatgtcatttgcatctttattgaaaagtatcttttagtgcttatttatacgttggttattttataattcctgcaataaaatgcagcaatggtatatttagaaaatacttctgaaagactttctatttctttttatctaatttagagttcattgtcgaaatgctggacctgtagctgtagctgagaagagcattacccaggttgcagagaaattcatattaagaggttattgtccagattgcaatcaagtctttgtggatgaaaccagcacccaaaatcataagcagaattcaggacacaaagtccgagtcattaactcagtggaagaatcagtcttactctattgccacagcagcgaagggaacaaggatccttcttctgacttgcatttattgttggatcaatcaaaattttcatcacttaaaagaaccatgtctattaaagaatctagctcactggagtgcattgccattccaaaaaagaagatgaatttaaaagataaaagccatgaaggtgttgcttgtgtccagaaagaaaaatcagtagttaaaacctggttctgtgaatgcaatcagcgattcccaagtgaagatgcagtagaaaagcatgttttctcagcaaacacaatgggttataaatgtgtggtctgtggaaaggtatgtgatgattcaggggtcattcgtttacacatgagccggattcacggaggggcacatttaaataactttcttttctggtgtcggacatgcaaaaaggagttaacaaggaaagatactatcatggcacatgtgactgaatttcataatggacacagatatttttatgagatggatgaggtagaaggtgaaactttgccatcatcctctacaacattggataatttgactgctaacaagccttcatcagctattactgttattgatcattccccggcaaatagttctccgaggggtaaatggcaatgccggatttgtgaagatatgtttgattcccaggaatatgtaaaacagcactgcatgtctttggcaagccacaagtttcatagatacagctgtgctcactgcagaaagccttttcataagatagaaacattgtaccgacattgccaagatgagcatgacaatgagataaagattaaatacttctgtgggctttgtgatcttatctttaatgtggaagaagcatttctgagtcattatgaggagcaccacagcatagattatgtatttgtgtcagaaaaaactgaaacttcaattaaaaccgaagatgattttccagtaatagagaccagtaaccagttaacttgtggttgccgtgagagttacatctgtaaagtcaacagaaaagaagattatagcagatgtctccaaatcatgctggataaaggaaaactgtggtttcgctgcagtttat

SEQ ID NO: 36465 - DNA, 2300 bp, Homo sapien
aaggagatgtaatcgctgtgtaacatcagagaaagctatatggattatcgtcagaagtaaatgtttctaacattgacaaagatgcttatcttttcattacatcattcactcattaattcattcaatcacaaaatattgagtacccaccatgtgccagcaactgttctaagcacttggaatataccagtaagcaaaacaaagcccttacccctctgtggagcacatattggtggagaggaggggattgtacaatgttagtaagcaaggcaataaaactgcatatctgatggtgatacgtgtaacgacggaaaataaagaagggaagggaataaatagtgcagggacagggagttggggggaggcttgctatttttaatagggttgtcagaaaagatctcactgataggtaaacttgagcaaagacctgaagaaggtgagggaatgaggatgaaaatacatatcgggaagagagttccaggtggaggaggttaaggtccagacaggagcttagtatattcaaggaaaagcaagaagactagtatggctgacaggatgagctaggagagtaataggaaatgaacttactgaggtttttctaatgacctgggcttttactttgaggtaaggagccagtgaaggtttctgagaataaatggtatgatctgccttatttaggattgctgtagttgctgcactgagataacatgtacatgagaggcaagagtagaagcagggagaccagagaggaaggtattgtagtattccaggtgcaaactcaccaggtagcttgaaccagaatggtggcggtagaattgggaagaatctggatatattctgaaggcaaaattgatggggtttactaatggtgtggatctaggataagagagaaaaagagttcaggatgattctaaagtcacttgatagactttcaaaccactcacaaaatgtgttttgttttcgtttgtgtcatgataaagttatttttaataaggtcaaataatcccctaccccaagagttaattaggatttaaaatgagttcagagggaattgggatccagccttaagggcttcaactctgttcaagtatttaaatggctttgatctctgattaaaggtggtggctcagctttaaactattattatctatcattttctgtgccctgtacattgtcatccttgcaatgagaggcatagagctatcaggagaggggactaaagcctaactttttaagtagactaatctttgtatcctcagctctattccgtcttttaccgacagctggtgcctgacctagaggcctactgcatcttttttgttaacaggatttttaaaagttgaggactttttaatgccaattatttcactcagaatatttatttatttatttatttttttgagacaaggtctcgctctatcgcccaggctggagtgcagtggcgagatctcggctcgctcaacaggaataattttaatagcaaaaatttaaaaccccttcattaagccaggcgtggtggttcacatctgtaatcccagcactttgggaggctgaggtgggaggaccgcttgaacccgggaggtcgaggctgcagtaagtcgtgatcgcgccactacactccaacgtgggcgacagttagaccccatctcaaaaacaaaagaaaattagaatggtaaaaatgaagtaaattcactttgcttcccacatctagctagacagggaaagatggagtagctttttcttttttacttcatagcttcagtgttgtccgggctttcattactctcatctcagtataaagtggtaacaggaaggtcaggtgagtgtgggctgcctacgagctgtacttactgccttctgtttcacaaaaggacgttttctccccataatgtcgttgttcttgctttgaattatgggtgctgggagaaactaaacgaagccgtcactgagcaatacacccacagcccgtcgaccgataggaaccttcgcgtggggggagttggttacttttaggttgcatgaagaggcggggcctcgcggggcggagctgggggtggtctgtgggtccgcgcgggcttcgggtagttcctgggtccggggagcagacgatccgctagccacattaggcgctcggtctctgcgtccgcccctcccgtgcctcagagacttgcgctccccaggcccgagcccctgtcggcccatcctcgagcccgtgtggctcgcgaacctctaactccagccgctgcagccccctcccaggcccggcgtccccgagccccgcgggcgccgcgcctgcccttctt

SEQ ID NO: 36466 - DNA, 2300 bp, Homo sapien
tttaggaaaacttttctttctggctaagggagaggagaatgaagtggttgagaacatgccctcaacgttctgaagacatggagagatgtgtgttacttgttatgtggctccctaaaaagaaacattaccagttagagggacttcaagtaactgaggccaccaatttctactttcgctctactttttctgggagtggaacggtcaggtttgccagtattgtgaaaatccatgaggaagcattacttctctcttccacttgcctcattctgagtggaaccccagaacctggtgtagggcttaataatccaagaaattattttgagtggagaatctctcactctctggctcttttctcccaatagtaacaataataatgcctcacttgttaagagataccgtggttattgaagtattttctcagcaaacagatacttcatgtttgggtgtattaatgtaggaagataaagacacacatgcagtgtttcctaaactttttggctcacatgcttctttgctcatgcacaacctagacaaaactatgtaaccaactcctgtgtacagtttcacggaattgcaggtgcctaacaagattttcttttaactacacctgctcacaaaatttacacagtaacttgagacaaacgttcacaggaagtagataaaacttttcaatacaccgttaaagtctttccaaaaatctattaacattaaattgtttagaaattctatacaagtctactactgtattaccaaataaattcttaagcaagaaaaggggaaaactatcttttcatgctttcaggccagtaactagcacttagtcttctatgtagggaggtgcccaataaataccgagagacgaacggaaccgctgaatcccgtccgcgaggttaggggagaaacagaagcggcaacgtctctgctgcacgaagcacccggtaacttactgcctacccctcactcctgtctaatctttgctctcaatggattgctgggttggttttgttttattcatttttgttctgaagcaaggaaacttaacttcacgtggagggccactgtaaactgctgcctcccttaaaaaatgcataacgagaagagtaagttaaaacgtttggggccacacagaaggttctagaagttctgcagacccaagctgccacagtccttaatcgcatggaatctcactgtaacttttatctcctctgatttttttccgctccctaacacctaggtaaattaatcaaagtgtggccaccgataacgccctcacaggtttagcttaaatcgaatgcgttttctctcggactaggggagataatccaagaaacaaacaaaactacaccacgtccatccacaacaaatctcaacaagcaacttcggttgccgcagcctcactgtgccccaggccccggcccgccacacgcggcctccgtccgctaaccgcccgcgaaccgcccgcgcggcgagcagaacgcccgagaccgcccgcccggagctcacctgagctccagctggtccaggctctccagcaggcggctggagcggtcagccatggaggaggagcggcagaagcgcccctcgttggctttagcgttgatcttcgcctgagccatctaagcctccgacgcggggtagccaagaggtcaccggcccctccggcggcagcgagtggagcgctccttgggctgcaggcgtcgccgtcaccacgcgggcgcccgccctccctctgacgcccgcgggggcaacccgggaggactcgccgacaccgcggctgcagcgtagccaaagaagggcaggcgcggcgcccgcggggctcggggacgccgggcctgggagggggctgcagcggctggagttagaggttcgcgagccacacgggctcgaggatgggccgacaggggctcgggcctggggagcgcaagtctctgaggcacgggaggggcggacgcagagaccgagcgcctaatgtggctagcggatcgtctgctccccggacccaggaactacccgaagcccgcgcggacccacagaccacccccagctccgccccgcgaggccccgcctcttcatgcaacctaaaagtaaccaactccccccacgcgaaggttcctatcggtcgacgggctgtgggtgtattgctcagtgacggcttcgtttagtttctcccagcacccataattcaaagcaagaacaacgacattatggggagaaaacgtccttttgtgaaacagaaggcagtaagtacagctcgtaggcagcccacactcacctgaccttcctgttaccactttatactg

SEQ ID NO: 36467 - DNA, 2300 bp, Homo sapien
atctgttagctacttgatattaaatttcttacaaatactattgctattataggtaaaataatctccactaatttttaaaattattaagtgtgaattataattcacatacagaaaaatgtgcataagagtacagcttgaattttcacaaatggacacgcatttataactagcgccaaaatcaacggagagaacctcactagaaggaagcccctcttccagttgctaactggaagcccctcttctagtcgctaactccttccagtcactatcccctgcccaccaaggtaaccattatgctaactttgagcctcttagttcttctgtttttgtagtttatagaaatggacttatgccatgtgtacttttgttgtctttttatgctgggcattaggtttccccagttgattcacgttattgcctgtaattgcagatgcttttttgcgttgctgtatagtgtttcattatatgaactctgtgtaatttcattaatttattctattgttgatggtcttttgggttattctcattaaggaattattacaataaatgcagctacgaacattctgatacctgcctgtccgtgcaccctaagtattcgtttctctttgctctatatgcaggcgtggaactgcggggccatagggtatgcaccttttgcagacagtcccaaactgtttttcaaaggagttgttccagtttacattccagcagcaaagtagaagaatgcagttactctacatcctggccaacacttggtattttccatcttttttttctattctattttattttgaaatataaaaacaactgaagcaaagttgagattgcttttgcggaaccttttcgtttttggttcgcttctctgaataattaaccatctcaggcttctattttgtcctgcaggctgtgtgagtgcgttttcgactttgctcgacatttttttgctcacttggccacttaagatgtcatctggtcaagaaaataaggtaggtgtccgaagcggggcaagccctttgaggacactggaagtgtgataactctgtaggcgaaactcatgcggaccgtcattggccgatttctcttttctagagttcacgatctaggagatcctgctcgtctctgatctccccactgccctcccgggctcccttggaggcgcctggaaagctgagccgccgccagccacccgccagaacaggggcggggcagggccgcgggtccgcacagagcatgcgcagacgaagcacggcgcatgctccgcagcgcggcgggtccacagatgaggggagtcgagactcccgcgccccaccacccccggcggagctgctgctgagccactcaatctgagccctggctactaataaagttcgtttaaaaatcataatcattcttaagagagcgaaagagggtgcgaactagccgctcggccccgcagggagagctggcgcgtcgggaggagacagcggcggcagcggttgcgccgcgaccaggaggagccggtggcgccgggcggcgggtccgcggccggtgggggacggtgagtagcggctcgcgctgcggtgcagcggcgctgcactcactcgccctctccaggggctgggggttcgtccggctccactggggaagactcagcttctccccggggtcccgggttgtgccttactctccggagtgggcaggggtatcgagggcaggggcctcccggcccggctcccccatcccccggttcggaccgccgagcgccggctctcccctccctgagcaccgatcccaagttccagctagagaaggtgggcggcagcgccagcccggcgccccctcccagctcccagcggtgggtacctggaattgcctggtgggcgggaaagaggggtggagcgagggcggcgctgcgtccccagtctggccgaacgttcggctttttgcctgccccaagtcccgactggggaaggggcgacccgggctgggccagacaccagtaagggcgtgaagtgctcaggttaggtttgatggcgaagagagtcctcagctccaccctggcatttagactcctccctgcagtgcgaccactctttacccgcgaccccacccttccctagtttcttgttcatagagtgctggaatatgaatgagccaaattgtgctgttccattgacactggttgctacagaattaactttactcggagatccgaggagccatcggcagttcccaggagtaagaacctgagagcgtgtgagagtaagaacttcattatcaggagctagtgaagtggcagtagggtctgaaaagggctgtta

SEQ ID NO: 36468 - DNA, 2300 bp, Homo sapien
tctatgtaccttatataagttgaatcatacagcatttgtccttttgcgactaggcataatgtcttcaagcttcatccatgctataacatgtgtcagaatttccctctctctcttttatttttgagacaggatttgcccaggctggtcttgaactcctggattcaagtgatcctcccatctcagcctcctaagtagctgggattacagggatacctcgccacacctgggtccctccttttttaaggctgaataatattttattgcatgtatatactacattttgttcatccattcatccattgatggacatttgggttgcttccaccctttggctattgtgaataatgctgctataaacatggttgtacaaatttttttttgagtccctgttttcaattcttttgaatatatactcagaagtggaattatttaatcatacgataattctatttttaatgttctgatgaaccatacaattttccatagtggccgtaccattttacattcccaccagcagcacacaaaggttataatttttccacatccttgccaacactcatatttattttctgttctgctttgtttataatcatcattttaatgagtgtgaagttgtatctcatggttttgagttgcatttccctcatgattagtgaccttgagtctcttttcatgtgctcatcggccatttgtataccttctttggagaaatgtctattcaagtcatttgccaactttttaattgttttttttcttttctcagaaagggcatcagtacgttactcaagtttaagagatactgccaaccaaatcctagagataaatctgttagctacttgatattaaatttcttacaaatactattgctattataggtaaaataatctccactaatttttaaaattattaagtgtgaattataattcacatacagaaaaatgtgcataagagtacagcttgaattttcacaaatggacacgcatttataactagcgccaaaatcaacggagagaacctcactagaaggaagcccctcttccagttgctaactggaagcccctcttctagtcgctaactccttccagtcactatcccctgcccaccaaggtaaccattatgctaactttgagcctcttagttcttctgtttttgtagtttatagaaatggacttatgccatgtgtacttttgttgtctttttatgctgggcattaggtttccccagttgattcacgttattgcctgtaattgcagatgcttttttgcgttgctgtatagtgtttcattatatgaactctgtgtaatttcattaatttattctattgttgatggtcttttgggttattctcattaaggaattattacaataaatgcagctacgaacattctgatacctgcctgtccgtgcaccctaagtattcgtttctctttgctctatatgcaggcgtggaactgcggggccatagggtatgcaccttttgcagacagtcccaaactgtttttcaaaggagttgttccagtttacattccagcagcaaagtagaagaatgcagttactctacatcctggccaacacttggtattttccatcttttttttctattctattttattttgaaatataaaaacaactgaagcaaagttgagattgcttttgcggaaccttttcgtttttggttcgcttctctgaataattaaccatctcaggcttctattttgtcctgcaggctgtgtgagtgcgttttcgactttgctcgacatttttttgctcacttggccacttaagatgtcatctggtcaagaaaataaggtaggtgtccgaagcggggcaagccctttgaggacactggaagtgtgataactctgtaggcgaaactcatgcggaccgtcattggccgatttctcttttctagagttcacgatctaggagatcctgctcgtctctgatctccccactgccctcccgggctcccttggaggcgcctggaaagctgagccgccgccagccacccgccagaacaggggcggggcagggccgcgggtccgcacagagcatgcgcagacgaagcacggcgcatgctccgcagcgcggcgggtccacagatgaggggagtcgagactcccgcgccccaccacccccggcggagctgctgctgagccactcaatctgagccctggctactaataaagttcgtttaaaaatcataatcattcttaagagagcgaaagagggtgcgaactagccgctcggccccgcagggagagctggcgcgtcgggaggagacagcggcggcagcggtt

SEQ ID NO: 36469 - DNA, 2300 bp, Homo sapien
tggcaagctagcaacagatgcaccagagagactttatattaaagagctgacttgaaaaagctattcaagaaatcaagatttctccacttcttcagcttaataattaaagtcatactgtcccttctcctccccaaataaaaggtaagagtcgaatgaaagaggctaacacagacaacctgatggccttgaaaatactgcataatggcctgatcatttgcccacatggttcagtaaaaaggtcaagtcatgtcttcaccagagattaagctgcttctccatagacatccaggtcaaaagcaatcaggactattaacaatctagttgttattaatgataacatatataaacattttatagcactgtacagcttacaaattgctttcacatacattaatcacatgaccctcataacaatcctatcaagtaggtagaacatgtactactattactattttacggaagacatcacaatccaattctctagatatcccagttttctctcctccacccattactgagtctcagtctccaaactatacattcttaaaagtttttgacgcctttaatcccagccaataaatggggacaaacaagatctgccagtgggcagatcacaaggtcaagagattggaaccatcttggccaagatggtgaaaccgtatatctactaaaaaatgcaaaaattaactgggcttggtggggcgcacctgtagtcccagctactcaggaggctgaggcaggagaatcgcttgaactcaggagggggaggttgccgtgagccaagactgtgccactgcactccagcctggcaacagagtgaggctccatcgcaaaaaaaaaaaaaaaaaaaaagcgtttgacttttacaagtttaaatcacccctcatcacattggtattagaggggttgcaactgtttaccagtgtattcaatgataaaatgatggggctggctctgtcattatattctgtgaaataatgggttgagtatttgaagtgatgacgagcactccaggaacaatgaaaaggagaagaaaaatcagtgcgataaatcaggaggccaaaataaatgcagaccactcccccgacgacaaccagttattaagcaagaaagctaccactaaaatgaaattcatggcttggtgtcattataaatacacactaaagagggcttcaggtactgcaccacccaacactgcagaaaacactaaaatacttccatagcaactatcactaaggacatcattaggatgctgaaaatgtaaaagaggaaaaaagagccaataaatggggacaaacaagattatttccctggtagagtaaagcccattgttcactctcagaagacataaatatttaaccacccaaggcaagctataaccagctatttcagctagccaaacccatcttcctgatatatagtgttttcaaaaaataaatcaaccaaggagttgaaacccaaggaactcacaaatacatgtaccaggctggtggcagcacgctctagtctgaaggattgatcatgagtcaggaggggagggtgcaagcctcagcccggtcacttagtacctatcaaacctattatgggacatgtaggtattgtcagggacacaaaagtgaatcagaaacaggttttgtccttgggctgttcagtgttgtagggggagataaaagatagattactataaaataagctagatgtgatagatgtcaaaagagaaataagattgctgctattcaattttaaaatcttattgcagggtgttgtgggtggaattgcaccccccaagaaggtattttgaaatcccaactctcaggatcccagaatgtgacttcatttggaaacagggcctttgcagatataatcaagttaaatgaggttactagagtgggcctcaatccactgtgactgatggccttataagggaagagaatgccacgtggaaacaaagacacacagggagaagatgactgtgcaacatcagaagcagagatttgagtgaagcggctctaagccagggaacaccaaggattgccaagagccaccagaagctgggaaggggcaaggaaggactctccctacagccttcagagagaggatggctctatcaatgtcttgatttcaaacttccagcctccagaactgtgagagaataaatttttgttgttttaagccaattcttggtatattataaccatagccctaagaagcaaatacagaggcaaagagtaacctcatcctactgggattagggccaggtttctggtaagaaatgacacataaattgaactttgaagaac

SEQ ID NO: 36470 - DNA, 2300 bp, Homo sapien
aaaatccttgacaattttgcaggagaaaatttctttgcctctagtgataaaaacatttttcatatttaacagtagttattttttctatgagttacctcttcttcttcttgtcctatttttctgtttgtgtcttaggatttttttcctaatgagttaacttctttgtatcctgatggcattaaccttttcgatgttatacttttggtagacctttctctagtttgatgagtgcaaaatacttctgtgaattttttacatgcataattttatactttttatggtcaagtctttatatcttttttctttgtaatttataatatttaaatttgtttgctatccagagataagatattcatgtaaatattcttatggtctgtgatgcaggttttttcaggcagtttatatgctttcaggtgtcttctttggaccacgtgatgtatttgtattacgtatttgtattatgtatttaatacagagaggaagaaatgaggtgaagctctgctgtcatattactggaattggtgtagtgagatcgttagcacagtggggcctggagagtttctctgggtttgaacatggctctgacattttgtgtccttttgacttcatttaacttctctgttcttcagtttccgtatctagaaaatacgtttaatataataacctttgggaggccgaggtgggcggatcacgaggtcaggagttcgagaccagcttgccaacatggtgaaaccccatctttactaaaaatacaaaaattagccaggcgcctgtaatcccagctatttgggaggctgaggcaggagaatcgcttgaatcccggaggcggaggttgcagtgagccaagatcgctccactgcactccagcctgggcgacagaacaagactctgtctcgggtattggtggtgggtcggggggaataacctatcttatgtggttatgataataaaatgagttgatatgtaaaccacttagaacaggtcctgatataaagtcagtgccagccacagtttagtccaggctgggtagatgctttgaagcttgatattgtttcaatgtactttgcatttctaaaaacgtgaacatttcaaagcattcatttgatctcctaaggactacctataccggagcctcattccagcacatttgtaagcgaggcacgcctcctagaggccacgagtgaagttaatttccagttctcgaaaatcttacagacagcggagaactggtgtggtggctctgacgccccgcttgtgagtctgcagtcggacatctggaaagtaagcggcacgtccgcgtgatttccagtgcttcatcttcttccaccctaccttccctccgaggctgggttcttctaattcctgtagattgcagagcgattcctgcgaatgtgccttctttcattcattctagttcattccacagataattcagctgcgcgcttcctctgtgcgaggcattgccggagagcggggagcgaattgaacgtggaacctgccagtaggggcttgccgcccaatacgaaattcaaaatatgtattgtatgtagacgggcaaactaacgaggatcttgtaacttgttttctcatctgccaaatgggggtaatacgatcttataggaccttataggtcgctgaaagattaaacgagcggaaaaaaaagagcccctaatagtgagctaggtgcaaaaaagatcctaatgccttttttcctcattcctccccagattgaaagtgatgagtgccagccctgagggttaaagcgccatattttcctcaatatagggaatatttgttagtgtccccagacgaagttacattggttcaattttcggcgtgtgggagttttcgccactagcattcagcaccccagtttcaaccgttaaagctaccgactccacatacaggaaatgcatcttaaaatttggaaaaaaaatccccaaaacactgacatccaaacactttaaagctgccaaggtggacggaacaccttgaattcccagacgcgctccactgagcatgcccagagcctcaggccaaaccccctcctacccgccaaggggaggtggggcagggctggccttctgtgctagtcacttcctcttccggtttcatatgaactctcccgccacccgggaacagtggctgccaccgtttgtgttttcccgagtttgaattcttgcaggtaggggaaacttccgcgaatttaggacagagagcaatcctgttattaaggcttgcaagtcgagagaaaggagagatggatcactttgcaggcagcagtagcagaaggacagact

SEQ ID NO: 36471 - DNA, 2300 bp, Homo sapien
gtgagcattgatagaacctctgcagtgctgggtgtggtggctcacacctggaatgctagccctttgggagaccgaggtcagaggatctcttgagcccaggagtttgagatcggtttgcacaacatggaccccatctctacaaaatatttaagatgagttgtggctgggtgcagtggctgatgcctgtaatcccagcactttgggaggctgaggtgggtggatcacgaggccaagagttcaagtccagcctgaccaacatggtgaaacccccgtctctactaagaaaacacagaaattagctgggtgtggtggcatgcacctgtaatcccagctactcaggaggctaaagcaggagaatcgcttgaactggggaggtggaggttgcagtgagccgagattgtgccactgcactccagcctgggtgacagagcaagactccgtctcaaaaaaaaaaaaaaaaaaagttgggtatggtcgtgcttgcctctagtcccagctacttgggaggctgaggtaggaggattgtttgagcccagtaggtcaaggctgcagtccgccataattgcaccactgtactcccacctgggtgacagagtgagaccttgtttcaaaaaagaacctttgcaatgatggaaatgccccatgtctgcactgtctgaaatggtagccactagctacatgtggctattgagatcttgatatatgactaggttaactgaatttatttggtttaattaaaaaaaaattttttttgagacagcctcactctgttgcccaggctggagtgcagtggcataatcacagctcactgctcagcctcctgggctcaagtgatccttcctcctcggccccccaagtacctggagccacaggcgtgcaccacgacacctagcaaatatttagcctttttatagagactgggtttcactgtgttgcctaggctgatcttgaactcctgagctcaagtgatcctcctgcctcgacctcccaaagtgctgggattacagacctgagctaccatgcccagcctggtttagtttaatttcattttacactcattcattcattcattcattcattcatgagatacggtcttgttctgtcacccaggctggagtgtagtggtgcaaacacagctcaccacagctttgacctccgggactgaagcagtcctcccacctcagcctcccaagtagctgggaccacaggtgtgtgcctccatgcttggctaacttttgtactttttgtaggctagtcttgaactcctaggctcaagcagtcctcccacctcggtctcccaaagtgcttggatgacagacaggagccagcgtgcctgacctaaagacatatttttccttctagtgtagttcagccttaagactgtatcagcagatagagatggaaaagtaagaaaaattgagtatcagattatatttataaataaagcagttactaattgatgtttttttttaaacttcctttttaattctgggttacatcattccctggctgtctttttttttgtattttttttttattattatactttaagttttagggtacacgtgcacattgtgcaggttagttacatacgtatacatgtgccatgctggtgtgctgcacccactaactcgtcatctagcattaggtatatgtcccaatgctatccctcccccctccccccatcccacaacagtccccagagtgtgatgttccccttcctgtgtccatgtgatctcattgttcaattcccacctatgagtgagaatatgcggtatttggttttttattcttgcgatagtttactgagaatgatgatttccaatttctccctggctgtctttaccctagcatcagtgagtcctgcagtcactacatcccccagtgaggacagatattttggtcaccatcaagtggatctttatttttatctaacatttacaattctgccagttcttactcgtaattctctttgccttgaatcccaggatccacctctgatgttcagtgaagagtaccagaaaagtctgctagagcagtaccatctgggtctggatcaaaaacgcagaaaatacgtggtaggaaagctcatctggaattttgccgatttcatgactaaccagtgtaagcagcagtttagcgcatgggataatgtacccgtcctcattttttcaggttgccttgcccattctggacattttggctgtaagaatattggaaacaaaggggggaagctggtttaatccatgtaggttgcgttgagaatttcctaggaaaagtaagttgtgcttaggaagtag

SEQ ID NO: 36472 - DNA, 2300 bp, Homo sapien
ccaggtttgaggaattcttcctcagccccctgagtagctgggattacaggcgtgcaccaccatgcctggctaattttttgtatttctagtagagacggggtttcaccatgctggccaggctggtctcgaactcctgacctcgtgatctgcctgccgcagcctcccaaagtgttgggattacaggcgtgagccaccgcgcccagctgaaatacagactttttttttttttttttttagaagtgttatactaggctggggacagtggctcatgtctgtaatcctagtacactttgtgaggctgaggcaggtggattgcttgaggccaggagttggagaccagcctggccaacatggtgaaaccccatctctactaaaaatacaaaaattaggtgggcatggtgactggcgtctataatcccagctgctcgggaggcttaggcaggagaattgcttgaacctaggaggtggaggttgcagtgagctgagattgtgccactgcactgacacctggcgacagagtgagactccgtctcaaaacaaaaacaaaaactaagggaaaaagagggaggactggcatggtgtggtggctcacatttgtaaatcttgaggcaggaggattgcttgagcccaggagttcaagaccagcctgggcaacatagtgagaccccgtctctattaaaaaaaataatagtaaaaaagagggaaatggcagctgagtaggcagcctcaatatcttttcctgattagtaatataattgactgtaagacctgagggagaagatgagcctagagtacaaatgctgctgccaccccctgaggtctggagggattggctgaaaaaacagggtgaactaggagctaagcaggcccattctttttttttttttttttcttttcatggagatggagtctcactctgtggcccaggctgtagtgtggtggtactatctcagtttactgcaacctccgccttctgggttccagcgattctcctgcctcagtgtcccgagtagctgggactacaggtgcacaccgccatgcctggctaattttttgtattttagtagagacggggtttcaccatattgcccaggctggtctcaaactcctgagctcatgcaagccacatgccttggcctctcaaagtgcaaggattacaggtgtgaaccatcacgcctggcttcaggcccattctttttttttttttttttttttgagacggagtcttgctctgttgcccaggctggagtgcagtggcgccatctccactcactgcaagctctgcctcccgggttcatgccattctcctgcctcagcctccagagtaagctgggactacaggcacccgccaccacgcccggctaatttgtgcatttttagtagagacggggtttcaccatgttgcccaggctggcctcgaactcctgacctcgtgatccacctgcctcggcctcccaaagtgctggaattacaggcataagccaccatgcctggccttgaaaccatctttcaaaatgtggtctttttgcagtacagctgggatgtctctgtctttcccaccatgcacctttgtaaaggggcggcttctgtctcgctggtgtaacagatttcttccctgtgtcccctttctcttctgtcaatgaatcatgggtggctgtcggctggggaccactctcagtgtctcatacactgaatgcaacatggacacaaacttatgatagggccaggtgggggacagcaagaggtgagcaccggaaattgcatgagctaggagtcactggctggtggtgggtgagggacacgtggtagggacagtttagcagctggatcagggtggaaatccaaatcctgacagctgagaagtggcacagacctgcttctgtgaggacaagtgtcccctggccctggccaactggcctccagggggtattgttggaatatgcggtcatcccaaagcacttcagcttgaagaagatctaggacacagtttgttgttaccacctcagagcatttagatgggacgtgatggatggaattgaagttgaaaacccattcaccatttctagttagtacagtaggctcctaatttacagaaatgcttgtgaaattgagaatcatgataaaatcctcatacctcctcctcttttgaccaaatctttctaaaatgcacaattataatttcttatctttaggaaaaagtaattatgttatatgtgttatatacactatgtaaatatagttcattaaatcattctttggtgtttgaagactttctaattcattacttcattccagacatc

SEQ ID NO: 36473 - DNA, 2300 bp, Homo sapien
caccataggcaacagagcaatattgtctcaaaaaaaaaaaaaatgaggaaggtcagtttagaatctaaatcagacaggtctctgtagatagggatagaaaggacaggtatatactaccaaagttccaggatgataatatggtattttcttggaggatactagaaacttgataatagtggagaaatgctaagaacagagttttgctcagaaggactcatattcaagggttcataattttcccttcattttttcctcttttgtccttataggacatttctagaaagatatacatatatagatgtggatagataattttcctgtttgtcattctactttcttttaataattcttaactgttcaaaatgttttagatctctgtgtttccttattatttaaactcaagcgatggagtggcagaaaaaaccaacccttccattatgtacttcagtacactcttgtactgcagtgtgtgcaggcatggggcaatacactttccaggggatttataagacagtataaaataaatagcaaccaaaccaaattagcagtgtttggaggcaaaaatggaaacatttagggaaacatacaacataaatagattgctgttgaatgaatgactagcaggatagttgagacaaagccccctttcacataattctaacaacgttacaatgttacgggaggaattcaaccccatgtttaggaagaggttaatatttgataaattgcctacacatctctccatctctctatgaaaatattttattttacttgagatgataatataaacaattattttcaggagttacaaaatacattaattgtataatttttttggtagcaacttaaggtgaaactttctcaacaggggaaaagtagctgtcataggagcctaaatagtggagtaggcttctgctgccataagccaccaagatttataaagagaagaaatagtcatggcatctgtttgctcaactaacaacattaaatttctatgtgcaatattggtaatgatgcatctaaaccttatgtagtaaataatttatgaatcttttagggtgtcagagttttttggctttagtctaggtagaaaggtcatagagtaagtagacagcctatacgtttaatgaatatttgtatttgcgatggctcacgcttgtgatcccagcactttgggaggccgagatgagtgaatcaggaggtcaggagtttgagaccagcctggtcaatatggttaaaccctgtctctattaaaaatacaaaaaattacctgggtgtggtggtgcgtgtctgcagtgccagctacttgggaggctgaggcagaagaatctcttgaacctgggaggcagaggttgcagtgagccgagatcacgccattgcactccagcctgggcaacagagtgatactccgcctcaaaaaaaaaaaaaaaaaaaaagcaaagggtgtcgcctgtaatcccagcactttgggaggccgaggcaggcggatcacttgaggccaggagttcgaaaccagcctggccaacatggcaaaacctcgtgtctactaaaaatacaaaaaattagctgcgcctggtggtggacgcctgtaatcccagctacttgggaggccgagacagaagaatcgcttgaacccgggaggcggaggttgcagtgagccgagatcacgccgttgcactccagcctgggcgacagagactccgtttcaaaacaaaaacaaaaacaaaaaaaacaaaacaaaacaaaacaaaaaaccaaaaattagccgacgggcacctgtaatcccagctactcgggaggctgaggaaggagaatcgcttgatcccgggaggcagaggttgcagtgagctgagattacgccactgtactgcagcctgggcgacagaggctctggctttaaaaaaaaaaaaaaagggaaaggatgttacagaaactccagatactactccgctccagtggtctgagttgcgcggcgttttcccgccgcctgtccggtagggggcgctgcgcaggaagccgcagtccctctgcggaaggcgccgctcttggcttcggcggcgccgctgtagcttggaggcggtacttcctccagcatttgccgcgagttattggcaagttcccctgcagttgtttgggctgtcgctgtggctggttctgcggtgtgcggccagccatggagcgctctgggcccagcgaaggtgggtttcatgaagcgagtccgggcggggtgggccgtgtcgggggagctggggcgccgcactaactaggccgcctctcttttcctcttgctccagtgacag

SEQ ID NO: 36474 - DNA, 2300 bp, Homo sapien
tctgatcattcaaaggttgaacaataaatagcctaaatagcaatatatattttatatagtttttaattgtgcgactgttgcagaaaaagataaaaaaccatatttttaatttgcataaaatcctcttcagaggtagatacatgtgagtattgttgcaggtacagagggtaggctggttggtcttctgttgtttcttagctgaaaactgcagtattctgtgacattgaattaaaatgagaacatgccaaatagggtaattacagctaagtttccactggtatgcaatgcagaaaatacagtgagcattaatatttttgacctcattacttttgcatttgtctaacaagaaagaagtatttaagtcactgctatgttaactttggacttatgtattttttgaaatcactctttttttagagatttatctgctcataaaagatatatattctagacatttggttaagaaaggagatgcaaaaagagttatttctattcaagatgaagttagtgtcaggctaaaagttgatttatttagaaaaatatgctgtctatgttcgggtggcttttcctatgcatactgtcttgtcaaggactctgccctcaactgcagcacttgctgagtagctatgaaaaatgaattatatatcatgtgaccttttactttgtggctgaagccacatctctagtcttcatttctctctctcttcagttttttttttggagtttcatctgcctgctggagtttccacctgaaagagctaagagttacctcaaattcattctgttgtgtagtaaagaatttggctggggccgggcgcggtggctcacgcctgtaatcccagcactttgggaggccgaggcgggaggatcacgaggtcaggagatcgagaccatcctggctaacacggtgaaaccccgtctctactaaaaatacaaaaaattagccgggcgtggtagcgggcgcctgtagtcccagctactcgggaggctgaggcaggagaatggcgtgaacctgggaggcggagcttgcagtgagccgagatcgcgccactgcactccagcctgggcgacagagcgagactccgtctcaaaaaaaaaaaaaaaaaaaaaaaaaaaaaagaatttggctggtttttgtctttggtccttgggtggaagcctccaaacccttggatttcccacgtgataggagtgtttgttatttatggtttattagcataaacacctgagtttatgctaatgagatgattcatggagaacctctagatagtttatgctgattagatgagtacagattggggctggccatgccagaaagtcctatcatgtgattacagggttggggctttgagccatgtgatcttggcctgacttctggcttagaagaagaaggaggctgaattttgagttcaactttatggccaatgaatcaatcagtcatgcctatataatgaagccccaataaaaactcaatacaatgaagctcagttcagttttctggttggtgatacacattgatgtgccaagtggttgatgcattctggggacatggatgattcatgtttggaagcctctcagatcttgccctatgcatttctttatttggttggtcttgattttcatctcttctaacaaaaccgtaattctgaattttctgaagtattaatataatttcttgaactctgtaagttgttctagtgaattttcaaacctgaggggttagtgagaacctcaaaaaacatagccggttggtcccaagtatgggtggcctgggaactctagaccttgtgactggagtctcaagtgagggtagtcttgtggggtctgtgcccttaacctgtgtaatttgacctaacttggtttgttagtatctgaactgcattgcatattctttagatcctgaagcataatcctttcccagagccaacaagcttacctgctgaactttgtttctcttcccacattgtcagccatgcagtctaatttcttcccataaacctcttatgtgctttggcttcagttcatgtccactggtacatgtgtagcctttttttttttttttttttttttttttttttcaacctgggctgtttcaatactacttaaactggcttatcttcacggtaatctattctgtatttcccagtgaagttcatcttcctcacactctcttcaaactcaaatatctttttcagagatgtctagctagtacccactgcaacatctctcaagtagcaggcacacatgtatatgttgaataaatgtctccctgttgtccaaactccgcagctgcaggggaa

SEQ ID NO: 36475 - DNA, 2300 bp, Homo sapien
aattctaaataatagctcctttgaaagtaacataagaatcagaaagagattaagaagcacatccagaaagataccaatactttatggtcccctattacacttagaataaaatccaaataattttcattcatcaaatcttcagtgtttgtacacatcaatcccccctcccttattgattccattctttcccatattacagtagtcacattgacctcagtcaattccaaaagacagcacagttctttccaccacagggctttttcaggggcaagttcccctgcttggaatgtctttctttgcacattgtactcacttggttcattcttttccatgagttttcaccgtaaatatcagctgcttatcgagattgtatgtttaccctagtcaaaaataaagaaactaatgtcttcccttgtattctctttcttaactccttggttcattcttgacctttattgcagtcaacaattaccattcctcttgtatacttggttttatttatcttctcccattagaaaacatctttgtgatgacaaggaatgaatgtgtatgtatcttattcaccaatgtttctccaattttaagtactgtccctagactcttttcagtatccaataaacatttgttgaatgcacacatgcacaaataaattaaatatataacacacagaaaggtaggttgaagcagtatattctggatataaatggtgctaatatagaattgaattttaatctcaacttcagcattaactagacatgagacgatttctctgttttgcctcagtttccatatttatacaaacagagaaagtaatacttggctggcatttttcagagtgcttctgtgaggacgtattgaaataatcaatgtgaggcacgttacgttatttaaacattatacaaataaaagttaatctcccgaatttatctaaaaattaaaaggaaaatatttaaatacagtaagataagttggaaaaatttcagcacattttatttgtagcaaagttggccctcattcttccacaccaaaaataatgggggagagaagaatcaggaaatgactacttatgaaacgagaacccaagacttggggaaagattgtttcctagcgattgaggcatgcaagttacattttatagccgcattggtaaaagaaggatgggctttgcctccacgcttggtgatatcatgagggtttaactttcctttaaatagaggtgggataatacaaagtagctcagcaacagtacctggtgaaagagactggcacatctaaaactaggagaaaggggaaaattagagcaaacgtggttacctattttctagtctcttctttcttctacatgtcttcccaattctttcacaaactgtgactaatgaatcatattgtttttggtttttaaattcagcccctcccaacctcccttccacagatagggtctggggaaaggaggcacggataggttaccagaactaattcaatatcctaatgattgtacacctcaatcatgtctctgcacaatatttcttcgagccgctttatttgtttatcaatgaacatcctactgcgtccctgagatgtaggtcatcggaaataccagctgccgatcacatgcagtcttcattgtatttccagacccagtgcgctgctgattcctgcacaactggagtgcgcctgagctgtgtgagggaaaggagacacctgtgccttagggacgcaggtgaagtcccatctaccttcctgagactttccctggcgcttttccaccctctcgggtggctcacttctcatctccatctcccctgtccacttgtactcagacctctctctttaacctgcgcttttcccgcgctctctctcctctgcgccttagctgaagacacagagaactccacaaaactgggcatgcctaatagccagggaaggcttgggcgcaagaagaaagcgtttgcatcttccgagctcccttcccctctgcagctgcctcctgccagtcaggccacccgacttgcgctaccgcccaatgagagcccgcggccttctgccagcgccccgcctctcctggcaccaccaccaatgagtggttggcggaggtgggccgcgtcctgttcccgcctctccagttaaggccgctggtgtgagccggggctctgcgcgagcgagggacgacggaagggacgggcaggtgtgggcgcggggccacgcagcccgacggcgggagtcgcaggtgctgggtgcatgggccagtgaggacgcacagagatccctcgccgcgcggaggaggagcagcgcgggagcca

SEQ ID NO: 36476 - DNA, 2300 bp, Homo sapien
tggtacttagtaagctttagcttctgcaatctgttctcatgaaatgaatcccataattcctttaatcattttagttactcttctctggatccattcaattagattacaactttttggcaggagaagtacttgagttgaacggtctttccatatgttgtctcagaagagtggtaagagaaagacttgtatcatttacattcatggctcaatgactatattcattttgactaagatagctttctggatatagtacagattgaacaaatgcttgtgaatgaaagtgtttaatatggacttattgaccatttattatttttctaatctatttgttaagccctttactgacatttggtttttcctttggaaaaactgattctaaataatggtaatacttttaaaatatgtatcatgctaataccataaattaggttatacaccatatgtccaaccaagctttagaacactttttacaaaaatgggcaaatcaaggttcaggaaaggatattataaaaaaatcatggatacacattgagaagaagagattgtcaaaataaggtaaggaaaagaagatgaaatgaatcaaattgcatattcaataacaataaaactcccaggagaaaatttgggtaagtagtactataaaggaatgatttttttaaaacatgtcccaatatgtaactgaacatgtaaaccagcttggagttcttttctttgatataggaaagggaacatttctgaaacaaaaacgaaatttttcacaaaacatttttttccatagctcaatggcacctgttttgcatggagacaagcacatgcaagaaaaagttgtaaaagtggaagcaaatgtggtctcagaagaggattgagaaaaacttaggtaaggctctggtacaagacattgtgggaattaaacaccctactagagatctgggggaaagcaccaagagcaagtcaaatactaggataggagatagaatcccttttcttggggaggttcaagagtccaaaacagccatattcaggatgcagtttcaggctggcatcagcatcagaactaggtccaaattcaagatctggttgtagatcaggctacacagagcagaagctttagagtcagtcatggaacaagtaccaatggaatggaaataggaatagttaatcactgtctttaggaaatggggcttttgaaatgggccaagagagtcaggcaggattgagtggttgtaagtattggcttggtcttcctcaggcccagaagaccaggaagaagtgattagccatggagactatacacttccacatggaaaatgcttagagagaatttggtttggttcagaagaaactgcatatcctccttcatcaacaatacttgaagttgagttgatagcagcagaagtgtgatttcaaaccccctttactagtgaagagaaagcattccctatttcctctactgagttaggattgtttatgggaccatatggggcagcctgtagatgattctgtgttcattgtgcacagtggggatggtctgggatttgtcacagactgacatcggagaattggaaaagctaaagaaagatatttcagttttataatgaaggtccagaattaatttggaggccagagggacctagaaaagaaaataaaaatgagaattacaaatgagtggatctttgccattggtaaaaatctgggtcacttatagctgtatttttccatctgtgcttttgtctgtgggctttgatagcatagtcgtctaataagtgtttcatcatctgaatctgacaatagatatcattccagaatacaattgttatgtaacaaaaattctgtatgttggagaaaaaaatcaaccaacacaattttaagctttgtatgtcttttgtttgcagggagtcaggcgtaaacaagcatttgtcattcgattcttctagtgcatttccagcatactgtgccttgggcatgacacatcagaatctgatgtttatcttttattacctgccagacccctctggaaaagcctctatggaattcatcatctgcagtctttgttgtaggtacacatataaatacatgttgaatgcatttgttgaggatattgtggtttctaacgctgaacttaaaaagtgttgagatgaataatgaagaggaccttctgcaggaggtatgaagctaatcattaaaatgtttttaaccaaaatattgacagtaaatctttttaaaaaatgtcaattatttgaatgccagtaagaataagggcagcataattatacttgttatatgtccactcaggagaagtt

SEQ ID NO: 36477 - DNA, 2300 bp, Homo sapien
aattaaaaagtaggacatgaaaatgaaatacaggtcagtctactaaaatccagaaaaggtattaagcaattcatgtgtgacagttctaattcaatgttaaaactatagttaacttcctactattacacttgacttgcaaataaaccaataagaaaattagaaagcaatatagaattttagctcctgaaattcaatcatcaatttatcaataaaaaccattctgttcagattaaagacatttgctaccaccatactttattttgacaaatggacttgaaatagacattcaacacattaaaattcagtagataataatttttaccctgtaactgtataaacctgtagactgatttaatgtatcatctacctataatttttcgaggagcctcaatgcctgaatccaacatattttaaaactacacataaatttgcgagaacataattatcaaacaaaaactaaccactggatctcttgcatattacacactgctgttgcattgatacttttctctcctctgtatgcatcctttttttaacttcagtcttcattgattctacaattgggaatattttcccattagacatttatgtgattcttatctttaaatgttgtgatatattgtccttggccttcaggagatctatcaattaacattgctaatgaataggaaaaatagtaaaacactaaaaatgaaaatagactgggtgtggtggctcatgcctgtaatcccagcactttgggagactgaggcgggcggatcacttgaggccaggagttcaagaccagcctggccaatgtggcaaaaccccatctgtatcaaaaatacaaaaattagccaggtgtgatggcacatgcctgtaatcccagctactcgggaggctgaggtaggagaatcacttgaaccagggaggcagacagaggttgcagtgagccaagatcatgccacttcactccagcctgggtgacagagtgagactctgtctcaaataaataaataaataaataaataaataaataaataaataaaatgaaaatagatatctgaaaaaaaagactttggcacaattgttcaccttataaatctgtggtttgtgtttattatttccttgtcaatatgattagtgtcagagttactgttctttttaattttttgccttgtaaacaggtggtaaagagatcatttattagaccatgtgctataggtagtgcactacatgaacaatcagtttatatacaccatggaatactatgcagccataaaaaagaatgagttcatgtcctttgcagggacatggatgaagctagaaaccatcatcctcagcaaactaacacaggaacaggaaaccaaacaccgcatggtctcactcataagtgggagttgaacaatgagaacacatggacacagggaggtgaacatcatatactggggcctgtcacggggtgggggaaaaggggagggagagcatgcggggcttaaaacctagatgaggggttgataggtgcaacaaaccaccatggtacatgtatacctatgtaacaaacctgagcattcagcacatgtagcccaaaacttaaagtaaaataaaagaaaaaaaaataaaactgagcaagaaaagaaaaaaacggcaaataattttttagtgttgcacagaaaataatatctggcttgtcgtattctagcataaagtgagtcaacatcattgtttaaaagtcagacagatttcaattcagcatttttctccccaatctaattatttcagaagctcaggtaggatcagaaagaggcagtatccttccatgtaggaacacaccaaaggagctaattacataaaaacagaaaatacataaacaacacatgtaaagagggtaaatgacagatggctaaatgccataactaagttttattatactaccattaaccaccaaaattatgcatttcctaaagtagcatagtttggaaacaaatagcatatattttagaaactgtccccttgaactgtataaattgcaaaataaacagatatattaccctttctctgcctcccctacagtaactcattaacagatagacttaagctcctgcactttctgaccctcccaggacttgagttgccttgtctggtatccttatgcagaatgaactgaaataatcatcaatctgaaaagctactcttaaacaggtaattctaacttaatctacttgtatattttatggaacacctagggacagactgttagaacaatgggaatcttataaaaatatattaatctaattctcttattttacaaatggaataat

SEQ ID NO: 36478 - DNA, 2300 bp, Homo sapien
ctgaccaatgctgggatgttctactgttctccaagaatctgcagcttaaaagtattaaactaaatacagcagacaccctcagcatagcagtgaaccacaatggcagctgacaagcaggaacatttaatggattggtcagcaagaccacacttatatcttgtttaaaatgtgtcctttcctttgggagactgaggcaggcagatctcttgaggtcaggagttcaaaactagcctagtcaacatggagttttctaaaagtacaaacaaattagccaggtgtggtggcaggtggctgtaatcccagctacttgggaggctgaggcaggagaattgctggaacccaggaggctgaggttgcagtgagcaaagattgcaccactgtgctccaacctgggcaaaagagcaagactccatctcaaataaatacataaaataaaatgcatcgtttctctcaacagcaaaagccttattttttcatcctttaaatatgttactttcatagtaggataagatggtaccttgtctgagaggctaagacccccaggccacttgagaatttgagagcttttagaacttgatgagcatagctgactggatacttcgtgtcagcactgcttgtggtaattacaggatctgtggatcacaaggctcacaacttgtatcacaagttctacaagaaaattggctaacacatatttggctctgttaatcatttgctgagtttatatcttgtcccaccaaatgtattttttgaaatgccattacatgaaaaagtttcactattccaattatctgtgtttaccaacttgtggagtaagagtggctgactgaatatgtgctttttaactacactattatatacattggccaagctttttatattaaccctacccatgaagtatcaccaatatttcccccagtgtgaaattgacatttgtcaaaagccttttgccatataaaagtttttagttcttatatatgaaatctgtccctttttttcgacatgagttccccagcctgcttagctttgcccctaccacccaagatttttaagctttctatattttcttagaatttaagattttaaagtctttacttttttaaatcatttatttgtaaagggacatatttctcaagtgtgctagttttccttgattttaatggattaaaatgtgtcgtaggtgagccattttcttccaaatgacgaagagtttttgttcctttgaaagtctggcccaggattttgtttgtttttgtttttttaaagttcttattttacttacagagttaagaaagttgaataactatacaaccagtctctaaatagaagttctaataaatcctaagatgttgcagggcactgaaagaggacaaaatttgatccctaaagccctctccaatctcatactcggtgaaaataacaaacaaaaggcttcagtgttagtggaaaactgagttcttaaaaagcaggtaaaggtcctgtttggtccttctccagagctgaggagaaagggttttcagattataaataacagaggtgcccttgtatggcacagaattgcgataagactttacttcttaggggcttaaataatgaagtcagtaaaagaggactgaaaacgaacataaagaagagctttagctttgacgcaaagaattacatcagtgcttgacaaaaccgaggattcttaatttctaaaaacgctttctttaagcacttcctaacctttcattatctgagacaacatatcaagtgagcagcagtacaaaggatgcatgtgatttcgaaatgccacaattgagccaactgcagttgcacgcgtacgtagtatagagaggtgtgatcaaaaaaagaatatagggagcatagggcttcgtctgcatcaaaagatactctccccatcttctatagccttaagttttgcgaaggtaagtttctccccgcttgaaagcgcccccagggacaagaattcatcttgaccaagcctaaggccgtggcatgcaaggtgttgagtcaccgggtacagcggtcttgcgacataaatattatttgatgacgaaggtactcggggcccaggtgccaaggtaaaccactggcaaagatgaccgtggttaaggcagtagaaagcaggctcgacactgagacgcggttccagccctagaaggattgcattttacgattcaggcaaacttcgagtctcctcatgtgacatgtgtgcactcctggaccgttttaattatgagaaacgtggtttgcagcatgattccttccagtcgataaatcggaatctctctcgctcc

SEQ ID NO: 36479 - DNA, 2300 bp, Homo sapien
tttgagagcttttagaacttgatgagcatagctgactggatacttcgtgtcagcactgcttgtggtaattacaggatctgtggatcacaaggctcacaacttgtatcacaagttctacaagaaaattggctaacacatatttggctctgttaatcatttgctgagtttatatcttgtcccaccaaatgtattttttgaaatgccattacatgaaaaagtttcactattccaattatctgtgtttaccaacttgtggagtaagagtggctgactgaatatgtgctttttaactacactattatatacattggccaagctttttatattaaccctacccatgaagtatcaccaatatttcccccagtgtgaaattgacatttgtcaaaagccttttgccatataaaagtttttagttcttatatatgaaatctgtccctttttttcgacatgagttccccagcctgcttagctttgcccctaccacccaagatttttaagctttctatattttcttagaatttaagattttaaagtctttacttttttaaatcatttatttgtaaagggacatatttctcaagtgtgctagttttccttgattttaatggattaaaatgtgtcgtaggtgagccattttcttccaaatgacgaagagtttttgttcctttgaaagtctggcccaggattttgtttgtttttgtttttttaaagttcttattttacttacagagttaagaaagttgaataactatacaaccagtctctaaatagaagttctaataaatcctaagatgttgcagggcactgaaagaggacaaaatttgatccctaaagccctctccaatctcatactcggtgaaaataacaaacaaaaggcttcagtgttagtggaaaactgagttcttaaaaagcaggtaaaggtcctgtttggtccttctccagagctgaggagaaagggttttcagattataaataacagaggtgcccttgtatggcacagaattgcgataagactttacttcttaggggcttaaataatgaagtcagtaaaagaggactgaaaacgaacataaagaagagctttagctttgacgcaaagaattacatcagtgcttgacaaaaccgaggattcttaatttctaaaaacgctttctttaagcacttcctaacctttcattatctgagacaacatatcaagtgagcagcagtacaaaggatgcatgtgatttcgaaatgccacaattgagccaactgcagttgcacgcgtacgtagtatagagaggtgtgatcaaaaaaagaatatagggagcatagggcttcgtctgcatcaaaagatactctccccatcttctatagccttaagttttgcgaaggtaagtttctccccgcttgaaagcgcccccagggacaagaattcatcttgaccaagcctaaggccgtggcatgcaaggtgttgagtcaccgggtacagcggtcttgcgacataaatattatttgatgacgaaggtactcggggcccaggtgccaaggtaaaccactggcaaagatgaccgtggttaaggcagtagaaagcaggctcgacactgagacgcggttccagccctagaaggattgcattttacgattcaggcaaacttcgagtctcctcatgtgacatgtgtgcactcctggaccgttttaattatgagaaacgtggtttgcagcatgattccttccagtcgataaatcggaatctctctcgctcccaccccttcttaacttcaggcttcctgcatcccggagcactcccggcagccccttccctcccccgccccggggatgctccgactcggcgcttagccattcatcaaccggttcacaccggcggcggccgccgcggagtgacgtccggagggggcgggcctccgcccccgcctgtcggctcctggcccgcggttccaggccgcgattggtggctggagggttgcacgtcgcgccggctataaaggggagggcttgtgacgcaagggcgcctcggcgcgtgtattggctccttcggctgcgggccggctcggctacgcgctctgctccgagccgctcactgcatggtagagtctggtgcccccgccgccgcctgcatcgccgccaccgccgctccgccacgaccaccgccgcctcctgccctgcagccaccgccaccgcctgtgtcgccgccgcctcgggaccggctgtatgattaggccacaatcttcaatgagtaaacatattcctgtgagtagccgtcgcatcgtcgcctctcgggctgggaatccacgaccggc

SEQ ID NO: 36480 - DNA, 2300 bp, Homo sapien
aattgacttttgtgtctacattgtttactgtcttccatggtcttaatctctgccaggctcagttttcttgggtcaatgttttgcaagatccaaattttatcacttttccttctttgataattttttagttaaatacaaatacactgtcagttttagtcattatcaattactctgtcttgttttcctaccaaatttaattttcccaagttaatttggagttttcaatgttactgatacaatctgatcttccaataagtcctgtgtgcagttatagctgttgccagtattattatgctggttctttcttctactaacctttctatgaattgggtataagataaacagttcgtgtttacatctggaagcaaaaagcaaagaccattagtggacaaatgtgaatctgggcacttggctggttcaaaataacagaatcaaaacatcatgcctatggcaagcttgttgactttttaaggatcagaaatctttgctttgtaaatgtgacagtcttatgattcttacattttcttttaatctccattttgttttatcttaaatttattaaaacttctctgagaaggtaagttttcctcagcccttctaagggattttccagctagtggtctccgtcatcaagttctactctgttgaattccttcggggttggattttgtttataacaataattttactttttctgaacgcccttttaaaacgtcacactgagatccaccagaagagtaagaataacattaggcttgtttttataattcatcccagacatcccaagtgagaattaaaaaaaaaaattactcatttctattttcctttctcaaaaacacattacaaaaagattgtaaaacaaagtcttgagggattgattagtcaagacagggggtgaaactcttaagaatccagtggaatcaggacaacccaaacttcctttgtagaagagcatttgctattaagagtgcttaaaatatcagaagactagagagaggaaagaacagatcttcaccacatgcctgtgacttattcttccaccctgcactaatcttacaatgtgggctgcggttggtctaaagcttaaatcaacaagtactgtaaaggttttagaacagtgcagaccacacagtaaggtgctcagcaggtactggctgaatactgtaatagtccctgtagataaaagccacaaaccctgtccctaagtagctccttttggttggagtgactgacaagcaacaattacttcacagcgcttattaagggctgagataggggttagctcaagtgtctgtggaagcagaccagtgggtctcaaactttttttgtctctggacctctacacaatatttgttaccacaaataatgtatttatgaaaagcatattttccaaattaataaaagggtgatatctaaaatttctgcagatttcctcaatgtctggcttaatagaagatggctggattctcttatctgtttctgcattgaatcagctgctatatgctgttttggttgaagggtgggaagaaaatttggccttagacacatgctcctggcaaaggaatggaggctctactgaaaggtcttggcgacccctcagggaaacctgggaccacattctgaagactgcttactggataccaagaatgtttcttggaggtagcaatttgagtcctgaggtagatcagccatgtagggtgagggtaacggaggtagttaatggtaaggctgctgtgccgagccagcacagatatttgggcagagggctcatctactccatcctattctaccattcttgaactcacagtcaattaataaaaagtacctggggttggggagctgcgcatcaatattatattaactgtgaagccttagtgcttactacggtcgagaaaaagcgctcctctgattcgcccctcccggcggcgcggaggtgtgagctagaagcccgcaggcggtgccgcgtcctccgaagacagggaggggcgcggcaacgccgggaagcgctgcagcccggggccccacggaggcgcggcgctcgaggccctaaagcgcgcaggcgcggcagcgacgcaggccgcggcccccggaacggtaaacagtggggtcacgtgacacggcccctctccagctcccgcgccgccgccgcacgccgatggctgcggggtctcgcgccgtcgcaccgtccccacgcggcaagcgaccttcgggctcagggcggcggcggctgcaacgaggattaggagggcggcgcggaagccaagaatagtgtcgtcagcagcagccatttggtcccagga

SEQ ID NO: 36481 - DNA, 2300 bp, Homo sapien
ataattttactttttctgaacgcccttttaaaacgtcacactgagatccaccagaagagtaagaataacattaggcttgtttttataattcatcccagacatcccaagtgagaattaaaaaaaaaaattactcatttctattttcctttctcaaaaacacattacaaaaagattgtaaaacaaagtcttgagggattgattagtcaagacagggggtgaaactcttaagaatccagtggaatcaggacaacccaaacttcctttgtagaagagcatttgctattaagagtgcttaaaatatcagaagactagagagaggaaagaacagatcttcaccacatgcctgtgacttattcttccaccctgcactaatcttacaatgtgggctgcggttggtctaaagcttaaatcaacaagtactgtaaaggttttagaacagtgcagaccacacagtaaggtgctcagcaggtactggctgaatactgtaatagtccctgtagataaaagccacaaaccctgtccctaagtagctccttttggttggagtgactgacaagcaacaattacttcacagcgcttattaagggctgagataggggttagctcaagtgtctgtggaagcagaccagtgggtctcaaactttttttgtctctggacctctacacaatatttgttaccacaaataatgtatttatgaaaagcatattttccaaattaataaaagggtgatatctaaaatttctgcagatttcctcaatgtctggcttaatagaagatggctggattctcttatctgtttctgcattgaatcagctgctatatgctgttttggttgaagggtgggaagaaaatttggccttagacacatgctcctggcaaaggaatggaggctctactgaaaggtcttggcgacccctcagggaaacctgggaccacattctgaagactgcttactggataccaagaatgtttcttggaggtagcaatttgagtcctgaggtagatcagccatgtagggtgagggtaacggaggtagttaatggtaaggctgctgtgccgagccagcacagatatttgggcagagggctcatctactccatcctattctaccattcttgaactcacagtcaattaataaaaagtacctggggttggggagctgcgcatcaatattatattaactgtgaagccttagtgcttactacggtcgagaaaaagcgctcctctgattcgcccctcccggcggcgcggaggtgtgagctagaagcccgcaggcggtgccgcgtcctccgaagacagggaggggcgcggcaacgccgggaagcgctgcagcccggggccccacggaggcgcggcgctcgaggccctaaagcgcgcaggcgcggcagcgacgcaggccgcggcccccggaacggtaaacagtggggtcacgtgacacggcccctctccagctcccgcgccgccgccgcacgccgatggctgcggggtctcgcgccgtcgcaccgtccccacgcggcaagcgaccttcgggctcagggcggcggcggctgcaacgaggattaggagggcggcgcggaagccaagaatagtgtcgtcagcagcagccatttggtcccaggaggaaaagaggctgtggcagcgacgccgacgtcctgcgcgtaccccctctccgcggcacccaccgggccccctcctcctcctcttcggcggcggcagcgtccaccatcttcctcttgctgccagtggtagcgctcgtctggcggagctgggtgagttgcggctgtggccgcggccagggagacgggcaatcctcccctcccccatccccttccacacgcacagcgcctccgcgggcctctccgcccctcccgcggcggactctccgcgcttttctcccgcgcagccgagagatcgcctctcgggcctcttgcgcaacgtcctcggcctacctgggccgcgccgctggcgcctgtggaccatttggaccgcgggctggggagggagtcgcagcgacgcggtcgccaggcggagggtcgggaccacggcctctctcccgaccactggtacccagccgtctgctgcgagggcgccccgccgccgctgaggcgcgggcgcgcaggcccgaggcacggcgggcgctgcctggaaggcccgtctcgcaggcccccggatccggccgttggggcctcttccttctcagggagccccagcatggagctttgggccttggtttcgggaaactgggactggccctggctgctaggctgctccctgctgctgctttttggagatgagagtt

SEQ ID NO: 36482 - DNA, 2300 bp, Homo sapien
agtattggtgttgtatgataatcgagactttctttggcactgagatgatatagtggtagggaattcttaaaggaacttgtcctgagttttcttcagcattgctagctacaattttctgtcagttgagagaatgcatgtaaaataagcagcaaatctgtaaagtagttagcattttctttcagtgctttattaacatttcagtgtaaataaatggaaaaaaaatgagaagagatactgaaacttctatttagaaggacattaacttttgtgagagaggaatttgctttttttttaaaaaaaattgaggtataataaatgcattcattaaaaatgaacagattcgtgaaaccattatcacaaccaagatttaggacatttccgtcatctctcaggtatgcacctgcccttttgcagttcatcctttccctattcgtggccccaggcagtcactaatttgttggattttttttttttttttgggcacaggttctggctcttttgccaggctggagtgcagtgggttgatttcgctgcaacctccacttcccgggcttaagtgatcctcccaactcagccgcccgagtgactgggtctacaggcacacgtcaccacacctggctaatttttgtatttttttttgtagagacggggtttcgccttgttgcctaggctggtctccaactcctgggctctagtgatctgcccacttcccgaagtgctaggaatacaggcatgagccactgggcctggcaggaaaattgtttttaaagagcccttaatgagtcagatcatcccagcccttagctcagtgtgaaagggtaacacttactaatgggtatgggctgtggagcttgaaacccaggctagaattttggctctgttttgtgactttggggaagacatttaaattattcaagtgcatttttttaaataatgcgaggatgttaatagaccctgtttattattggggcttaaattatataaatgttggttaaatgttttgtacagtatgacatatataactagtgaatgttagcatgtatctgaaattcttccctcatttttatagggggagagaattcaagactagtttgaggaaattttgttaaatttggagctaatctcaaaaatcttggaattaaggagcccaggatgttataggttaatcactgggactttttgttaaattaatattaacttttttcggttgactttccaccccctaaaatatgttgattcagttttctctcaaactgatttaacttaattgttttaacttttcataattgaggctcctgtagagctttgaaatgactttgctgagcaatgtaggtacaattcaaatgggagactaacttgatacttgtatagaccacacataactaaaataaatctaaatacatgatgtagattgtctttgtgtcatttatcttgtttttatcctataagggggccttgaaaaaaggtgtgtttgtgcacatctttgtgtgtgtgtgtagtcttttaagttttgatttgttgggttaatagtttctttttcattttccacctcttcccccacaataaaagccctttgtctatatatatattacctttctttaaataattttaatactttgtaaataaaacaagcctactttatggttttaataggtatgggataaaaatttaaaatatttgattttagctcttttatgtggacttattgtaaaagcagtgtctgatgcttaatttgtgaaaaggttgtggttaaaaacaatagtttttatgctttaagccatgtaattcttttgtatgtgtcaagttaatggactatatacatagtttttttttcctaaaaataatgaactgagtaaacatttagtaggatttctggtaaaatgatatactacatgcatgatgaagaaacattatttagtaaagattcgttctacatttccaaatgtatattctaaaaacaagtgaggattttttttttaaacaacaattcagaaataccttaagtgtgttcttagactcaaaactattaaaataatttggtattaggtgattttcaattgatagctttatttcttatggtattttttttgtctttctatagggctgaaagacacacagaagtcttcatggatatagttgatacatttaatcatttaattcctactgaacacttagatgatgccctatttctaggatccaacctggagaatgaagtctgtgaggattttagtgcaagtcaaaatgtcttagaggactcgctgaagaacatgctcagcgataaggatcctatgctaggatct

SEQ ID NO: 36483 - DNA, 2300 bp, Homo sapien
tgataaatgacaaattcagtttgtgggttgtttttgtacttactgaattatttagctctctttctttttagctcttttcattttgtgtttctcctttctcctgatacaagggggggatgtatcagaatagggaaatgaaactcttttcatttaatggactattaggagcattgtgtgggaagcttttaaattttcatactttccttatgatacatttgcttggtttaagtcttttaaattgtgtttcttttttgatgagctgtatgtggtactctgtgttgatatcatttcttaggaatagctttaatgctaaaatggtgacctaagggaagcacattgataaaggaattagagtccgtttgaggctgtattttgaaactcgcacagatcctggtttgtgataggaggtttttagttcaggtttctttagcactggaatatatttggttttatatatttagaaatatttaatgtttaaaaatccatgatggtcttgctttaatatgggcattaatggtaaaggaagctcattttacttacgtcactcctaggttactttttatggaaaagagatttgatgaaaacatttcttttaataaggtataatattagtctgaattttttagaggcttttccccctgctagaattcagagaactttgataaatataaaatttgacatatgttaaattatatatatgtgtatatatatcatgtcaccattatgagtactgttcaatacatttttgttgagcaaattatagctcagaataaagaagtgatatattctaaattgtattgaaataaaagcacatgacaaaatagctaagtatttttatttattttttccccctgtgatagaacaagtaagaagtttgcgacagagcactattgccaagcgttcaaatgcagcaccattaagtaacacaaaaaaagcatctgggaagactgtatctactgctaaagcaggagtgaaacaaccagaaaggagtcaggttaaagaagaagtatgtatgtcactgaaacctgagtaccataaggagaatagaaggtgcagccgaaatagcggacaaattgaagtggtacctgaagtatcagtgtcttcaagtcattcttcagtgtcatcttgtcttgaaatgaaggatgaagatggattagattctaagcataagtgtaataatccgggagaaatagatgtgccatctcatgaattaaattgttcacttctttcagagacttgtgttactattggagaaaagaaaaatgaagctttgatggaatgtaaagccaagcctgttggtagtccattgtttaagttttcagataaagaagaacatgaacaaaatgattccatttcaggtaaaacgggtgagactgttgttgaagaaatgatagcaacaagaaaagttgaacaagattcaaaggagacagtaaaattatcccatgaagatgaccatattcttgaggacgctggatcttctgatatttctagtgatgctgcttgtacaaatccaaataagacagaaaacagccttgtaggtttgcctagttgtgtagatgaagtgactgaatgtaatttggaattgaaggataccatgggtattgctgataaaactgagaacacccttgaaagaaataaaattgaaccgttgggttattgtgaagatgcggagtctaataggcagttggagagcactgagtttaataaatcaaacttagaggtggttgatactagtacttttggaccggaaagtaatatcttggaaaatgctatttgtgatgtgcctgaccaaaattcaaaacagttgaatgctatagaaagtactaaaatagagtcccatgaaacagcaaaccttcaggatgacagaaacagccagtcaagtagcgtttcttacttagagtcaaaaagtgtaaaatccaaacatacaaaacctgtaattcattctaagcaaaacatgaccacagatgctccgaagaaaattgttgcagcaaagtatgaagtaatacatagcaaaactaaagttaatgtcaaaagtgtgaaacgaaatactgatgtaccagaatctcagcaaaattttcataggccagtcaaagtcagaaaaaaacaaattgataaggagccaaagattcagagttgcaattctggggttaaatctgtgaaaaaccaagctcattctgtactgaaaaaaacattacaggatcaaactttagtacaaattttcaagcccttaactcattctttgagtgataagtcacacgctcatcctggttgcttgaaagaacctcatcatcctgcacaaa

SEQ ID NO: 36484 - DNA, 2300 bp, Homo sapien
aaatttcaataatctcaagtgtgcttgaggatatatataaggatattctgtcaccctctgctggttgtggacactttagagtgtagtttggtggcatctattaactctaaaaatgaacacagaccatcacactgcgattccatttctcacatgtttaaaacgagatataattaagtatgtttatcagtattagtaataacaaaataattttttttgaagtggagtcttgctctgtcaccaggctagagtgcagtggtgcgatctcaactcactgcaacctctgcctcccaagttcaagcgatcctcctgcctcagcctcctgaatagctggggctacaggtgcgcaccaccatgcccagctaattttttgtatttttagtagagacggggtttcatcatgttggccaggttggtctcgatctcttgacctcgtgatccgcccaccttgccctcccaaagtgctgagattacaggcatgagccaccatgcccagacgataacaaaataatttcaagcaactcaaaacatggcaacatggcagtggttaagtaaattgtggtataattaatctaagataatcaaactatgacaaatccagtagtaaaagccagtgcatctgaagtttaaagaaaaggaggaaaagtagcatcatatttccatgtagattgttcattgaacatctccagggaacactattcacataaattacaatgtgatgacttccccttggggttatgcagtgcaccatatgcacaatggtgggaatgttgggaatttaacaggaggccaaatcatgcaaagctccagaggctatggtaaagaatctgcattttattctaagtaaaatccctgaagggtttaaagagggcaatgaattgatgttttcaaaaggtttctctggcagatatataaaatgtatgtgaagagattaagacaaaaagtaaaaagatcaatgaggagtacattgcaatggtctaatcaagagttgatagtggcatcaacttggatggtggcagtggtaatagaaagatggggcaaatatgaaatatatcatgcagctataatctattaatgcattatattgggaaacataaaggaaattttggaaacagcacaatcaaattgattaccaagtttctacatggggctttgaatgggtggtgggaccatttgctgatctgaggaaggctgagggaagagtatctttcagcagtacaacttcaaacatgttaagttcgatataactcatatagccaaaacaaataatcaataagagagatgactatataaaactgaagctgacagaagaggtttagatagacgtaaattttcaaggagttatcatatgtataggtatttcttaaagtcatggaattagatgagaggtcactaatggaaagaaaagaagagagatgggctatggaaagccctgaggaattataaaatttataagacaggggcacatgaagctagagagatagggtgggaaaccaggagaaatggaatacaactgaaaatagcctagttacccttcaatgagggaactgctaaggaaatcatcctatatccattttataaaatattatgccacaaaatagagtcaactgctctttgacaaaagaggaagaagaataaaatggggaaaggataatcttttcgacaaatgatgctagaagaaatggacatccacatgcaaaaagaaaaaaaaaaaagaatctagacacagacatgacatctttcacaaaatttaactcaaaatggattcaaggcctaaatgtaaaataaaaaactataaaactcctagaagaaaatataagagaaaatctagatgactttgagtttgatgatgagtttctagatgccaaccaaaggcagaatccatgaaagaaaaaaattgataaattagatttcattaaaattaaaaaactaatctgtcaaagacacatgaaagagagtgagaatacaagccacagactggcagaaaatatttgcaaaatatatatctgatagagaactgctatccaaagtaaacaaggaattcttaaaattcaacacaaaaattaactcaatttttaaaatgggcaaaatatctaaacataaacctcactacagaagatattcagatggcaaatgagcatatgaaaatgctcaacatcttacatcattaggaaattacaaattataataattggataacactagatactttttcgaatagctaaaacccgaacacttatcacctaaagccagcaaggatatggaacaataggaactctcattcattactggtaatgcaaaat

SEQ ID NO: 36485 - DNA, 2300 bp, Homo sapien
acaccagtgagatgtacttctacctcattcctatcttatagatgaagaaattgaggctcagagatgttaagtcacagagctaagaaatgacagggtcaagatctgaacccctgttcatctgactccaaagcctgtgctctatgttacctacctcactatgatggttgggatactcatgacattggccagttaaaggccactggtaggtattttatgtaattattaaaatattacattattaaagttggcactccccacaaattgactatctaccactttactttcctcccaagtcctggccatggatgaataaaattctgtagaactcattcctccttctatatttaatagaaatgtaaacacatattaactactttgcagtgtcaagcatttaactgatattcaggatataccaatataccaatgaatttatcagcaaataagttttaatagaagctcaattgttttctaatatgcatagataataaataaaaaactggtttaaaagatccatatgtccttaaaggtttctaagtgcttgaacgtttggagacacaggcacacacatgcatacacaaatatacaggtcattgacaataatttttatttttgtttttggtattgtataaaagattaggaaaagcaaaaatctaataaggatgatttatcaaaaagcagtatgtactctaatcatgagagaaaaaagaaaaaaatcttaaccagggatactatagggaaaactataattttaagacaactgtggtttagctgttgaagtactagaagaaggcagtggcatcttgcaaaatactaactcatttctggggaccacaacaccacatgatgtttcaaaagcatataaaaagatttcatattaatatggtataagagattattctaagtaatactaacaaaataaaaatatcatacatgattcacaaggtataacatatattgagtactatttttaattggaaaggatcttgttatatctaatagccccaagattttgtgtactaatagtgagcaggtgcctatctcaaactataatggagtattatagaactacaaaagatgactggaataattaagaacaacaatcagaaaacataatgaaataaagtattttatttgctatagcatgaaatacttggaataaaactgtaccaattaggtttcttggttactggcaatataaactaaccctgaccatcttaagcaggaaaggagacagattacctcatggtcagtgggagggctggagaactagcagggaaagcaggaaaaacaaaggaacataggtagctcaaatactgccaagttcacattgtgtgaacagctatttcaggatgcagccactggtatttctatgactggggacagctgtgcaactacctcagctacaaataatttctaaatattactctctctctttggaccacttcttcagggtgcaaatcttggggagattatcccattggcttatcctaaggcatgtacatgtacgcaaataagaaggaagttcacgtgctacgtggccaaaatccaaaactgaaacaaacgtaatacccaataaatgtttcccacagacctttggttgctgagtgccaacgtgcatccttcttatacttgcattttcaaataacttccttttaacataatgcaacaatcccacatataatcaaaaaaagtgtcacccttctttcccaattggagacttcttaaagtcttttcttttattgcattttgttccaagtacagaaggaatctctgcataatggccatttgttctcatgtttatgttgtgatactgtcctgatatagactaaatttcagttactaaactcaaatgctttacagaaaccagagagcatatgacagctgtaatgtgatatggaagtatctgtgatttttcctggtgacagaatcaaaggtaatgctactattgtgcttttttgcttatcagcatccacaagagatagtcaaaaggaaagacttgatacagggagctaattatgaagggagagcaaacaggggatggtgaggccacctagaggatagcaacaactgaacagctgaaagcagctgctacctctatggctgaaagaacaaagggaagacacagtgctacaaaagcccaagagctgcaacctcctgacaggagctgggtccggtaatgggggctgctcatcaggacatgggaccacgggtagcttggggacctgttaagtggcagctggaaccaatcgcggatgcagctactagtggaggggagaggggagaaattctgtagcttctct

SEQ ID NO: 36486 - DNA, 2300 bp, Homo sapien
cttttagattttaaaatcattttgaaaaaaatcaccaataggaatcacagtgcactaaagacttggatgtatacataatagagatataatggatttaccttgctactaatttttttatttttacagatatttatttgtcatttttataaatgattttcattatttactaatgggactaataaaagcatgatgtatatacacatttttggttaggtgaatataggtacttatttaagtattacaaggattttggttaataagagcatcactaaggaactaagatcatagagtttacataaagcaattaacagtaacattaaacattaggagggattgttgtaaagcaacatttttgtttccctcattgactggcacaccaagtattgaacattggcaattattgtgtttccctggcaaaaattttactttgaccattcctgaggcctactaagaataattctggccattatagatgaaagatatatatttattaatagtttctgattgtatagaaatagagcaaatatagcattaatttttgttaagtggcttttaaaacgtttgctgtacaataagtcagtttttctttcatgtctctcctccatatcactttataaatcatatatttgtaaaattcttgaaccagtcctagtctacatgagccacttttttcccctctatatttaataaaggatggggtgggtgaagacgagtacatgaaatattactgattagacccacagcaaagttgcaaagaagtcccacatcaatttacagtttctttgattaagccattaataacatgtattaatttctaattatgttaatagataattccttaagagatccattatgagaaattcacttttttaaaagttgaaacaaagtgccaaaattactcattgcaattgaatagattaaaatatgtcaaattatatttaaccacaaaattcattagatgacattttaatgcttacaatttgaaatactggaatattaatatattatctatatttcaggcttaccttgagataaaaaatggcctttaatatccctgtctgggggagacatgacacttgaagttttaggatgaagtatttaacattataaatttctggttagaacattagctatattaaattgaaatagtagctttatatagaacaatggaatcaaggttaaaattgtatccaattatgcattatgccattttgaatggactctgtctcatttcattttaatttttatacagatctatgacattcaaataacagcacagagtaaagtattaatcattaataattgcttcaaagaatgcaatgtgtagagtacttacaaatgctattttatctatgactgattagttatattttaagcattctacaaaattaggttttcaattaaaagagaattcttacatttattgtcctaaatcttcttagtctctcaattacttttgtaatttgttgtctacaaatcttcctaatttcaggctagtagttactagacccaatgagttctgtttggattctaaatcttgaataagcacagccatatttttagtaactttattgatcgtatccttaatatttatagttgttttctctctgagttgaattaacttttatttcaaagcaatcttttctccaaatagaacatttgcaattttactaaatacactccacttttgctgaattaatcttggaatatacttgttgattttgaataatattttaatgggctgttccttcctgaggatacagatatttttctgtgacatttttcaaaacctaacaaagtactgatgcatgtgtcttaggtctgtaaaacaaaattattgaattaattatattctgatatattatttagtaaaatgccatggtaatggagatacttaatatttacatgaccatgtagatacaataaccctattatttaaattttatgtaacttacctttctgagtaaatttcacattcacatttaaaagatggaaattacaaaagagtagagtgagaaacgtctccttcccttttttgtctcctggcaatgcaaattatctccctggagacaaggttctacagactgaattttgccctctcaaaattcatatgttgcaacatttacccttagtgtgactatatttggagatagggcttttaggaggtaattaactttatgtgagattataactgtgggtttctaactcgatagaatgggtgaccttataaaaagaaagagacagatttctgtgtctctgcctccatagcacatacataggtaaggccacgtggggcctca

SEQ ID NO: 36487 - DNA, 2300 bp, Homo sapien
cgcggtggctcacacctgtaatcctagcactttgggaagccaaggtaggtggatcacttgagggcaggagattgagaccagcctggccaacatgatgaaaactcatctctactaaaaatacaaaaattggctgggcatggtggagggggtgcctgtaatcccagctactgggggtgctgaggcaggaaaatcacttgaacccggaaggcaaaggttgcagtgagctacgatccctggagtgccattgcactccagcctggatgacagagtgagacttggcttccaaaaaaaaaaaaaaagaaaaagaaagcaagaattaaagggatgagaaagggaggggggggagaggacagaaggggaggggtggaagggagagggaggggagggggaggggaatgggagaggggacgggagggtgatggaagggaggaggagagatgtaagggaagggggatggaagggagaggggagtggagaggagtggaggggagggaggagggaaggggaggggagcagagagggaagggaagggaatggggaaaaggaggaggaagggaagggggagagggagcaaagagggaagggaagggaatggggggagtggagaagggggagcagagggcaaggagaggaggggggaggggagaggaggaggaggggaaaagggagggaggggaagggaagaggaggggaagaggagggacacagggagggggaagggaagggaaggaggaggaggaagggagggggaaggtaggggaaagatataagaaaggatgaaagaaataatagggggagatgcaagagaaagaaaagtgaagaaaggaaggaagaaggaagagaaagtaacagagggagaaagataaagaagggagagaaaggaagagagggagaaagggaggaaacttctaagtcttacaagaagcaagatatagtagatgaactgttttccagatataaatggatatgtgcatcatgatactatgttatgttcagcgtaaattgtcttgggaggccacagtgtataattatgaataactcatttccatgagtcaacatataaaagttcttccctttagataacaaaatgttagtagcacattgattcatgaaaaatgtgtaaatattatataaattatataaagaataaatcataaaacatatacacatgtataattttatttattgctacaaatagaaatttttttctacagtgtgattttaatattttaaaatattacttttctttcattaggagagtgattaaatatatgtttcacacacttactgcaggatcaagtgtaatacaaatgatttatgtttaatttagtaatttgaaaatataaggatagtattaaagccagtgtccaactgggactgtgggttcaggatatactaatagaatcttaatttgacaaaattctaatgcactcagtaactgttctttctataatctcacagatagaggtgagatttcatttattctacctttcagtggtataaatttcttgaggctttctttattatagtcccataattcttctttaggaaaaggtagattctgtattacttcttttataaagatcatcatagaatcaataagtaacatactaaaatcgttcttcgcatcagcaggccctctttctgttctcttatgctgacagcctttgctatacaacaccatctgaggttgttactaaaccttcagcatcaggtttccctagcaacagaaagcttttttctttctcccactgtctgtatatgagttttttacaaaaacaaaaaaaaaattgtaataatctctaaaaacacaagaaagcattcagactgagacctatgaagttagcaatgaaaatggtgagttacaaataaaataaggaataattaaattgtagagaagtattttgcttatggatttacacaaagctccagatggtgatttgctatattcatctccagattagctaaataaaggccaggccttatgtcagcctgcacatggctttaatgactttacctttgtactgcaaaaggttaaggcttttagtgctatgtttcagaagacacatataaaagaagctttattggattaggcttctgagaaacaaagtgatacacgctaggcatgtccagacattaaccgtaatcagaagcctcctagggttgcaagcctccttggctaatggttggggtaagttatacttgattccacctagaaattatttttctattactagataaaaacactgcctagctgaacacaactacaaagatctctaattataatcataagcatttct

SEQ ID NO: 36488 - DNA, 2300 bp, Homo sapien
ttgttgttattataaaagagcagcatttttgaaatatttatcatctgctgatatttaggcttaactactcccataaggctgcatacctattaaacactttataaaggaaaaatgaaattgtaaatgcttgcaatatgattttttcttaattaatatcattaaattatacaaagcctagagagtgaagtacatcttaccaattcatgagagacagggtcctctgtttgctacttctagtatgtatttagttgtcatttctactagaattgaaaatactgaagttctgttactagaagggggtgttttgattagtaaagatcatggtttccatggaacactcaaatgatgaggctgttttatggaggaggcagattggatgacccagacttctcaacagtctgaagagccctgctgggcagtcattccctacatctggagatgacagaaactatttttttctggtcttagatagtgccttctggtatctgtgcacacacatggaacagagatcctgtcaccctgaaaaatcccgtctccctgcactccaatctcttcaatgcacatttattttcttgagtttttttcttaaatcctcatgggcttgaaagcattactaggattgagtttcttaaggttcaggatacaaaaatggagtaaagcaaaagcaaattttattctatcctaactgttcatactccttaatttgttgacatgttttcatttgttttcaacctttaaaatcaaactgcagctagaagcatacaaatacattgtaaatattaagatattagctagttcttgctcctttacacactgcagattatgagaaatttatttcataatggtaaaggttaaaattgaaatgtctcacattattccacaagtgacacaatatggcaaaattattattctataataaatgttattatattaaaaagagttcttttaaaaggtaatcttcaatttttataagttatttagagtttttagggacactagagggtgttaaaatatatttccctaataccggaagagtacattgcactataactttcttgaggcgagagtacagtatggaatgcaaatcaatacaaatttagtttaaaaggcttattttaagaatttcatcaattttctgctttcatagaaaactgaatggaacagtagaaaagccctattatattcattttcataattattaaacaattaagagaagtcattggtattttcttttacagttgaggaaaccatggttcagacaggtaaaatctcacaaaatcacatagcttgaacttactgaattttgtatttcaaagactaccagttacctctcgctttaatgaaaacaatgatgagatgacatgaaagtccagggactttcactgtatcagtaagatgtcatgcttccatattgatttcctgtgtaaaatatgcaatttcaaaaggctttcaattcttattagtggaaactcctctttaaaaatcctactaattagtcataaattctctgtctaggtcaatatccagtaacaaacttgcacatgtaccccctgaatttataagtatatatagatatttttttttaaaaaaatcttactaattaatgtgttgcttatctcactcctgtcctgtgacatttctcccaatcccacatgccaggatacatcattctagcatttctgtgatcttcccttgctctgaaaatatctttattaaaaaatagaatatttcctttttagcaaaaatgttattttttagattctgcagttgtcttttttactattttctgagctctaagttgtctctttttgtttctaggatggcacatctcagtatcttttgagttaagacaatgatgggtttaaggaatagccttctgttttgtagccactccatgaaatcttggggcctgacaatccctggataacaggaaatctttatacatgtagctggtttaaagggacttccaatgaatacttctttttaagtagaaggttctgaattatcagtagataagaccagtataaccgttagaatctttgggagcacacccgattacatacttggactttagtttttgacagagccctgagcaactgctcacaagggaaagcatatgtagattgaagctatgcagaatgaagtctcaacagctgaagcttactggggaaccaatggtgccctaaattaagataatttatgaaatgttgtaagtctataacattcttcatggaagtcagttagggaatggaaagttttgagatagagagatataattatatagcaatatgcaaaatata

SEQ ID NO: 36489 - DNA, 2300 bp, Homo sapien
atatttcaaacaactccagtggataacagaccataaacttcctgttttcactatcaatctcttttaaaatggtgttcttggctatccataatcgccccaggggagagaaacaagcggaggaaaaaaatgcaagagtgaggggaacaaatgatggaaaattgctttattcaacttcacctgccgctcgagaaactcacccttacgaagattccagcactttatatgaattacccattatggtttcctcccaccacatcactgcactattttagcacttgttttgcaaaccaccaactgcgtttacaagtagaaacataatcaggaggcgaatgaccttttgtagcatgtatctgaagctggtttatcagacacttcgtcagccaactgtccaggaggcaaaatgactatctatgatgatagatagacagacagatagatagttagattaaaaggtggggaaacatcccttttccctttttcctttctatataatctggttttttctcttcaccccttttctcgcttcttcccaccccgtccccaaacctgttactagggaaacttgaaaaagaatcagatacattaagactacaaaacgaaacaaaagtttagaccccgaaaccatgattccattgccaagcacaaagcaatgcaagagcccaacgtcggtcgccgcaccgcgatcctgacaaagcctgtatggagccagaacaaataagatgttaattgcagcctcgcagagaaaaaaatactattgttccagccagagacactcagcagctcggtagctgggatgtgccccctccgctgcggactggatcaattctgaatcccggtactgaaatgacagctctctggctgcgacaggtctgcgctgaaagaaagagaaagacgatcaagtccagcattcacttcccacccttcagagtcgccttcccatcctccgcacccccctgcctcgcctcccagtgagtttctcttacagttggtcgccgccagccccagcggtgggaactgaggatgcaaaaacctcccagacgcagaaaataccgctttcgggacgtgcttgggtttgagtagccgtgacgtgcaggcgaaccgcggccctggctggagctccgtggagcccccctcccgccagcctctcccccgccctcccgccgggactccctcctctcccaccccgcggctcccttcgccttctctctcacacacccgcccgcgcccccggcaggcagaactccaggaagtcgcagcggccgcgccgcgcgagccgagcctctggcgggcggcggggcgcaccgcagctgtgcataagaagggcgcgcggcacccgggacgcgcgcgcacacgagcacgcgggaggccgccgcgcggacgcgctcccgggacacgcgcaccccccgcgcgcgcgcccaagggagagcgagcactgcgcgccggcgcgcacacccgagacagagctttactatctcgctccctctcgcgcctccctcctcgctgggcattcaaacagctttccgacatcaccagccaaggatttttttccccgctctccttagtcgccgtccgtccatcagtacctgcaggggggaggaggaggagggaggaaagcggaaagaggaaaaagcataagcttgagccttccgatccgaccacgaatactcctgtaataaacccaccgccccaacaaatctgccatagcagccgccgccgccgccggtcacttctcgtctcagcgctttctttgcttcttggtttgttgggggtagcttttatgaaacaaatctttgctattaagccacttacattttggggggttccttagagtctcccttgggggggcttctccctccctttagcccccctcggtttggaggttggattcagttggatacggcgcaaggttctgggctcctgctggcttttttttcctctctctcatcgacccccctttggttcccaccccccaccttttgcttttcgtatgtatgcatttttaaaaataaatcctgattttggaagctgagccggggaaaatgggcaacggtgattgggaccgaaggggagtctctccgtcactgttgctgggacgcgtgcctgtgctggtgtcttagagcaagagcctccctgagctttcggagtggaaggtaaggaagggggtccaggggtcaccttttctctgccgggggtcgccaccgtggagctttgggcttaatgtttgagaagggaggaaaatgaaaggaaaggctgttgctggcggatggggaggctgtgagcagatccgactgtctgcattt

SEQ ID NO: 36490 - DNA, 2300 bp, Homo sapien
aactctaaatctctatatagcagcagtttaaaataacatcagaactgctgggaccatcaaaacagtgttctctgtttcaagcaaatagctcaatgaataatgcattttcttcatgagaaaataaagccaatgagcatttaaaggttaaaaaaaaacagagaaagttgtaagaaattctggaaataatttcctttttttttttttttttttggtgttgcactttgcaggcaatgcaggtctgcgcagtgttcttcaggatagagtgtaggcgttgagagccaatgtgacaataagtgtctaaattaggaattccatccatgaaaggggacttcattttataatcaggaactcaaaaagaggtcgtatgtcttttcctaatgaaattggtacttttgctttcatttatttgacagtgcatgtctgcaatgccgtgctcatcaatgatcagagagtgaggaaatagctctgaattcactttaatgcctgctcaagagagcgcactcaatataatgctctttatttttaatcagtctggagtacacagtcttattttgttctaaataataaaaaataaatcattaccctcacccccctttggactgcagggcccgttcaaaaagccgtgtttccctcttaaagaaggggtgggggcgggggcaaaggctggccacggaggtgtcaaggatgttttatttatttatttatttatttatttatttatttatctcttgctgagaagcaaaccagcattgagtttagctattctcaaaactgattttctgggtgacactttagtttagtcgaacatagacggcgccatcactccacagatttttccccccaatagaagacccactgccttctcttaacttccttttaacctaaaattttcccctcataaaattaccccaatcacacaaaactgccagattttctaggtctctccgcttattccttctgacccagcacatctcttgaaaaccagacttctctaacttttcaactgcggcgtttaagtaaatgcagacagtcggatctgctcacagcctccccatccgccagcaacagcctttcctttcattttcctcccttctcaaacattaagcccaaagctccacggtggcgacccccggcagagaaaaggtgacccctggacccccttccttaccttccactccgaaagctcagggaggctcttgctctaagacaccagcacaggcacgcgtcccagcaacagtgacggagagactccccttcggtcccaatcaccgttgcccattttccccggctcagcttccaaaatcaggatttatttttaaaaatgcatacatacgaaaagcaaaaggtggggggtgggaaccaaaggggggtcgatgagagagaggaaaaaaaagccagcaggagcccagaaccttgcgccgtatccaactgaatccaacctccaaaccgaggggggctaaagggagggagaagcccccccaagggagactctaaggaaccccccaaaatgtaagtggcttaatagcaaagatttgtttcataaaagctacccccaacaaaccaagaagcaaagaaagcgctgagacgagaagtgaccggcggcggcggcggctgctatggcagatttgttggggcggtgggtttattacaggagtattcgtggtcggatcggaaggctcaagcttatgctttttcctctttccgctttcctccctcctcctcctcccccctgcaggtactgatggacggacggcgactaaggagagcggggaaaaaaatccttggctggtgatgtcggaaagctgtttgaatgcccagcgaggagggaggcgcgagagggagcgagatagtaaagctctgtctcgggtgtgcgcgccggcgcgcagtgctcgctctcccttgggcgcgcgcgcggggggtgcgcgtgtcccgggagcgcgtccgcgcggcggcctcccgcgtgctcgtgtgcgcgcgcgtcccgggtgccgcgcgcccttcttatgcacagctgcggtgcgccccgccgcccgccagaggctcggctcgcgcggcgcggccgctgcgacttcctggagttctgcctgccgggggcgcgggcgggtgtgtgagagagaaggcgaagggagccgcggggtgggagaggagggagtcccggcgggagggcgggggagaggctggcgggaggggggctccacggagctccagccagggccgcggttcgcctgcacgtcacggctactcaaacccaagcacgtcccgaaagcggtattttctgcgtctgggaggtttttgcatcc

SEQ ID NO: 36491 - DNA, 2300 bp, Homo sapien
aggaggaggagggaggaaagcggaaagaggaaaaagcataagcttgagccttccgatccgaccacgaatactcctgtaataaacccaccgccccaacaaatctgccatagcagccgccgccgccgccggtcacttctcgtctcagcgctttctttgcttcttggtttgttgggggtagcttttatgaaacaaatctttgctattaagccacttacattttggggggttccttagagtctcccttgggggggcttctccctccctttagcccccctcggtttggaggttggattcagttggatacggcgcaaggttctgggctcctgctggcttttttttcctctctctcatcgacccccctttggttcccaccccccaccttttgcttttcgtatgtatgcatttttaaaaataaatcctgattttggaagctgagccggggaaaatgggcaacggtgattgggaccgaaggggagtctctccgtcactgttgctgggacgcgtgcctgtgctggtgtcttagagcaagagcctccctgagctttcggagtggaaggtaaggaagggggtccaggggtcaccttttctctgccgggggtcgccaccgtggagctttgggcttaatgtttgagaagggaggaaaatgaaaggaaaggctgttgctggcggatggggaggctgtgagcagatccgactgtctgcatttacttaaacgccgcagttgaaaagttagagaagtctggttttcaagagatgtgctgggtcagaaggaataagcggagagacctagaaaatctggcagttttgtgtgattggggtaattttatgaggggaaaattttaggttaaaaggaagttaagagaaggcagtgggtcttctattggggggaaaaatctgtggagtgatggcgccgtctatgttcgactaaactaaagtgtcacccagaaaatcagttttgagaatagctaaactcaatgctggtttgcttctcagcaagagataaataaataaataaataaataaataaataaataaaacatccttgacacctccgtggccagcctttgcccccgcccccaccccttctttaagagggaaacacggctttttgaacgggccctgcagtccaaaggggggtgagggtaatgatttattttttattatttagaacaaaataagactgtgtactccagactgattaaaaataaagagcattatattgagtgcgctctcttgagcaggcattaaagtgaattcagagctatttcctcactctctgatcattgatgagcacggcattgcagacatgcactgtcaaataaatgaaagcaaaagtaccaatttcattaggaaaagacatacgacctctttttgagttcctgattataaaatgaagtcccctttcatggatggaattcctaatttagacacttattgtcacattggctctcaacgcctacactctatcctgaagaacactgcgcagacctgcattgcctgcaaagtgcaacaccaaaaaaaaaaaaaaaaaaaggaaattatttccagaatttcttacaactttctctgtttttttttaacctttaaatgctcattggctttattttctcatgaagaaaatgcattattcattgagctatttgcttgaaacagagaacactgttttgatggtcccagcagttctgatgttattttaaactgctgctatatagagatttagagttggggctgtgtttgcctatatcaagacatagaatttgaattataatctggaaaatgcagatctatcttcagggacttcggtcactggatttggtgtgcatgcgttggtgtgtgttatgcaatgggaaggaagagggttttatcctttgattcagagaagacccaggcaaaggcatgaaaactcttaactatctatatgtctgtatgtctgtctctgtttacagaacagtggaagagactgcagcctaaagacttttaaaattaacttggcatcacttttatcagctcaaaggctaaacaaacaaacaaaagcagtgtcatttattctaagaaataacttcttaaaggttaaagctgaaaaatattcaagttatttttggataacaacttacagaggtaaatataaccaaggactactttattatccaaagccagggttaaaattaaaaaagaaaagaaaagaaaagaggagctttggagttgttgttggaaagggagcaatttaataattgaaatctgctaggaacaaaaatgttaatgtattttattaccatgtgtaagccttaaattacagttga

SEQ ID NO: 36492 - DNA, 2300 bp, Homo sapien
taaaacttttggttgtgatttgttctgtttcctcctactcaaaagtacttcatagatatttatctatgctagtttatataggtctcattgtttttaatgtcaacatgttattctatgttatgcatgtacagtagtaaattttactatttctattctggcatttagattgtctccagtttcatttttcttttaaaaaatattttaaacgaccctacaccgaatattgttgggtaaaggactcttggcccaaaaccaataaatgttaattagtacagggtctaatttaccctgacaagggtcagcaagtgctcaggttcttttgtaactacattaggcaaagagagaaactctcccacagtgcaggtgctttagtagaggcatataacctcctagtcttttctctctctctctctttttttttttgtttcttgagacagagtcttgctctgttgctcaggctagagtgtagtggcatgatcttggctcgctgcaacctctgcctcccaagttaaagcaattctcattcctcatccttccaagaagctgggattataggtgtgtactacaatgcctggcctcaaactcctgacctcaagcaatccacctgcctcagccttctagagtgctgggattacagatgtaagccaccgcacctggcctcttaagaatggtcttgcaggtagaataaacaccttggacttgggtgccaaagaatatgagctgagtaggtacaagtagttcactgaatgctaggacaattgctgaacacctggagactttgggtctcttagtccaatgagtgatggaatttggtacagctcctgctgtgtgggaaaggaagggcccatttgggctagcttatcgctttgtaagagctcctgaggtaatttgttggacaagtagtattgtccaatgaataaactatctatgtactaatatccatcctaatttgtgtgaatatttttaggatcgattcaataaagaatgtctacatggtagactatcttactgtgtagcagatggctttccctccacattttggcattactggatgttattgttttaaattttgccaataggtaggtgaaaggttatataatagtggattttcacgttttattagtaaaggatagtaattgggaaattccttcttgttggtctttttcaaatttatttctggccctagcttgttttgtcagatgatttttagaatcaatatgttaatatactctacctcctagcacaatgggattttgattggtgatatatattaattttaagattaatttggatggcagttggtatttacaatctttaaatgtgggaacagatgactttccatttattaaatttgttatatcctgtgatttattttttatatggttaacataaatgtttctatttggcctattaagggtttgttactattccttattactattgggaacatattgtttttattgtgctttggatatcaaggttttgcctttgtagaagtaagtttggattttctactttttttatattttaggcatttatcagcaaatttatagctactcattgctagaggtgtttatgggcaaaaaaaagagaaaagaaaaatccttaattatcttaagagaattaaatattgatgcccttttttaagagcactcatagaatgttgacactgacttgagctctttaagtgtttataaaacactgacctggattctaaattttgctttatacttaatagcagtgataagtcctttagattctccacgtttaatttttcacatgcacagaatttagagtataggccaaaaaggcttgacattgtaccttagttctgacagaatagggtatagattttttttctattggaaaagattaatttgaattatattttctaagcttagtaattcgaacaacccttgtgtgggatgaatgcaaaggagattagactgatttttcctgtaggtttttaaaaaaatgtataatatgctcaaatatgttctttctgaagtactaatcaggtttgttgctctctgcataaaattcatcactattttccattgcccttaggacaaagtccaaagtactcagcatgactcacaagcccctgacatatgtgtccttctcttccctctctccacctggtttctcttacctttccaaaagctcaatttaatctatatttagcttcttgaagcttttttcaaacgttctgtgtatgttctttactccctctttccttcctactattttctgtttccctgagatcattctccctcctttcaggtctcagtttagtcatt

SEQ ID NO: 36493 - DNA, 2300 bp, Homo sapien
atagcaaatacttggaaccaactgaaatgtccatcagtgatagactggattaagaaaatgtggcacatatacaccatggaatactatgcagccataaaaaaggatgagttcatgttctttgtagggacatggatgaagctggaaaacatcattctcagcaaactattgcaaggacagaaaaccaaacaccacatgttctcactcataggtgggaattgaacaatgagaacacttggacacaggaaggggaacatcacacactgggccctgttgtagggtgggggaaagtggggagggatagcattaggagatatacctgatgtaagactagttaatgggtgcagcacctcaacatggcacatgtatgcatatgtaacaaatctgcacgttgtgcacatgtaccctagaacttaaagtataataataataataataataataataataataataaaagagtgtgcctggttatgtcgttatctggttgggtgcagtctctattgattaggtgaacatctggtcccttttggcatgattccttttgaaatgtaaacagaatctttttctaagaagtagttacttatgtcaagggtgctctatacaatctggaatagagatatcaacctggaagcgatacctctcttcactttaaggaagctatgacagaggtctccagggatatgaattattaggaagaaagagtgaaattcaaacatttgcaggtctagagggcttaaagccagcttatgatggtaccagttcaagttaaaactgtattctcccctattcccttcttattctgtccaggcaggaaggaccatcctattttttccctcaggcttccagccggaagtagattataggtagagcataactcatcaccacataatacattggaaaaagatgatggtattttttctcagagttgtttcttgactacatcacagtggtgaaacatgcactcacacccctgtggactcaggtaagccatcccaagagtttcctccctgtggactcaggtaagccatcccaagagtttcctccttcttcttcattgtgggcctatggcagtgtgttttgtttgctgatgcatatacctttacatacaaagctatcatggaaattcacaggcatgcatacatctgaatagaaaggctataacatcatgtgataagttcatgtccagccaaccagttatcccggctgggcaccagtgccagtaaattagagtgatttgggcagctagtcaacttttattcagagtcagctgtctcatgcgtccgtgtgaagagaccaccaaacaggctttgtgtgagcaacatggctgtttatttcacatgggtgcaggcgggctgagtccgaaaagagagtcggcaaagggtggtgggattatcattggttcttacagtttttcggataggaggtggagtgaagagcaatgttttgggggtagggggtagatctcacaaagtacattctcaagggtggggagaattacaaagaaacttcttaagggtgggggagattataaagaacattgatcagttagggtggggcagaaacaaatcacaatggtggaatgtcatcagctaagctattttcacttctgtggatcttcagttgcttcaggccagctggatgtatacgtgaaggtcactggggatatgatggcttagcttgggctcagaggcctgacatcagccattcttgcaacctggtaaggagttctgctaatcacacacattccaccttgtacacgagggccaaacttccttttggtgaagaagtataaacctctaaaattgacttggatctccaggtccacctagcccattctttgtggagttcccttgctgttctagtctatcaacttaggctgagtcaaatatctcaataggttgcccagctatgagccaacaccctgctctgcagccctcccacatctcagcttgcagggaagccagcgagggcagcgtggtgatgtcactgcgtccgcacgcgccccgcccctgagcagtccttgctgccccgcccccgctcggctcgccgccaggggacgctagtgggtccagtctccttggcaaccacttgctcctccccctccgcccctttaacctttagggtgcgcgggtgcagtatatctcgcgctctctcccctttccccctcccctttccccaccccgggcgctcaggttggtctggaccggaagcgaagatggcgacttctggcgcggcctcggcggagctggtgatcggctggtgcatattcggcctcttactactggtaggggaggcgcttg

SEQ ID NO: 36494 - DNA, 2300 bp, Homo sapien
cttggtgttagaagtgctgcaagctgtttattaaaacttagagtgctgtcagattcccctgatattttcagatgtttgtttaccagcagtagcttcagaagcaagaagaaaaccggatcatttataattgtatttggcttagataaataaaaggtgtttggctaaaggttcttcctaattgaagtcactttaaaattcaataaaaagaactggctaaagaagcaaaccctaggtatacaatagtttgtaatcatgaaaccagcctagattcaaaccctttcctgaaagaaaaatagagaaatatttgttgccctggggatgttggtgtatctagaaacagaataagcaacagataataataatttgaagttttatttattcatttttcactttcttccaaaatcttgcttgggtcaatattagaaataagaaaagggccattttgaaatataaacaaaaatataagtgtttagctctctcaaatatcttaacaattatgaaattattaaaatgtttaagaaaataattctaagataaacttgatttacttgtattaaaacaaaaattagagacaaaattgtggacttccttttaggtagttttaaagcattactttaaatagtttcaattaagtgtaaataaggtgaatttaatagtctgacaaagaaataaagcctggatgctcttagttcaattcattagtgatggcaaggtatataaagtaaaattgcttagagaaagaaaaaaatcaaatgggataatacttcaaaaaaatagagactgatcaccaaaagtctaatgaaggtttgtgaatcatgtttttcaaatggccatttgagtagcgtgactcatgcaatatcctccctccttggcctctttccacagtcagccaaaaattagtgatgaaaatcatatgagaaggaaatgtatcaagtggttttaaatcctgacatagaaacatggtttgcatcaccatgaatgccgaactctaaaactgcaggtatcttgattaggttgagagagaagtttaaaaatcacaagtgatactttaatggtttcactccaatgaagtggaaaggagctatcttttaacatttttcttaacatctttattttttgcctgcctgattttatttattccttgatctgtgagctctgatatgtgaagtgtatttctatggttctaaggtaacttttaagcttgatgattttcaccattgtggatcaataatataatttatcctatttctcccactgtggcaatactgaaataaaaatgtaaaaccagtttatctgttttctaatgcctggtttactcttctgaattctataaatcattctgtttttcatatatacacatacatatgcatacactatatgtatacatataaatttactatatatgtatatatacctacaaatatatatgcctacaagtatccatatatacctcctatatatgtatataaacctactatatatgcctacaaatatatatatactctctctacacacacatacatgcacctacacagaaatctgcaggaaaatgacactttcacatattcaaagggatcccaaaagagttcaaaagccaagattggaagcaccaacccatggaaagatgtatttaaaatcacaaaatacttctgtggacactgagaaaaaccaagccacacaaacgtttacatatgagcgtgattagaaggtgggcagactgccttaatcaactttatataaactcttgacataaaagtgaaaaaatgaaacataaatgatatattttcttagctcaaccgttaaaaagccaattacctactcgtgaacgtttgccacatacaataatactttgaagacacttcatgatcagaagtgagaaactctaggcatttgcatccaaccgtcattttatctgtgaaactgctagtaaaacataaacctgaaaggcattactcccagctctaaggcgacatcgctgtcattaaagaaaacctgtgcctgagttggctgagtaccttcttgcagagtcctctgtcctcgcggagtgggagggtcacactgggagagactaataagggcagagatgcgtcccccttccccactcgcagggagctcactcctcggcggtgccgcagccctgtccggactccactgcgcctctgaggggctcaaatacgaattcaaggtaagctgcgcggctttgcgaccggctctgcacttgccctctcacacatgcccgggctatgtcatctgctcgtgttcctagttatctgtgtgcatctgcttttcaagaaaatgta

SEQ ID NO: 36495 - DNA, 2300 bp, Homo sapien
ttctaatgtgtcctagaagcatgtatttgaaattaagtgctatttcctttaatgtttgccaatactactgcaaaaatattgtctgttcattttggtgcctccagaggtttcatatgggcgcctgcctttacgatgtaggctatgcttctggatttctctatggccctccccttggttttcacctggtctgggtggctcctggttttgcacaggcacatgacctgggcttttcatttggtcctaccatgtggtagctctcggtccatttctgtcttcctggcttctgagaacttgccagggcttttgctgagtgggttgtgttcattctgctctcgtggcactgactgggatgagtttcatgctgatgtacctcagttttctgaagatgatacgttccttgtgtacagaagcctgtctactttctctcgtagtcctttaccacccctccaataccaacagcctcaatgacagaggtccacaaatgttgtattgtgaaagatctaagccaccctcccactccatctaggcactggcatgtttcctctgtcaataatttgtgaagctgatgtgtgtgatggttagagtttggacagattttttttttctgcctctgtatgagggcatatgtaaacatacacaagagaaatatgcaaactatataatgtaaaattgaatagattttaaaaatatctttgtgacaaatctaaatgttatcattgtagtaggactaatatgacctttcaatgttaacatgaaaatgggtttataaaagcagcaatctatagaaatcataattgatctcctaggttaatcagcattctttttgccagagagaggcacttaatatatagtacagactaagtatagtgatttataatttccaacctctgaattggaaaggtactgaggatagtgttcgtttttcagttagttagcattttgggtagttggacaaagacaacagccattacaagctagagcatgatggaataaaatccatttattgggaaaataattttggcagcataagtataattaagttaaatctgttattttttgtgatcttttaaaagtctaacagttccattttaaaaggaaaacctccaacttgaattatttagctgtatgtatttatggaaataatttttacaaaataacacccagtacttgtttataaagaagttgcctgcttgatgatcagtgatgttgacagaaactggaaacatgaaaactaaagacttatttttttccaagcacaacttgtgcttttaaacagacttgggggatttgacaggcaaacaacatttaattaaacatttggttaaaaatgttttggccgatttctttagtaattacctcagatcaatataactaacacttctactatgcttactatgagacaagcatagttctaagtgatttatgtcttttaacttattcaatcctcaaaaaagccctaagagataagtactatttttattcccactttatagatgaggaaacaggcacggagaggttaagctgcttgcccgaagttaccagatgcatggcaaaatcagcttcagaccaggccactgggctcagtgttcttgtctttatttccaccctcgcatatgcctcagtagctcaaatcatagctccacaggatgattttcagttgaagtttgctggctaaatgctgatgttacaagacgtatctagcaaattatttaaaatttatggaactttggtggtgggcatttaacaaaagtctgagaaagctggtaaagacaaacaaatacaacataaatgcatacagattcctggatcttaccccagacctgcagaattagaatcagagggcaaggggctaaataaagataaggaatggggagatggggttggggggaggacatctagtgcaatatatttctaaagaactcaggggattctgatgcatagctatcactgggaatcagtgatagaaggtctgcatctttttcaaagccctgattggcggctgcttcttctttgtcttcttttttttttgtttgtttgtttctttgagatgaagtcacactctgttgcccaggctggaatgcagtgatgcaatctcgggtcactgcaacctccatctcccagtttcaagaaattctcccccctcagcctcccgagtagttgggattacaggcgcccgccatgatgcctagctaatttttgtagagacaggggtttgaccatgttggccaggctggtcccaaactcttgacctcaggtgatccgtccgcatcagcctcttaaagtgctgggattataaggca

SEQ ID NO: 36496 - DNA, 2300 bp, Homo sapien
ccccgccccacctcctggtcactgtcaacagcaggccttgctggaaaaggcgggaatccaggcacgctccctctcccgctcctccagcccgccgtagctgcactaaccccgagtccagctagcggtgctggcggctccgggacggaacttggcggccctggcttccatcagcatttcagcagtttcccaaaggctccagcgcctcccgcctcctgcgcgagggaggacccggcgggggcgcataagcccagctgaggtttgaggtttcacttacaaagaccccattgtaacctgtttggtcgttggagtttagaaaaacaaagttttccttgatgaaagagtctcttctttttctttttttaattcagaagggtaaaaacagccccacattccctaagcaacacgtttatactatttcagacgccagcattccctctagcaccatcaaaacgcagctgtttgcaagcgataaaaggggtcacgccccagggtcagtctgaaatttggtgtaattttgaagtgagatgcaaagacctaattcaagggactgagggagtgtcactgcaggtaaaactgaaatgaggccaggcactggtctcaaggctgccctgccctactcctcccaaatcttttcctcaagtgtacgccccgcctccccattctactggacaaagatcctggtgtggagtctctgttcttggctgttccattctggccaaaacactgacctgcaatgactgataaatcgaggtatcgaatgagccccattttcatttttgtatccttttgaggatacaaaggcgttagacccttccttttccacaactcctcctgggtttaatgcactctgcagaggtgagaaccagtgaagcctcccccaaccttgggggcgtcaatcctgctctagccccacagtttagctcattagaatatggcggagaccaaagctgcgcttgcttggaggtctgagacatttttgcgttgggttgcaaaacccggcctcctctggaaggtaacttttaccccacggaggcgggggcttcagggcaccgcgctcagttgctccctgttgcccgatgtgctccactaacctatgtctgctatttttgccagagaggtcccccgggtgagcagggtcctcccgggcctccgggcccccctggagttccaggcatcgatggcatcgacgtaagtttctatctccaggccacctctgttccccagtcctgccctttcctattcttttcccagggctcctgtggggtttttttttttttcagagaggaccagggtctccccttcctgccaccccacttaaaggcaggatcagacatgggcgagagttgggggtaggatcctaggaacccggggatttttggagggagaggtgtctctgttgtccttgttggtcatgaacctccacgtttgacccttacaccatccccatctgtgaagtgagctctcctgggattgtcccagtggggtcctcagcctatcccgctcatagactgctctctctttttctcctacccctccagggtgaccgaggtcctaagggccccccgggccccccggtaagttgattggagcatatggcgctccacttccttcctttagacgtgttttgcagccccctgtttctgaagggtctcaactttgcacctttttctctcctgcccccgcacccttctgcccctgctcagggtcctgcaggtgaaccgggaaagccaggagctccaggcaagcctggcacacctggcgctgatgtgagtaggcgagtgctgggagggcgcccagcctggggtgtgtggtgggtacgagtaagtgtgtgttttgtggggggggagggagagagagaaagagagagagagaacgcgctgtggctctaaacttggcctcctgccagcgcctgattgatcgtggaactggcagcttttgcaaaaggacttgtgaaggtgaggatacctctctctaggaggcgttggcatttcctcctcctagaaaacagcagcgggtactggcttcctgtctctaaccgtgacctcacagtgcacgctgtgaactctcagccccactggggccagagggggtacggatggcaatagattgtactggcttcggcttacctgctgtgagcccactggcaggctcctggaagctagccttcgcccttgctctttcaccggcactccctgcattaatttagaaaaagatcctgcaggtaggcaaagggccagagcactcctaaatcccaaggaatgtgaaaaagaaagatgcacttgaagtgagtggggatgtgc

SEQ ID NO: 36497 - DNA, 2300 bp, Homo sapien
atgcgcagatgtgttcagaaactcttgatctatgtggcactctgaacaacccagcctgtattcacagatgaattacatttcattcccccattatcctgtgccacaattgcagcttgcatatttaaacaggtgtaccagtttatccagagagaattacatatttgagaaaacagtttaatgaattacctcacatttgcaataagtaactttaatgaactattgaaacaaaagatataggttttctggttagccaaaacttccttttgttaaactttcccttcctctgtgggtaggaaggaaagacttcattcttcattgtctctccaattttgatcttctgtccagtgatctcaactgtggatgattccaaaacagtgaaaaaaattatgtaatttcccattctaggtttaggagctctagaatccatttggcaggtgggatgacatggaaatctctattgcatgaaagaaaagaagtaatgcttagatctaggacctggatgcttacccagacatttgcataacatcaatgacaaagaaatatggatccaatttgaaatgcctagcagaaagctccttaattaagagataccagcatggtttgtggctataggcttcctatgggatatgacattttaattttttttgccttgtcacctgaggatcttttcagattcagacctggcaacattttccttgctctgtttgtttcctgctaccctcttttttatcctgtaacacctgctaacaatgtaagaagttgtcagaacacatttggatttcaagtgtctagaaagttacatcttttcaaccaatgaataagattataaaaaattaaatattttatatctttttctcctgagtcttatatttccttctcactgccttcatcttcagtccttacatttccattttaagctgtgaccactccacggagaatatcttctccagtgtgcaaattttttccaagactagattttctttcttctacttgtccttctgattgccactttttttttctgtctctaatctcccatctaaaatcttacagcatatattccctgtagagttcaatagccctgggtttcaacccagactctgacacttattggtttgtgacttggaccgtttctgttctctctgaacctcattttagtaggatctacatcttgagattgtcatcagaacagaaatagaaagtcagtgctggtggtctgtttccaggctaggggtatgctgaaataattcaaagctaaagacatctatacctaataatcagagaaacttgtgaaagcttccaacccatttccattagaaaacttgtattcaaggaaaagcaagagtcctggtccagtgtgctcaaccagttcaagttgatttccaattatttaacaattagacgcaactcatctctctcttgaatgaccagcttcagtcgtccaaaaaaccttacctgactgtctactacctttctccagtttgaacttcaatggatgctgatccattgtgaccccctgcggcccaggagagaaacttgccatgagctgccagccagaataacggtgagtcccctgactacctgcaaaggccacttctacccagctcaaccctctccacctcaccactttcccatcttgccacctccccagcacccctcctccccactctctttcgctaagagagcctgtgctttgctgtactgactagagaaatattagggaagtacacttcatactttcgacctggcgggtagaaaccacctgcagcctggcaggtagaaaccacctgcgggtgtgtggttgtccctttggtagcttatggaccctcctcccttactctcaaacatgtccaagaacacttgagttctactggccagcactggcacaggccacccgggaagtctccgaggacagccagaagctgcactggggtggatgggatggaggcagagctgcgtgctcagtcctcgcctgtgcggcggcagggaaggggttaagggcgactgttgtcattctatccgtcctcccctgccccctagctctcctccaatcccaggaccctctccggggccattcataaacagggggaacgcgcgcctcccgggcctggacgctttggcaaccgctactcccgggggtgctttttctgcagggacgaagtgccacctatgctagtggcgggtctggaagcctagaggggaaccaggctgcagagccgggccaagggattagcggcgggcggcgggcatggcctggactgcgcgggaccgcggggccctggggctgctgctgttggggctct

SEQ ID NO: 36498 - DNA, 2300 bp, Homo sapien
ttcatttttaattaaaaggcaccctcacttgatttcaaattctacttgaagaggattcattacagtgggaaggagaggggcaaatgcggaattgagatctctaaagcaatgaaaggatttcccaaacacttcattataatgaaaaatccctctctcctttcttaccagagtaagtaatatgagaggatcaatcatgcaaataaatagcttcaatggacagtccctttggaaaatgccttttcccctgtgaatctctggctggcttacctcctgtgacttcaggatgtcaggaaggtccccagctgcagtttctcctctgaggttaatagaccgcttctttctcatgagccctgactgacttaaacaaataagctaagatctggtcatttgtagttctgtcacagagccaggatggctgcactagggaatgggaattttgatagacagaaggcaaatgacagggacttgtagaaagccccaaacagcatgaggaaatgggtgtccctctgggaaagagagacaggactccaacaggtgggctatgagtagaaaataaaagggcaaaagcatggatattaagtttgcctgatttacatttcatcagtgagctgggggaggcagaaactgaaaggacttttttggaaaagaaataaacaaatgaaaaataagaagcaacgctattgttttgtaattaaataaaaattaaatcaattagaaaacgaaatttaaaaatttcaagaagccaggtgcagtggtgcatgactatcatcccagttactcaggaggctgaggtgggagaatcccctgagcccagaagttcaaggctgtagtgagctatgattatgccactgtactccagcttgggggacagagcgagacctgagaccctgtctcttaaaaaaaaaaagttcacctaaaaattactttgcttgtactgtgatttttgagatcattggatcttctgacctttagagtcttggtttttggagtaaccacccgtgtccctcaagacaaggccagaggttggccatgctgagtgggtggtaacgggggtgatgtgggggctatagggaattctctttaggtgctcaggttctggagagacggcatggcatgtgtggtagcgatgctgataacatgcctctctctaggtttgtgctccttgtaatttgctctcaccttgttaacggaggataatatgttgcttctttccagatacagtgtcctctgctcaactctggtagtctcagagtttaagaataaacaacaagtagggggcttgatgttacattttatcaggatttctatccatgaggtagagagagggaatgtgtatttagtaataggcatggcactttgaaaaagttacttcattttctgcttcctcaactttcttatttggagaataagggtaacttcagtcttaccttataatgttgttgtgagaattaaatggcattaagctttgagcattttcaacagacggaggtgcataatgaagcgttagctatgaagacgatgacaaataatgattgttgggtgttagaccctctgcctttgatacctcatttaattctcaaaaccattgttttaatgtaagcattttcaatctgttttacagttagggcatctagttacagaaaggtgaagtaactctctcaaggacacacagctagtaagcttcagaataaacagggattgaaacttaggttgatcgggcaccaaggctcccacgagtttccacacctctgcctcccagtgggcacatttttactggaacctcagccctctgaaagcttccactgtattcctatagcagttctgaaagctgccattgtactcctatagcagatctaaaagcatctactgtgttcctatagcaccttgcctggatctttctggtgaatttccccacatcctgattttatttttttcttttcagcaaactttcccctgtaaatccctccttcagtataaccttgttagctttgaggacacacccctaggcctgggctcagagcgctgcttctccccacccctttcctttgcttcagtttaaagtgtcacgagatgcctctggttctctccctttgcttttagccctcaccgggggcaggagggaccaaggctgggcccagaacacatagtcctagggtaacagtgaaggggtcgtgaggggacagtgactcccttccaaccccttcttcatagggactgttggcaaacaaagaaaatcaactgggaaaatgaagacctgctggtaagacaataaccctggaaagagtggtggggagatggag

SEQ ID NO: 36499 - DNA, 2300 bp, Homo sapien
aagtcttagttttagttcagcacaaagaccagtttcttactgtacagcttctgttcaagcaatccttttccctttactcctcccaaccgccaccacaagacatcccacttcaactctctggaatcattttctcctggaagtttttcctgacccatgacctcttcccaaagttggattaatgcttcttctgagcttcaatagctctctgtgcatttatctctgcactatacacattacatcatagggtaataatgcaaacactccacccaagttctttttcattcatgttggtatcttccaagattagcacactgcctggcacacagcagatgagttaacaatgtgatttgaataaaaagaacgtggaacagggaaagaatcttggcacactgtgtgttttagggatgcacggacgtggaaatgcaaataattggttgtttactatattttcctaagacatggctggaactaaaaaaaaaacagaaaaagcctttccaattttgaggctaaagttcaagtcacaaaacaagcaataaaagcctgtttagcaaggatagtaaaatggtatagggctataaaagaagggacaaattagaaatcaggaaagcaggccattcatacaaatgcaaataaattggttcacaggataagaggacacccaatcatgtaaaaactggtacaagccaggcacggtgtcttaggcctgtaatcccagcactttggaaggccaaggcgggtggatcacctaaggtcaggagttcgaaaccagcctgaccaatatggtgagaccacgtctctactaacaatacaaaaagtagtcaggcgtggtggtgtgcgcctgtagtcccagctactagggaggctgagacaggagaattgcttgaactccggaggcagaggttgcagtgagccgagatcacattactgcactcccgcctgggcgacggagcaatgctctgtctcacacacacactcgaaaaaaaaaaaaactggtacaaagatatattcaaaacctgtcccctaaatggcctacgttacaagacctcaccattactttcaaatgaatgcacaaagcttttcccttctaattcattcttattgtggtaaaatatacataacagaaaatttaccattttaaccatttttaagtgcacagttcagtagcattatgtccattcattgttgtgcaaccaacaccactatccatcctagattcatttttaaaacaagagtcgcagctgaaattttcctttcattaactcagctttagcaacatactgaactttatgcaccacaaaagtttttgccagataaggttcagaaacagggaagagtgaaataaatcaatgatccttcgtgggcttctgttaacggaatgtattagcgaaaggcttcacttcatcagccccctcccgccctttttggcgtcataaaccaagaaacaaccagatcagcacccacatctcccaagatgcaaacactgggtcccgaaaggcatctgtcctgccccggcgcagatcccctgcagcctcctttcctactgcacaaatcgactagcgcagggaccgggctctctacccgggactgcacggaggagctaaagagagaaaaggagaaacaacattgtgagaaaaacggctaaagttctcgaactccgtgtttttgccctcttcttgttcactactcttcaaccacctccaagttccatcccttaaacccacaagcgagccccttttcttgacgcgcgccttttattgacgcaaacctcccgttctcgcgggaacttgggaacgggagcctggtagggaggacaaatctctcgaaatctcagttggcgctggagctggaggggcagttgaagctcctgaagggcggggcacggagcttgaaggggcggggcctagcctcagagaggggagggaagaggcgggaggaggaggtgagagaggccgggggcggggccgtgcggccggggacctgttgatcgcaggtatagccggctggcccgggctccctcgggactggggcgactgcgcatgctcgctggccgcgctgggccagtagccgagccgcggtgacgaaccggctccgcggttgcggtgtttgcggttgctgtgatggcgatgtgagggggcccggggcgggatggtgctgacccgggtcgggccgtcttcttgcagctggacaacgagctcctccgttcgacaggcgggggaagaggccgagccgggcgagaggtaacccccttactgtcccctctggctcccccggctcccgacacccacgacccctccctccgt

SEQ ID NO: 36500 - DNA, 2300 bp, Homo sapien
tttgttattgtactttgaattatatgtaagtgaatccttaatagagatataatagttaatattgatattgaaattgtgaatgaaaaaagtctctaaaacttattcataagccttcgaaggacatatatcttttatataaattgaaaatagtaagtaactaacaaaacataggtttccttaagacagacttttttatgtctactatttggtttgagatgttacttttttttctcatagggggaacggtgtatttttaacaacgggaatcagtaactggaagtacaagattggttatttaataatgttaaaaatgaggctttgaaaagcagaggtaagaatataacttttttgcacttaattcttaatagattcgagtatttgccaaatttctatgaagaactgcttcaagaattgggaagggtctgagattttaccccacttgcaagctgacaagttagtctgccacggtgccatggatgttggcaggacatgagagtcatggatcaaggtcgaggattgtttatgctcatagcactagcaagagtaccaggtgacacctgtatgtgagtagtttgtgttacaggagaagaaccctgaattaggggaacctgagtcttttagaatggacagtaaacctgcctgacttttttcctggagggaggctttatctgtattatacagaacagtagacaaatctgccctttgttctagtataagacactatctctgacttctaagattgttcattatacaaacatccgtgaaaagatagtctggaacaaaggctgtctatgtctctgcttgtgagacgtgtagaaacatgagagatttgtgaagaattgtcttccaacactttcttactctaaattgctttctacacttagcttacttaacagtccaagaagttattctttaaatatgtactgttgataaggatgattgttataattttttttaaatagtgaaaaaatggaaactactgaagtcacccaacaataggggattgtttaattataacatgttcccagtgtcatagttaacaattaatggccgggggcggtggttcatgcctgtaatcccagcactttgggaggctgaggtgagcagatcacttgaggccaggagttcaagaccagcctggccaacatggcaaaaccccatctctactaaaaatacaaaaattagctgagcatgacggcgcatgcctatagtcccagctactcagaaggctgaggcaggagaatggcttaaaccccggaggcggggattgcagtgagccgagagcgcgccactgcactccagcctgggtgacagagcgagactctgtctcacaaaaaaaaaaaaaaaaaattaatattgtaaaactacattattgacatatatgttcactgaataattaagtgaaataagcagatgataaaatgtacatgtggtttgatcccactattaaaaaattttacaaatgcacacacatgaagaacgtaccaaagtatgtatttcagtggatggaattgtgaatgttttctatttgtgcttgtctattttcttttcttcaacttctttgcaattgaatactttagaatttgtaataaaggaaaaaatctctttctctttaaatttaaaagtgaaaagtgatttaagaatttttttcttcacttaaagaaaaacctttcatcagcttaactggggattgaagagtgttaatttttttttgactctggagttacttacatgtgcaatgtagcacaagaagagaatattagatatcttcactattaaaaaagttcctatctataagagataaagttgagtttcttttagcaatatgttgtattatttattatcacataaatgtcatcaagggtaacaaatcttagaaaaagctttctgacaggacaatcttaaattatagagagtagtgcagcttagtaagtatacattctggtcctatttagttgggttaggttgttaagtacactgaaataatttgtttttattttctgcctatgtgtcatattctaaaatatgtataaataatagcatttttataagttggcatttttgttacgcttctcatgattttttccctttccttaacaaaggtgctgttatcagaatagtcttctgggtataaattaaaaatgactgaagttcaagcaatggtagaattctctgtggagctaaacaagttctacaatgtggatttgtttcagagagggtatgtattttattgtgaaaatgatatattttgcataagatgtacagtttaaatttaaatttaattacatatttttattcca

SEQ ID NO: 36501 - DNA, 2300 bp, Homo sapien
ttaacagtgtacttcccttgggcttttaatgagcacctcctgtgtcagttactgtgctaggtgctgaggaaagaataggtccctgcctttaaagaactttgacttctcctgttccctctcctctcacagcaacagtattaagaaatcagctcagcattgggatgggaaggagaaattcacccagcaaaatggggcttcaatatatgagatgggcttataaattacctgtataaggaagatatccatctgcatgtaatattaaagtagatttaacatgtaatatttacaaagaaaaacatatgaaccacattttaacttagaaaaaaatcctctctaaaaggtagtatgtttattggtaaaatttataattagtaattaaataaaaacatttctccttttaaaggcaaatatttatttcaaatagcttagaccagcagtccccaacttttttggcaccagggaccagtttcttggaagacaatttttccacggattgggggaagtgattgttttgggatgaaactattccacctcagatcatgaggcattagttagattctcataaggagcatgcaacctagatccctcacacgcacagttcgcaatagtgttcacgctcctatgagaatctaatgccgctgctgatcccacaggaggcagagctcaggaagcagtgcttgctcgcctgctgctcacctcctgctgtgcagtccagttcctaacaggccacagacaagtaccagtccacagtctgggtgttggggttagacagtgttagcaattattattaattagtctagcttcagcatgatcatgtattcataagattttcaactttttctctggtgaggatggcttttatgtcatgtatattactttgggcttatagatgtaatatagaaagtatcgtaataaaagtgcccttatatttaatttcagaagttaattacagaatgaatgtcaactttattccaaattatttgcttaaaatattttatcagaaaataaaattctaaagcaaacccagacttcagttttaaataagtatatgatagaaataaaattactagtaccttacacatagacttacttaaaatatatttctcgaatgaatgaatgaaatagcacaatacagttttcattgttacttgaaaaagtataggcatcaacataaagcttaacagtttcctagggatttttaaaatcaagattcatcttcagtaaatattggtaatatattgtggtgttcttaaactttacggtttttattttcctttctctttattgtgaattttagtttattcttgaatgcatcctgtaagaaaacatctaaaaatactattaacttaaaaataaaagtatttgttacatattctaaactatcaatgtcttttatttttattctagcaaaataaaattgtgaacactaatatatttctataatgtactattgaccaaacaccactatattcaccagttttaataagtggatacagagtagttcttgattaaagaatatttccttctattacttaccactttcattgagttttcaaataagcatatatttaaacttcttaaacttgactatgctttgaaaacttttctaaaatatgttccctcttttaaaataacgccttgagttcctttcggcttttttgcctttctcttttctcccagatgaatgatgtacattttctgatgacatataattaaatattggtttggtgcagggagctcttactgaacatgagagtcaggagttctggaattaggtttgggcaagtcacatagcctatatgaaccccaatatctacacttgtaacagcagggagttaactctgagatccctgccaacctaaaattctgagtctaattaattaagacatattggattatgaaatgttgagtggcacatacatttaaattaaaaaaccaaagaaatatatacttgaatgtacatcatttgtaattttgataagctaattaactaactgcactatcagatcaacactaagtctattattaacaagttggaaaattctagtaagttttgttgtgaaaggagtatagtaactagtgctgtgtgcaatccttatgactagccaaggccaacatgcagctcctatatgagcgtcttctcagaagaaaacagctacgaacacagaaagacaaccatctaggtacgtttacaaatagcttaagtaaatgatcccttttaattaaaaagtatgaaattttgctttaaattagcatcagatttcataaatgtatatttaataatgtggtatgtttccacc

SEQ ID NO: 36502 - DNA, 2300 bp, Homo sapien
cctgggttcaggcgattctcctgcctcagcctcctgagtagctgggattacaagcacctgccaccatgccccactaatttttgtgtttttagtagagacagggtttcaccatgttggccaggctggtctcgaactcttgacctcaggtaatccacccacctcagcctcccagagttctgggattacaggtgtgaggcaccacgcctggcccatagcttctcttctaaagaacattacactttaggaggggagatgatttattttaagacaaaaggtggtaaaggctatggtggtaatcataatagtttatatttatatatgctttccagatttatttcatgcagtacaaaaatacattggcaacactgaagagggagaagggaagtttaattctgacgggtgattgtggaaggcgtaatggaggcagtttctctccttaccataagatgccggattgactttttaaatacgtcatgttattaatactctcctttggaattttttaggtacgcagattttctgaggcattcttttgttttgagcatccaagagaagctgccattgcataccaggaacttcagtgagtagtataaattcaaaattaaaatgatattacttccttttacataagatacctgtctcagaatttatcagtgacagaatatacagtattaacaatataagaaattaggagaatttgaatttcagaaatcccatctataatcaaattgtttcatcttattagttacttcattaaagttccatactttacatataaagaagcataatgcactgtattcctccctccttttttatcagatctaccataatcttggtagtctcatacagctttggctgtagccttccatttagccatattctgtctttattttcacaggccagaatttcttatgttcatccttttttattacagattttcatatatactgtcttctgtaattgtaaatgatttacaattaaaatatccagaacaaatgccttctatctttcctactgagtagatttagtcctggttttctttggcattaaggaatattttgaggacattatgctgagcaaaaaaagctagacattaaaaattgaatactgtatgattctacttatatgaagttataaacaagcaaaagcaagatggaaaaaagacaggacatggttttcttggcattgacttgtgctggattgggaagacatgagggaaccatctgagtagatggaaatgttctgtatcatatatccatttgtcaaaagcatacagctaagatttatattttaatgcatataaattataccacaaaaaaaatcctgtaaataataatagagtatcagggtaggtagtgagtgctgatagaaagggtatatgttaactgttgaagttcggaggtatgtatatggggtattttatactattctttgatttgtttgaaattttccataagacagggttttctgttttaactgttttgtattagaaaattatacatcttgttttaaaatagctgttaattttatttgtcaatatatgttaagtagaaacagtagaaatgaaacacgtctttttcccagcactagcatcaaataattattaagcagttaagcttttggtatttctcttatatgtgatttgcagcagatttagaagttgagacattaagcatagaaattcactttaaaataacataagaaagtatggaagaatataatgggaattacataaataattagcagtctgtaatttaataagtcaataatttattgccaacaaactatcattttcattttaccagtttttatcgctgaccaagcagctctctcataagaaggttatgtcttgcagatgagggataggaattgaggagggaaggggaaagggtagattctacaaaggggagttgggtataatttttctaaattacaatctgactgaagaaatatttttcagtgctcagagtcatctacagatgtgcaccgctatcaaaaatacttccttctgcagttctcttccacccttacctattgaatgtagtgaattagatggagatctcaattcattacctataatctttgaagataggtatttagattcagttactgaaggtaagtgtaatctaactaaaatatacaagctatgtgtatagttttcagtatattcttcctaatatacataaaaccattccctaatgtggaatagtttttttccctctctagttttatttatgtttgaggatattagaagttatagttagaaaaagaagtcttaatcatatgagttctcacacctt

SEQ ID NO: 36503 - DNA, 2300 bp, Homo sapien
gagttaaaactctgtgaatatattttaaaacattgaattgtacactttaagtggaagaagtataggctctgtgagttacatatatgtatatgatatatgtatatgatatatgtatatgaagcaacaaaaatactttcaaagtttgtatactttttttttttttttttttttttttgaggcagggtgttgctcagtcacccaggctagagagcagtggcgccatctcggctcactgcagtctcaaacccctgggctcaggcgatcctcccacctcagccccccaagtagctgggattacaggcatgcaccaccatgtccagctaatttttgtagagatgggggtttcaccgtgttacccaggctggtctcgaactcctgagctcaagtgatcctctcaccttggcctcccaaagtgctgggattacagatgtgtgccaccttgcccagccagattttatgactgctgtatacttttgtgagtcagttttccacaagcaagacatgatgattacaccagtatgagtttcattatttaattagatcttgttaatagatgtaggagagaagagtctttgtttccaaaagggtagaataaactgactatattcatatcccaactaggttagaggaagaagctggttctgcatactgtaagcttttgggcagtttgtttccaactcgaagtatagggaataagaagagagataagcagtttctacctaaagtcattttttaaaaaacagaattctgttaaaatatgggagaaggttcaggtttgttgtttggaggaagagattattttcttgttgtaattattcatttgtggatcttaaaatcttgttagcttttattcatttattttatgatgagaaaaataatatttcaacttatttattcctcctcaaaagtattgtctttcaggttagattgtcagttataatcaatcattttccagaagtgtaatctggttgattgtagactgtcagctaccatcagaattcccacccccactactttaggaagttcagttcgggagggaagtttgtcctgagcgtctcgcaagatatacctgtaagccagtgtttagacagctctcaagctctctttcactgctaattgtccccagggaatcttataccatctgttgtaaaataacagtaagtaaacaggctattttgatttaaaccaggggtccccaaaccctgggccacagactggtacctgtctgtggcctcttaggaaccagacctcacagcaggagcactggggcgggtgagcaagcattaccacctgagctcagcctcctgtcagatcatcggtgagcattagatttgtgaacgctattttaaactgcccatgcgagggatctaggctgtgtgttccttatgagaatctagtgcctgagttggaatagtttcatcccaaaagcatccccacaactcctgtttgtggaaagattgtctttggtgaaaccagtccctggtgccaaaaaggttggggaccactgatttaaaccatttcataacaaaagtgaagtgctagctacataaatattattctttttgcataatcgaagattcatagtaggaaaatgcatatattttacctatgccttgaaaatattgttagtcaaaaactgtccatctttgaagtatagaccagagaataagagaaacagatatataatttccccaagttgtcgtttataaatacaatttcatcattttgtttgaaatgatgaattaagaagtaaataatttgtgtatgtacctaagaaggcaaatatgtaatctagtcattatattattatctttaatacgtacttatatctaagcagttacaaactatgagtaaaagttttcagattaatatgttgtttctataaacatttaaattatgtaataatgaggatcttctatacattctcacattttttccttcaaaatgtggtatatcatttcaaagtatcactatacttttacaacattagaaattttcaaattgttagtattcacatccattttatagtggatcagctttgatttttgtttctaaaactaatgctgtgagaaaattaatttttttttcctcttaaagctttattggacattcgttgggcaatttaataattcgttcagtgcttacaaggccaaggtttaaatattacctcaacaaacttcatacctttctgtctctttctggacctcaccttggtacactctacaacagcagtgctcttgttaatacaggtaaaaagttttattgttctgtattaaaaatatggaatagggagaaaaata

SEQ ID NO: 36504 - DNA, 2300 bp, Homo sapien
acaggttcatttatttggttttggggggtttttttggtttttgttttttgagacggagtctcttttgtcgcccaggctggagtgcagtggcacaatatcagctcactgcaacctccgcctcctgggttcaagcgattctcctgcctcagcctcctgagtagttaggattataggtggctgccaccatgcctagctaatttttgtatttttggtagagatgggtttcgccatgttggccaggctggtctcgaactcctgacctcaggtgatccaccctcggcctcccaaagtgctgggattataggagtgagccaccatacccagccattaattatattttcataaaatataacatctcaactcattctattggaattacagatttagctcattcaatttataggaaatgtgtgccataaaatccaattggcaaagccatttctcactgtcataaacagtcaagtcaaattgactttttgtcagaaaaagttagactttatattttgcttggttttccagagacttttataccctagggccatataccttaataagatctgaagtagattggagagataatatctttctcttgtaaagtgggaaaaagtcaagtcacttttagaaaaaaaacacatctggaggttgggatctggaaatcaattttctttttttcttttttatttttagagacaagctcttgctctgtcacctgggctggagtgcagtgctacagccatggctcactgcagcctgcacctcctgggctcaaggggtcctcccacctcagcctcctgagtgagactacagttatgcagcaccacacctggctaattttcgtagagacaggatctcacttcgttgcccaggctggtctcaaactcttgggctcaggcaattttcccccctcgacctcccaaagttctgagattacaggcatgagccacctcgcccagcctggaaatcagttttcttaaagctatacacacctatctacaccatagagagtcttagatgactccaggggtaaatgtatgaatacctgtgctctaggacacatagatgattcccaaagtagtactgataatgatgaagatattagtgttaaattgtgtcacgagatgtgagaatgaaggggggggagtcattttttcttaatattttatacaatattattttaaatatatgttcaattaacttctataatagatacttgattatttcatttatctccttaggattgtatacattcaaaatgtcacctcccccaaaaaagtggtataatctaaggatggccttatttttggcatagatagtatcatacggtcacacttggctgtgtgtgaatccatactcatctcatgattaagatccttaggccaggcatggtggttcattcctgtaatcccagcattttgagaggtgggcagatcactttgaggccaggagttcaagaccagcctggccaatatggtgaaaccccatctctactgaaaatgcaaaaattagccaggtgtggtggcccacacctgtaattccagctactcaggaggctgaggcacgagaatcacttgaacccaggaggcagaggttgcagtgagccgagattgcaccactgcactccagcctgggcaacaaagtgagactctatctcaaaaaataataataataatttaaaaaaagaaaatataaatcatattaagcaagtgttaaaaatgaaaagaaagtaaaaagctttaaatgatgtactgtgaggtgttttgtttgttttaatggaagagtataattttgtttctttggaaatagtcctaaatattgatgaataccttttggaaggtaagaatgtcatggaatactttctatagaacattagtccacatattctgttcccgcctatctccacaccactgagcaacagtgcctgctcccagtgcaaacacacattcttatatcagcatcaagactacataacagtgaggtgggtttttttgtagagaacatacagaaatttggagaaaggatcatcaagtattgacaaagtcagaaacttagtactgctaaggaaatttattttttggtcacttaatatgatactaataacttgtttaaaatctagttaactactgcattataatttattatattctattcacagggcttcattatttcaaaaatgttgtgctagtgggatccctacaggatcgctatgttccttatcactctgcccgcattgaaatgtgtaaaacagctttaaaggacaaacagtcaggtaatggaataaaattatttcaaagagttatagg

SEQ ID NO: 36505 - DNA, 2300 bp, Homo sapien
ttatagcgaaccaaattacagtccttgctttgcagaacgggtcgaagcaagttgtggatcatttctgaatagatctgtcctatggaaccaacagaaaaaaggaaaattagttcacaatagtaactgaaaataaaaaaactatgccaatttttagataagttataaaatttagttacattatttccatataaagcagaaaaatggctctttttaaaaaggtttaattttccttcaactatcatttttggttctgtttatagaaaatgtaagtaatcacattatctagtcaagtggaaataacaaatttattatacattattcttgaaatttgatttttttttttttttatttttgagatggagtttcactcttgttgcccaggctggagtgcaatggtgtggtcttggctcactgcaacctctgcctcccgggttcaagccattctcctgtctccgcctcctgagtagctgggattacaggcatgcaccaccacacccagttaatttttgtatttttaatagagttggggtttcaccatgttggccaggctggtctcgaactcctgacctcaggcgatcctcccgcctcagcctcccaaagtgctgggattacaggcgtgagcccctgcgcccagccgaaatttggtatttttaactcaaagcaatgcctataacaaagaaatagttttctttaatgttaagtcacttataactcattaaacaattatgaaaataagctagacatggtgagacattttgataaggcaaaattataaacttggcctacagcaaatactttaaagatgtttctgtggcagtcaaaatttccaaattattttaagaaagaacagcaacctcctatagtcagatgaacaacgtgagcttggctcaagtaacatgatcttctgtttggtctataggtttatttagtacttgtgttcctctctccttatttttgttttctttttttgtttttggagacagggtgtcactctgttacccaggctggaatgcagcggcatgatcacaactcactgcagcctccacatcacaggctcaagcaatccttccatcttaaccctcccaagtagctgggaccacacaggcgtgcaccaccattttaattagcctagctaattttttatttttggtagaatggggtcttgctatgttgcccaagctagtctcagagtcctggactcaggtgatcctcctgcctcagcctcccaaagtgctgggattacaggcatgagccactgcgcccaaacaatgtttagctaattcttacaatggatttactgaggtcatactaagcacataaaagataacgattagaatacatccacataaatgtataaactgccttctaaggggcaaaacattgtttacaatgcttatgcattactatatactaataaatgagtactaacagtgtccatggaacgtgtgagctttagagaggtaaatattaaatttcagaagacaggtaggatgctgcctgaggaatgacaagaagggaaaagtacacagaagtacaatcagatatagaaaagagaggtgtttaagagaaagactgacttaatacatactcatcaaaaaactttttactcccacctctcctcttagttttcattttgagtcaggttggatttgtggttccatgctattttaaaaatatgttaatacaggaagaagtctaaacatgtcttcatcatttgattccccttgttccccaatgtcacagaacctcactattaaaataagggacatttatctagtttcagctactcatctgaaggttaagactcttctgaattttttccttaggtggactctagcctttgctagaacagaagttaagaaaaggttattttgatgtcacaaatgtacaataaaggagtacttaccatgtagcaggcagcatgttaggcactgtcaataaaaatgtgcttaagacagttcttgccttaaggagctgttcaccgtcacaatgtagaaaaataaaggattaagagtttaaaatcagcctcattccaaaaacggatctgaggcaatattgagaggtaggagaccagggttttttttttttttttttttttttgagacagagtttcgttcttgtctctcaggctgcagtgcaacagcatgatcttggctcactgcaacctttccctcccgggttcaagctattctcgtgcctcagcctcccaagtagctgggattacaggtacccgccatcacgcccggctaatttttgtatttttagtagagacggggtttcaccatgttggccaggctggt

SEQ ID NO: 36506 - DNA, 2300 bp, Homo sapien
ccagctgccatgttgcaagatagcctttggagaagcccacttaacaaataactgagaaggtttccagtccaaagtccacaaggaaccaaatcttgccaataatcatgtgaatgagcttggaagcagatcttcccttagttgtgcatttatacgagactgggacttcagccaacagcttggctgcaacctcatttaggacccagaaccacagtcactctggcttctaggttactgatccacaaaaactgtgagagaataactgtttattgctttaagccaataaattttgggataatttgtgaggcagcaatagataactaataatcttgttctgattaagagcccttctgcaatggaagctcttttttttttttttttttttaacgttcaataggacccaaatgttttcatgctttgggaccactttgagaggtcctattccaaagacccagtccaaaacttttacattcccagttcccagccacttgacaaaccagtcactgcctatgaaatgtcgatttttatctcaagccatgtctctttttaggcaaagcatacaagataagctaaattctggccaggcacagtggctcacacctgtaatcccagcactttgggaagctgagaggggtggatcccttgaggccaggagtttgaaaccagcctggtcaacatggcgaaaccctgtctctactaaaaatagaaaaatcagccaggtgtggtgacatgtgcctgtaaaaacataaaatacataaataagctaaattatgcatgctggaaataattttttttccctgttctgttccttcagggcctctgttaagtggggctctaaatatgaaaagcagtcagttgccagctgggccagtttattgagcaaagccatcatccgactttgaattttttcctcagtcagctagtcacaaggaattcattattaaactgtagatataagctaaaggtcaaaagcatgatattaggactgtgagctccctacaaatgaaaactgtttccgttttgactttggcccagttctgtgtatcccactttctctcttttttctttttctgtttttgagatggagttttgctctgtctccaaggctggcgtgcagtggcgtgatctctgctcactgcaatctccgcctcccgagttcaagcgattcttctacctcagcctcccaagtagctgggattacaggaatgtgccacctcgcccggctaatttttgtatttttagtagagtgttggccaggctggtctcgaactcctgacctcaggtaatctacccgcctcggcctcccaaagtgttcggattacaggagtgagccaccttgcccggcccactttctcttcgtaaaaggatctccttatctaggagaaccagataattctcagttcatgataagaagcttcgatcgtataaccacttgatgtcacatggtcagacactaccaaggcgcaatagctagccagaaacttttctttaaaagaaaagacaaaattccagaattctgggggccttcactatgattctgtaaatatttccacgagttgcacaaagcatccaggtctgccacatccactcaacgctatcagagctggtgggatgtaagggttaaggggcagagctcattgcactggatcctggcctggatggagagccttttcttgctttgcacctcattcaaaaatgtcgcctttcatatcatctggttagtcggtcagaatggacgaactaggagctgactgaacaaagatttaaaacacaaaacagggagaattaggtaaaagaagcattttacatgagtgagagagtaaaaggtgctcaatctttgtaaactataaaagggatcttccacgggccatttcggctcagactgacaagcatgaacggaacggaattattccctcttctaactgcagccacgatttggcgttttaacaccgggctcaaggtagcctgggtctctcttggccaaagagcccagggatgcctctaactccttttctaaagccggccacggaggccccgccctctgcagggaggctccggatcatgccccctgctcctcccactactgctttgcgcctgcgcggaggctcggggagtcggcgccatgaccccatcgaggcttccctggttgcttagctgggtctcggccacggcgtggagagcggcaagtaagcacctggcctcggggccacggtcgcgggaggggtcgtgaaggcccaggcgcagagagaagcgcctcccgcggaggaagccgcgtgtgtcctggccgttcggtgttgccaggg

SEQ ID NO: 36507 - DNA, 2300 bp, Homo sapien
agtatttgtactggacattgctgtgacccttcaatccatcctgaaggttgttttttggtggtaaacctgtattctgtttttctgagtcctcacagtgctgaacagaatttttgtagggaggagaggtactcaaaaaatggtgtttgtttactggttactgcaggactaactttcccaaaagatcctttttattatgctattatcctacttgaagaatctacaggttttctttttctttttttggggggggggtgggtggggaaggagttttgctcttgttgcccaggctggagtgcaatggcctgatctccgctcactgcaacctctgcctcccgggttcaagcgattctcctgcctcagtctcctgagtagctgggattaaacaggcatgcgccactacacccggctaattttgtattatcagtagagacagggtttctccatgttggtcaggatggtctcgaactccccacctcaggtgatccgcctgcctcggcctcccaaagtgctgggattacaggcgtgagccactgtgcctggcaaaaatctacaggttttctactgtcaatttgcatcaaggccagactactttgtctggcttcccaagtcttccataaccctatcatagtttacttatgcagccttatctcaaaagtagtaccttttgttccagtctgttttccaaggtacttcaggtcttcatgcttttgtgcaagctgctctttcttaatatctccctccccagtccccatctaaatccagcgtatcttcaggacaaggctcgtaagttctacctcccacataatgtttttttctgttcattggaactcaccaatatctccctagtagttatttgtcagagctatgtagtataagctctaatttgtttaattactgagcatcttcattgccatatccattcaatttaattccagaaacatttttgagcccctgtgccaagaacagggctaggtagcaatgagggtcacttttatgcagggacaggggctagaaattggccttactaagaagtgtaagaccgactcttgctcattgcctttcttagcatctgcttcatcgcaggcaaggactgtgtttatttggcttgcataagccccatattagaacttcctcataatatacaacatgccaaatcatcgaaactgcgtcacccggagttcaaacttcatgagcctggattagggtctgggttccaatgaaaagtgttttctttagttctctttctcttgcattaaggatcactatttacacagcttcttgttaaagtatcaccgcctagtacttgggttcctggtcacactttcccccttatggaagggcttactgccaggtctttcagactctggagccagactgctttggatttaaatctcaactcctccactagtagttctgtaatctggtcaggttacttaactcctctatgcctcactttcctcccctgtgtaatgaggataacaatatcataaggttggggaaagggttaaatgagctaacagttcgtttaacagagtaatcactcaatgaaatgttatcccctaatacatgtcactactagattatttctcgcccttaaaatgtaagagaccgtttttcctcttttcttccatccgtgtctccagcttctaaactgcaggcgaataaacctcgaatgagtaaatgaacccacccagtcgctagttatttctgcatttccaatgttgtgccagcaagagcaaaggcaaatgggcaagtcaaagtaggcttcttgtaaaaggtcttccattactgggttttactagaggcccttgcggaccatcacatctcaaaaggggggaaagctcgtatgaggcagtgccagctacctttcgggaatcaccttgggcagaaggcctttttgcaaaaagactcggcagcccgggccccgtaggttcggcgcatgcgcagcgcgctcggcgcccgggttccttcctccgcgccacccggaagcctcggcgcgacccagtccccctccccctcccctcgccggctagggtggtgcgtgccggcaggccggtcaaggaggcgggacacgtcggcgctaccaccgccaccgccgccgccgcccctcctcccgttccagctgccgctgccgcttcctgggctgagtccgcccgcggtcccggcggcgccaggtgcgttcactctgcccggctccagccagcgtccgccgccgccgtagctgccccaggctccccgccccgctgccgagatggcgacgcgctcctgtcgggagaaggctcagaagctgaacgagcagc

SEQ ID NO: 36508 - DNA, 2300 bp, Homo sapien
accgactcttgctcattgcctttcttagcatctgcttcatcgcaggcaaggactgtgtttatttggcttgcataagccccatattagaacttcctcataatatacaacatgccaaatcatcgaaactgcgtcacccggagttcaaacttcatgagcctggattagggtctgggttccaatgaaaagtgttttctttagttctctttctcttgcattaaggatcactatttacacagcttcttgttaaagtatcaccgcctagtacttgggttcctggtcacactttcccccttatggaagggcttactgccaggtctttcagactctggagccagactgctttggatttaaatctcaactcctccactagtagttctgtaatctggtcaggttacttaactcctctatgcctcactttcctcccctgtgtaatgaggataacaatatcataaggttggggaaagggttaaatgagctaacagttcgtttaacagagtaatcactcaatgaaatgttatcccctaatacatgtcactactagattatttctcgcccttaaaatgtaagagaccgtttttcctcttttcttccatccgtgtctccagcttctaaactgcaggcgaataaacctcgaatgagtaaatgaacccacccagtcgctagttatttctgcatttccaatgttgtgccagcaagagcaaaggcaaatgggcaagtcaaagtaggcttcttgtaaaaggtcttccattactgggttttactagaggcccttgcggaccatcacatctcaaaaggggggaaagctcgtatgaggcagtgccagctacctttcgggaatcaccttgggcagaaggcctttttgcaaaaagactcggcagcccgggccccgtaggttcggcgcatgcgcagcgcgctcggcgcccgggttccttcctccgcgccacccggaagcctcggcgcgacccagtccccctccccctcccctcgccggctagggtggtgcgtgccggcaggccggtcaaggaggcgggacacgtcggcgctaccaccgccaccgccgccgccgcccctcctcccgttccagctgccgctgccgcttcctgggctgagtccgcccgcggtcccggcggcgccaggtgcgttcactctgcccggctccagccagcgtccgccgccgccgtagctgccccaggctccccgccccgctgccgagatggcgacgcgctcctgtcgggagaaggctcagaagctgaacgagcagcaccagctcatcctatccaagcttctgagggaggaggacaacaagtactgcgccgactgcgaggccaaaggtagcttggacgtcgtcgctgcccacggtcggggcctcttgcgaccggtgaccttcccgccgctgcggcgctcggggcccgagcggacgcctcggcttcgctggccggctcctgccctgactggagggcgggtggctgagcgggcgggcgcggggctcctgtcgaccctcaagtccgccagaggcggcggcgaggtcaggcccgcaggccctgtcagtggccccagcctcccctcctcccagacacgggtttgagcaggtgccagggtagcgatgctcggaccctccacagggctgggggtaggagcgaggctgggagcgcggaaccgggcacgggtctgggcagagcttagggttagagagttgccctcctagctctgctcatagctatctctgtgggtggggccgcgcttaggtctggatcccctcctctaccctccggtgtgaccacgtcctcccactccgggctcggattcttggtctcctagatggagccctacctgcctgcccacctgacagcttttgtacaaggcttttatctctgcttcctgaaaaagagtatggtggtctttttcggtgggtttgagttttacggaataaattaattggagaaaggtctttattagtagtagtattgttttttagtctggttattagccagaatgaagaggaatttcattacatgagtctcttggaggacggtgggtttgtatttctgaagattttagtaattaggttttctctgaccagctagtttgggagaatatgtggacactgatttgtgtacctcataaatgctgaaggttcattttaaagatctagagatggaaaaaacctaattttagttttttcggttggagggcttctgcctcagcctttgaaacagatatactatttttagctgctatgttttgtgtttggagatctgatttatgtttaatgtcttgtaagtaatctcaagggaaatatt

SEQ ID NO: 36509 - DNA, 2300 bp, Homo sapien
aaatagattgattttaccatctgccttacctgtctggggtctagtctttcttaaaggggttagttagaaatacttagctgacaggagtgtacctgtgttttgggggctggagaggaacagttccagagtcttcattgttgacatggagaaacccctttcctgttctttcatatacatatacatatacatatacatatacatatacatatacatatacatatacatataccaacagtacctagacatacacaagggctaagtcctgttttttcttggttaagcccttgggtcccagaaggccagagagccttcgattagatgctctgcagcttcctgaagtgtaaaatgagaggcagaagttgtttcccttttatcctggggtcgtagtgctggcgagtggagcaccagaaagtaagtggacatttgagtgcttactagtcctgctgattggtttggctgtttttagactgtgtccttgttgaggtagatatttcatattatgatgtttacagtatgtgaatattaggctgctctactatgagagtggaatcatagcttcccaacattttgggttttcttatagttgtctcttatccacagggaatagaccccagggttttcagcagacttttaggttgaacagatactaagtgtgataaaaagatcacttagtgatgtagttgctttgttttataaacaatattaacaataaacaccaagtacttaatccaaccattgtgcagaacacttttgtgatcattaagcttatcccaagtttataggagagagactgaaaggagaagtaaagtaacatgtctgagtgtaccacagaaagtcatgggggcaggctctagtcctggcagacaggctccagcccatgctcttagctctatgatctgctgctgcttcattggtagcttagatatattttattcaggggtattgtgatatttagtattccatgatatctaatttcttacatatttgaatttttggaaaattaagcggctttttgtcgcttacaattcttgcttagtcataagattcaaaatactgtgtagtttataagtacaatgtttggatggtaacttattgcatggtgttctaggaggacattaaatgtttgaatttaatttccacttgcaactcaccttattctgtagtttgagaaggatcagccagcttttactagtcttcatagaattctttgaaactctcttcatattcaaaacaagtccatataacatgtgaatgtgatttaatgtttagtgactacggagatgattaaggttagcagttgtgattgtataatagtgtgtgcaagatatgagattgagaatattttatattaaatatctacatgtttatttgtatttgtgttcatttgcccccttgtccaaaagtgaagggcaggatatgttcagacaatagatggtcaaagttttgctgtaccttcatttctggatagattagaagcagtctaatattgtagttaaaactgattagatgtataaaaatcctatgatacaggttttgaaaagataaaaccttttaagtagccattgcaaatcctcttacagtctgttgtagttgtagaaatgttctttattccaaaggataccagtttcttgaagcagtagttgctatggagtggtggtcctctcatctctaactattgttgagccccaggatttgatgagcaaaaacttggtgtcaccttaggtagtaaatgcaacttactgtgaaaatgcttcagtctacctacattaacagattcaaattaagaagtactgtcttgattgtagatgtttttatatgggcttgggcttgtaagtgatcctcttgaatggcaccattttaccttctacaattgtttgattcctatctaattttataactttatttggattttaagtaatggataagctgcgctttactatgcagaatttgatagcttattttggtgtttgtctcaggggacaccctctgcaccagcagctgcaaccctgtctacagtaacatctggggatctagatttattcactgagcaaactacaaaatcagaagaagtggcaaagaaacaactttccaaagactccatcttatctctgtatggcacaggaaccattcaacagcaaagtactcctggtaatgaattttgatatctgctttcagtgacattactagaagtacatcctttgtaattatataataagatcaattatatatcttttattgttccatgtagtgagtgcttttgttgttgcagtttatacaactatgaagccgaaatgaatgag

SEQ ID NO: 36510 - DNA, 2300 bp, Homo sapien
tgaaatttcactctcacgtttcagaatctgaagaggaagttagggaaattcacagatgagccaatgccttttaacaggtggggggttcaggggtaggactgggagaagaggagctgtcagaaaagctggagagccattcgccccagagctctcagttgcaccagaacgcacagtcggagagagatttatttgtgaacaagcccgagaaaggcagacaacccagacaagatgggctcagaaattatttatcataggctagggcagaacagtctggagctttccttctgctttgcaagcacttccctgggacctgcctgggaagcacagcccttcttcctggtaagttacagaaggtcaggcactcagctagtaggccagctagacagcaaaaagtgtctaaactaagtgccaactgtttacttggggtcttccagaccctatcatggttctattcgtcatggtacactctgtttgatttcaatcgcaccatctttatatgtaggaaggccaaaccggcccggctgtgttgggtgggatttctgcaggccatgcagtgaggacgccactagctatagacacacgcaggagacccacgttctatttccatatgccacttgccactgacctcagagaaatcattttaaaccctgaacctcagcttccttatcctgaaaatgaaggccattctacttcttaggccttcttgacaggagccttgggagagccaaacggagtaattccggtgacagcgaagaactgggagggaccgtgactccaaattactgaagaaaaataagttaaacatgctcggctggagttttaggaattccacccgcccccacccgccatgatcaaactgcagtcaggcagcagccctccgaattgattctttcttatggactgtctcacatgccaaacacctatgtgcagcacccctccatctccgtgggctcctattgatgtctgccttgcagtgaaagcgctttttgttgccgctgttcgatacaccccagcacatcaacgcagcagctgggagcaggaggaggaatcccttcgctttctcccctcctttcactccgaaccctaggcatcagcagcaacgcgcgtagcccggcaaatttccgcacgtgaatggattttcctggctcatctccaaagaccttgcggtatttcacaaagctgaagagaggtgaacgagcatcaccccctccaggaggtcgtgcagccccgcggggacgctcctcccgctcctccacccgcggtgcagcggccgcctcccgagcttgctcgcggggccgttagcgccagacccggcggagagccaaggggtccctccgcgcctccctctcgcagcccctctccaccagtagcagcgctgctgtcttcccacaggaggacttgggaggacgctggattctgcagcgcccccgccccctcgctttttctttctttccttgctttgggatcttgctgctggatccggagaggttctgagaagacaagagcaagggactgagagcaggcttccgctgcggcgcgcgaacacagccgggacacaacccccagcgtctccacccgctcctcgccaccccggcgggaatgtgaggaaggaaagcccccagcgccgccgcccgccctcgaaggcgtcccagagagcgtcctgggggcccgcggctggagcccttgtgcccgcagcaccgccggactggagcggcgaggcgcaccgggtgccgcttctcggcttccactcttcagaaagagcgcggtggggatcagcgcctttcccgcactcggcacaactccgggaccggcggcgcgcggctggaccgagtcccgcttcccgccagctcacctggagtcgggggcagcccctgcccgcccgcctgcaccccttgtcgctctagcttgcgcgaacctgccgctcctccacgcccaggtagtgagccccgcggctccaggtctctgcagcgccctcggccccatggacagcgcacccatcaccactccctaagtgctggcgccgccgctgtccaagctgcgcactggggtccctcggctcgcccctctctggggtgtccgagaggccagggagcgtgcaccatgaagtccgcgcttttcacccgcttctttatcctcctgccctggatcctaattgtcatcatcatgctcgacgtggacacgcgcaggccagtgcccccgctcaccccgcgcccctacttctctccctacgcggtgggccgcgggggcgcccgactcccgctccgcaggggcggcccggctcacgggacccaaaagcgcaa

SEQ ID NO: 36511 - DNA, 2300 bp, Homo sapien
tggcattgaagagagaccctgtctgtctgtctttctctctctctctctctctcacacacacagacacacacacacacacacacacacacacacacacacagtgtttcatctctgaatagccctggttcctggagaggatgtaatagcaaataggttttatggcatagttggaccaaccaaaagttccccactaacaaaggttagtgatgtttttagtacaattcagtaacaacatgaattttattccagcaaacacaaggcattttaaccaaatttaaaatttccaacaggatgaaccagacttcagtaacttaggggagaggggtgcactgcttcctaagaaaaaccttttcttaaagggaggccttgacttctttcctcttccccatcctggcatgatgctggtgcagaatacatttccaaggttgtgttatattcagaggcacattaggctattcgagagaatgggaagaggtctaatggcttcgttgttttctatgtttaggatgcactaatctgcagagtttaatgtatgagttgtggatggcacagggaagttgggacagaaggctagctctagggagttgttggggtggctgggtgttagtctgaaatttcactctcacgtttcagaatctgaagaggaagttagggaaattcacagatgagccaatgccttttaacaggtggggggttcaggggtaggactgggagaagaggagctgtcagaaaagctggagagccattcgccccagagctctcagttgcaccagaacgcacagtcggagagagatttatttgtgaacaagcccgagaaaggcagacaacccagacaagatgggctcagaaattatttatcataggctagggcagaacagtctggagctttccttctgctttgcaagcacttccctgggacctgcctgggaagcacagcccttcttcctggtaagttacagaaggtcaggcactcagctagtaggccagctagacagcaaaaagtgtctaaactaagtgccaactgtttacttggggtcttccagaccctatcatggttctattcgtcatggtacactctgtttgatttcaatcgcaccatctttatatgtaggaaggccaaaccggcccggctgtgttgggtgggatttctgcaggccatgcagtgaggacgccactagctatagacacacgcaggagacccacgttctatttccatatgccacttgccactgacctcagagaaatcattttaaaccctgaacctcagcttccttatcctgaaaatgaaggccattctacttcttaggccttcttgacaggagccttgggagagccaaacggagtaattccggtgacagcgaagaactgggagggaccgtgactccaaattactgaagaaaaataagttaaacatgctcggctggagttttaggaattccacccgcccccacccgccatgatcaaactgcagtcaggcagcagccctccgaattgattctttcttatggactgtctcacatgccaaacacctatgtgcagcacccctccatctccgtgggctcctattgatgtctgccttgcagtgaaagcgctttttgttgccgctgttcgatacaccccagcacatcaacgcagcagctgggagcaggaggaggaatcccttcgctttctcccctcctttcactccgaaccctaggcatcagcagcaacgcgcgtagcccggcaaatttccgcacgtgaatggattttcctggctcatctccaaagaccttgcggtatttcacaaagctgaagagaggtgaacgagcatcaccccctccaggaggtcgtgcagccccgcggggacgctcctcccgctcctccacccgcggtgcagcggccgcctcccgagcttgctcgcggggccgttagcgccagacccggcggagagccaaggggtccctccgcgcctccctctcgcagcccctctccaccagtagcagcgctgctgtcttcccacaggaggacttgggaggacgctggattctgcagcgcccccgccccctcgctttttctttctttccttgctttgggatcttgctgctggatccggagaggttctgagaagacaagagcaagggactgagagcaggcttccgctgcggcgcgcgaacacagccgggacacaacccccagcgtctccacccgctcctcgccaccccggcgggaatgtgaggaaggaaagcccccagcgccgccgcccgccctcgaaggcgtcccagagagcgtcctgggggcccgcggctggagcccttgtgccc

SEQ ID NO: 36512 - DNA, 2300 bp, Homo sapien
gatggagcgcctgggacacaacaactatccttagactttccacatcaacaatctcggaacacttaaggctggatggacaatatctacttctgcaatgtgttccggtcttctaccaacggaaaatcgaattcccagctttgagcagttggattcctgtggtatgtggctgccccacatcttcttctgctaagccattataatcaaaaagtattttttttggcggggggtgggggcaatggagtctcactctgtcgcccaggctggagtgcagtggcctgatctcagctcactgcaacctccacctcccgcgttcaagtgattctcgtgcctcagcctcccaagtagctgggattacaggcgcccgccaccaagccaggctaatttttatatttttttgtggagatgaggtttcgtcatgttggccaggctggtcttgaacatctgacctcaggtgatctgcccgcctcggcctcccaaagttctgggattacaggcgtgagccaccgcacccggccccaaaagtctttttgtgcaccccgtgtctatttcttattagtttcagagcttttcccagtcataggatcacagaaggtcagagctggaagggctcccagagatctggtttcattttacaaatgaggaagtttaggttcatgtgacctacttaaagtcagaaactgattagtgacagagctacagcctagatgtcttgttgcagtgcatgaagagcttaggtaatcctgatttatccatggaataggcagctggtttacctgattcttcccttagaaacagtccatctaacatgatttggcttcctacttcatcatgaaacatttgaaaagaaactattcattccaagttcaacagtttaatcttcaaatatctagctcatctttcttagtccatatttaacaaatgtttactgagcatccaccaagttgacagcactgtaaatacagacacactttcagacgggggctgcctgcaaagaggcttcccttctagttagaaagccagaagacacattttacaacagtcacttttctctgggtcacatatttgataatactaccttatctttacgtacttctataggcttatgcctgtaatcccagctattgggaggctgaggcaggagaattgcttgaaaccaggaggcggaggttgcagtgagccgagatcgcgcctctgcactgcagcctgggcaacagagggagactctgtctcaaaaagaaagaaaagaaagaacagaacaacagaacagaacagaacagaacagaacagaacagaacagaacagaacagaacagaacagaaaaaagaaagaacttccctaacacagttctccctcctcctttcatttgcagaacagaccacagggccgaggcttcttccattagaaacagcccatctgttctactgattctgagatttttgcctacacggagcaccaatttgtagtgggtgtaaggttacccgcaaatcaatgtgatggtccagttgttactgttccttttgtttcacgagcgattgctcattagatgaggtgactgatagctctgactttttctagaccacaaggactctaggtggctgccctaagtacagttgtggcagctgggatttcctgtttatatggtgcccggcaccatcagcttttgtcctctgctgcagctaaagtgtcttcctcctggaccagggagagggggagggggtgtggacaggacccgcctgctgacggtgacacctcttcgacaccacgtccacgccagtcctcagctccaggagctgggcgggatccctcatcccgctcagctgggagatgccccgggagggcgtcccccggctccgggcggcgagggtagtagccgaccccaatccactccgggggccgccgggggccgcgtgaaggcaggtgttccggggagaaacgtggaagggaggcgcggcctggggccggtggcgctcggctgggggccgcagttggctcccctgggggctctgggcggcggcagctcccgcctgtggggaggagaaggagccggatgggcgggttcaggcgcgcgcggcggcggtcccggggccgccggctcctccccgcgagggtgcctgtccgccgctcgccgcgctgaggcagtgcggggcgggcgcgcctaggctgccgcccagcgccctcgccgcggccatgcccgggccctagagcgcctgccgcagcttgcgccccgcagccccgcagccccgcgcccgccgccgcctcttcaatgggcaacctgctcggcggggtcagcttccgcgagc

SEQ ID NO: 36513 - DNA, 2300 bp, Homo sapien
tgcatatttcattgaggcatcatgctgtggttcatggtggtcatcctaattttatccaggtcaccctaggaaagctggcttctctcccaagagcccttttctgtgtgaggtggtcagactgccctggcttctgctatttgctctcagtggaaactgagccagttccacagcagtgtgagtcacagaaggaaggagatagactgcaaggctttcaagtggcaggaccttgcattctttggtgaactaactcgaggcaagaggtctaaagcctggattgagtttgggaggagggagtcccagtactgtgtaccaacagacctaccagttgggagttaatatttgagaacatcgttgacgtggccagatctacttgtctttaactttctggtgtcctgaaagtctgctgtgatgtggaatgaaacctctggataaaattgcacagttatatttactaatgatagaaatgtgctgctttatttactaatggaaaaatattggccaaattattcattttgttaggacttggggtagaaaaatattttgaagaaatgcaatgatagattgttaatttgagtctgatttgaatttcatacaattttcctaaaggaatgccttcacatattaaaaatattaaacataaagctatgatagtatttaactctatttttttctactagggaatttattttgtaaatattaatttaaaaagtaatttcaagcaatatattgaatttttggtaatctttactacaaagtttattttgaaatcttatgattggtgggggtcagaagttttagctaaggtcagataaaatgtttatcctagtttattatacaaattatatcaactcactttcctccctagtatacacacacacgcacacacgcacacacacactacttgccagtaagcataatcttgcaatggtatttatttatcaggcaggaggagtggtagttggaaaggaaaacaaatggaaaattacagaggtaaatggtttcaacatgccaataaagccaacattatgattcaaaacaactttttaccaaaccttccgagagtgggcctctactacaaactggtgatctctggaggaaacaagaatgagatgagttatgttcggagaaatattatattgctattttattttctacaacattgactaaatggctagtcaattgtaaggaccttgacagacttaggaacaggaggattttgtttttgtaagttcttgtagaggaaaagtggacagggtgaaaagggcttacttcttggaaccagaaagacctatgttgcactcaagatttacttttttactagtgtgtaactttgaacaaatctcccagtttcttcattgttaaaatgaggatcataacactggcagcattctgtgaagactaagctggaaaatgtgcgctctgtgtaatatgggcacagcatgtagtaagcacttacaactttttcctacatttttcttttctcgttttccttctcctttgttttctccttctcatttcttttcttctatttctactcccctttctttctttttccctaggatgcaattcattttgatccaatttagcatttaaagaactatataactcctaggactgggattggcaaactttctatacaggggcaaatagtaaatattttgggctttgggggacagtgggtctgtattgcaactacacagctctgctactgtagtacaaaaactgccatagacagtacataaatgaatgtgcatagctatattccaataaaactttatttaaaaaacagctggcaggccacagtttgccaagctctgctttagagtacattgtccaacaaagccttgtgcaatttgaggtgctattaattttttttaattagatttatcacataaccgaatatatgggcatagggtattcatctttttaaaagcactattcttgtgtgctattattaaatttaaacaagttttcatataaaactcaagtgattcgaatcttaaaatgccttcacaatgtttgaaatgtctggttcatttttaaatatttactatttaggtgtttacattgaagaagttctaagtaaatggaaaggagattatgaaaaactggagcacaaccacacttacattcaatggtcagttacatattatctatcttgaaccatgtcctatttaatcatgtatgttttccagacaacgttaatagaaaaattttatttttttaaaataaataggcttttccccctgagagaacaaggcttgaacttctatgccaaagaactaactacatatgaaatt

SEQ ID NO: 36514 - DNA, 2300 bp, Homo sapien
tgtctccgtagagctcagtaaatagttctacagggtttagaggatgagaagcgattgtcaaattaggctgaattgtagaacacaaataatttaattcaaaataacttaccaattttatatacatgataaagtattcagacaactttctaaatgcataatagtaaaagattgtgaccagatattatgatattaataaagttaccagatactaaaatcaatgaatgtaatttgaattacttagaaattgtatattagagcccttatgagtaaaaacatttcatttagcaacttaacttttagaatattcttcctacttagggattttgattagattgtaacattaaattcgagaatatttagtctcaagagaaacacttcctggcatccatcttaaatagtggccttttcccactatggtgtttttaaatgcatattcatatataatagtatgtttcttacatttaatccctaaataacttagataatcattcagtggagaacaagtaaaaggatatcattccttttggagataaacattgagtgtctagaatttttttctattaatgctttgtatattagttttttaaataagatctatagatatgtatttatgtgtgtcttatatatgaaacagtgctctgggtttgactcctatgttttgtaattttaaaaactacgatatgcttgcagaaattcattgagaagctgttataaaaaatgcagtgaagcatgaccaaatagctaaaaatattactgaatctttacaaatatataatctttattgttgtactgtggagtgcaaggatactaaatattggctattgataaaatactaacttgcatttcatggcaaatagatgttatatcgcttgattagtctagaacatttctaatattttgtgctttcatatatcaaaggagattatgtgaaactatttttaaatactgtaaagtgacatatagttataagatatatttctgtacagtagagaaagagtttataacatgaagaatattgtaccattatacattttcattctcgatctcataagaaattcaaaagaataatgatagaggtgaaaatatgtttactttctctaaatcaagcctagttgtcaactcaaaaattatgttgcatagttttattttgaatttaggttttgggactacttttttccagcttcaatgagaaaataaaatctacaactcaggagttactagagaagttctaagtatttttttgctaagtagtaaaaatataaacatatgaaaatgccataatgcctgtcatagtcattgtttcatattttgtcatataaaatcacctaccctgcttctagttttatactttaatctgagtgaaagtatgatgtggtggaaagaaaaaacagtacagtattacatctgagttagtctttgaaaaatcatagtagtaaatgaacctcaacactgagtggtcaaaaattgggttaaccaatggggggagaatatttggttaattgttttaatattaaattttcaagtttataatagagttatggttgagtagtcatccatactgagtaatcacgcattttttaaactataattgaggctcttctaaagctttgttttctaatctaagatacaaaggatattcttgatcttgcttgattgtaactacatctaccagtctttaatgtctgtttggggtgagtggcgatcctctgttgtaggaatgtttttgaagatttctattttgttttccacttaggaaattcccctctctcatttggggtatatgcgttgagtataaggtaggctgtatttagacacactagaatcattaaatgtaggtgaagttgtagagaaaaatggcctgggtcaatgtaggatctagaaaattaggagtgtacatttgctggcttctttttgagttttgtactgtttattacaggaacatatttgtgtggctaatctctagggtgacagtgagtactaccctgctccttctgcattctagttatccaacacacccagcagattgtgttcagggacagaatgtgtttttagaaatcccttattattgaaatgaataataatatagctataaatatgaatgtctggaggtatccagatgtgccttaacaaatgtaaatggttttcattcagaagtttacatttttattacattataaaatctcatcattgggaactttctaaaccatgaatatcagttcttttaatgaaatttaggtggtgctttatcattttggagaagttgctgtttgggacaatagcatcagtttatcaagaagtgt

SEQ ID NO: 36515 - DNA, 2300 bp, Homo sapien
tgacaagtacaaaagtgataagtgaatcttcaataaatgcccccaaaatttaaaattcagtaattgatttatgggtataactttgacccagccatttacaacttccatctaaaactatattagcagacatgggatacgttaacttattttaagcatatacattgaaacttgcttaagtttttaaacattatgaacagagtattaaactggacattatgatacatcttgtttttgaggaatatactaagaggaatacactaagagtgaataaaatttctcgaacgttttccatccagaattctttcctcagtattcttctcttctaacatcctcttcattaaaaaagagaaagaaaccctgaaagtactgctttgatctagaatgaacaggcaggagtttcattcagatctattttgagagaaaactgatgggctcaaaaatatacttcagttgaaaaaatgtgcagtcgaggaaatattaatgttctgataataaacagagaataataacacatttaagactgttctgcacttggcacagtattttacagaaagcaaagtgcttgacaaacactatcttggagggatcttacagcaccccaaggaggcaggtagagccaggcgtattgttctcttgtaacagagttagtcattaagagattggctcaaggtcaatccagaacctggatctgttgataaaactttatttcaggggtcatgttatcccccgaacttaatgtggtaagtcatggtgagtttcaatcacgaaagcaaggaggtaatatagccatatttttcttgtttgagatctctctcttctttccgttcattgtacagatcaccctttaaaaaatgtatttggtcatcaaaataatttataaagaaggaacatgccacatgtgtacaaaaatttttaaatgcacagtttattacccgaagaaataaactgacgtaactatttgaagtacaaataagtgtaattttattttaaaagatgcaaatatgtgttgccaaatactgttttcgtcatggtgtagtccactttcagtaaacaactcaatgaagtttataaacttcatatgaacagtaacaaatgagtcatcctattcaaatcaaataaacaaataactagtgtgcctattatttgtaaggtcctgtgatcaaaaggtacagtcgtttatagccagtgctttactcaagtcctttcttgatagatagatgggtggcagatggatagagatatcctacatatctatcatctatctctacattcttcttttccggtatttcatccaacttccactaaagatagtttgtgtgactttattatagaaataaagttcacaataaagatgatttacatacagaactcttatattttcattcatggaaaaaaccacaacatggtggtgccagtgacagtctgtgttttggggcaggatagaaactaacctgcttcagttacctgacattctagcaaacttattaggaacacaaacgctcgggtctctgaatgcaccaacctgagcgccggctgattaggcattgtaaagcagtgttctaaaaggaaaggccttcacttaaacagtgctacaacgtgtttgttcagctttctttcatacacaaacttttgccagaaaaggcgttttaagccgagggtaaagattttgtgcgtccaccgttcccatcttcaactctttagaataatagtcatttaagcaccggacctgtcttcagattcttactttgcgacacagctttggccggacttggcttgatctgggctccaggatcggtcccaccacccgggctcggagcggtttgttcctagtggatcagggcgggtgtgttgccggagtcgccttctattggctacactcccggggactggctgggctttccgacacctgattgggcggaacagccctctgtacgccgacatcattggagggcgctggagccagggggcggagcgggttccccaggattcttgaccgggcgcgctagtccgtccgctgagccgggcgcggggcgcaagagcggagctgcgcgagccgctgcggagggaagggctcctagccaattggggtctttgaggcgaatgcgaggctggggccggttgcctaccggccgcttctcgccgaggcagtccagacttttcccccggcggtgcccgctccaagacagcatctgtcaacgctcctcttctcccctcctcctcctgccgggccgggctccgccggctgcggccgagaggacgcgggacccggcgcggtgagcccatcagctgtcaggcgagcg

SEQ ID NO: 36516 - DNA, 2300 bp, Homo sapien
ggtaaatatatttgaacatgtaaaaatagctatcatttataaagtgcttacaatgctaaatgtcctacataaattatctctcttcatctttaaccaaaaatcggtgaagtagatagcaccattttcatctccattttactgatgaggaagctggggcttagtgcctaaggtcacacagccaaagaatagtggagccaagattggtacttagaaagcttgactgctgagtctaggatacttttaaaggagaatcaggccacatatttaatgaccttaattataagaaacatgaattccaacctgacattttaaagtaacagaagaccattatagttctgagtgacataaagaaactgacatctaaagatgagttgtctatcagaggtacatagagtgatttgggatgagctgatgaaatcaatagggagaaaggggtaaaagtgaggacaactcaataataaaaattatcaccacttccttatgtctctgcattgtttgtagtactgacagatgttggggtatagtaaaaagttgggcagcatagcctgcactcctcccagcactactcattcccccattgagctctttctgaggtagctgaaggagctagactgggccccatgtgtgaggtactttaaggtttgagtaatttggccagctgtggagatattattttgtgagccaggaaataaaatgaataatactctagatatctggattgggtgtaattcattgcttaagcatgcatgatactcacctcaaggctcattagacctggctgtaattcaggatatgccctcatttttattgacagacaccatggccatgaatgggtttccggtatgctaagcattgcagtatgatatgatttctgactttctcttttcttcttctgcttactccttggcttttaactaaattctactatacaatagtcattttgattgattcgtgcttttaatgttttcaaaaattccaatgtgctttgacactggtagttctgtaaaacaatgatgtaagtagagaattaagtccaagcagcaacaaattttttcttttgaattcagcagacagaaatattttaacttcctagcctatgcaatatagaaaaatgttcatgtttaaaaaaggaaaaaataactgaagtatataggcactacagtccctgaaattttctgtaacaaaaacaacaaaataagaatgctttcatgttgtagatagccatattttaaaactcaatgagcagtattattgccaagagtaattaagttattcagattttgaccatatggcatatagctacaataactgttttaatgtccctttttactaattctatcatctatgctactttttactttggaggctgtttctattgattattttttccttcattatatgggttgtatttctcacttctttgtatatctgtaatttttgactggatgacagatgtgaatttcatgttgttcagtgctgatattatttttgttttcttttaaatattcttaagctttcttctgggttgcagttaagttacttggaaacagtttgatccctaaagttgctccttttaagctttgttaggtgagaccagagtattaaatttaggacgaaatactcctcacactggggcaatactcttccaaatactctacctaatgcctattttattatgatttttccccctattttggctggtgggaatatgaactatttcccaccttgtgtgagctctggaggttctcctgcttgctccttgctactagttctctccctgctcaggtggcttcctcacacacaggtgctcatccgtacccagctgaagccctctaccaatatctctctctctctctctctctctctctctctctctctctctctctctctctccctctctctccctctctccctccctctccctctccctcctctctccctcctctccctcctccctctctctctctctctctctcgtttttctcttcctttctctttctctctcaccctctctgtgcaactctcttggtcattctcctctctctgtgcaactctttcctatccagtattttgctctgcaaattccatccacctttgcctctgaattctcaactccgtctcctcagcgcaggaagaccttcagactcccagcacggtggccaggaaacactctgcaagcagtaagtggggacatcctggggctcacttagtttgtttcccatctctcagagatctttctcacactgtctgttttttgatgtctaaaatatatttagactagtttcttagttgtctaatga

SEQ ID NO: 36517 - DNA, 2300 bp, Homo sapien
acatgaatagacacttctcaaaagaagacatttatgcaggcaacaaacatatgaaaaaaagttcaacatcacatccttaaagaaatgcaaatcaaaatcacaatgagataccatctcatgccagtcagaatggctatcattaaaagtcaagatacaacaaatgctggtgaggctgtggagaaataggaacacttttacactgttggtgggaatgtaaattagttcagtcattgtggaagacagtgtggcgagtcctcaaagacctagaaccagaaataccatttaacccagcaatcccatcactgggtatatgcccaaaggaatataaatcattataaagatacatgcacatggatgttcattgcagcactattcacaatagcaaagacatggaatcaacccaaatgcctgtcaatgatagactggataaagaaaatgtagtacatatacacaccatggaacactattcagccataaaaaagaatgagatcatgtcctttgcagggacgtggtttgagctggaagccattattctcagcaaactaacacaggaacagaaaatcaaacaccatgttcccacttataaatgggagttcaacaatgagaacacccggacacagggagaggaacaccacacactggggcctgtggtggggcacagggagagaatcaggacaaatagctaatgtatatggggcttaatacctaggtgatgggttgataggtgcagcaaaccaccatgacacatgtttacctatgtaacaaccctccacatccagcacatgtactccagaactttaagttaaattaagttaaaaaaatagcctaggagagaaacatatcaattctctcatcatcattgctaaggagtcttgactaggaaattgttgttcaatttaaacccttttctatattgattcttttataattatatcaagaaaattcagtctccaggtttcaaagctgataacattacctattttgaaaagattgcctatttatttctgcctttatcagcaagagaagctcatccttaatgcctatcattgggctaggcattagcagaagcttcttaaatacaataggatatggttgagtgtttttcttatctgggatcagtgtttcttgggaagtacctacagagatactctgaactacatgtgagtgagtatgatgatagcgaacatcattagaggaattagagtagataactcatgtgtaagcaccagagagcagttatgtgatgtgatggggctacctagagccaaaaaacacaaattaaagatttaccgtgttgtggggcatcttgatacactgcagaacagtcctagcgaggacgggtcaagaaagacactgcattgatgagtacaatatacccagaaaatccaggctgttggaggatgtgtgtgtgtgtgtgtgtgtgtgtgtgtgtgtgtgtgtgtgtatcaaaagcatccaaaaaatcacattgttgtggctgtgaacacttaactagtaaataagaaagacacggtggcagggaggaaaaagaaaatgtatccacagggtgttccattctgctgttcagaacattgtggttgctcaaataatattaatgctctatgatgaagatggtagcgaggatgatgatgattaatgcgacccatgcaaaatagggctggggaggatgacataggcgagggaccagaagagggaggatgactcatgggtgaggggtacctggggatagagcgaggtgctgtgcacgttggcgactgtaggggtagcggccggggcacgcgtggctcggacccggggagtgggcgggtgggtgcccgtgggcggagcggcgccgggactgagtggctggcagctatgtctgcgagagcagcggcatcaccctggatggaagcctctgagactccgcctaactgacacccaaactctccctctccctcccgcagccccaaattggaggcagcagagcctgggagcagcctccacggcggcagcggccgccccagtcccagccccagccccagccccagccccgcccccgccccgcgccccgccggagacgcccggatcggcggagcctggcgcgagccctcgccccctcgcctctcccgccgcgcctccgcctgcccgcccccgccggccgaggctgggctgcgggaggcggccgggcggccccgagcttcgctagggcgaccaaaacaaaggcagcatccggggctgggtggatgcaaacaaccatgaaagactgggttctcgctctccccggctctgctgctgctgctgctgccgccgccgccgctgct

SEQ ID NO: 36518 - DNA, 2300 bp, Homo sapien
agctgaaatgagaaagatggtaaggcagccgagccgagagtctactgatggcagcatcaacagttacagctctgagggcaagtaagtgctgtcagcacgtctgcatggctgtggaaccaggaattgtgtactaatcagtaagataacaaagccactgagtgttactgtgcagcttctctatttaatcagaagttcaaccatccattttaaaccaccctgatggcttataagtaagtacacatggacacacctctacacctggtcattcatacctttcaaagggtgaagaaattctgagtccacatgaacaaattgatttcttgcatctaggaaagcccagactagttccttactggatgtttagtgtacaaatgccacaggtaatggactctttcatatgggaaactcatagtctgtccctgtcaccaaagtccaagttaaaatttataagtaaggaactgatttcccattttcttaattttctccaagctattttggaccctaagcttttctaagtctaacactgtcatatatgtaagttacattttcttgtttttaaaacattgctgactcatttttaccttaggaaataatccagggtctatcagcttcattatttttctgactaaaatgttttagttaattctgaaaaaatagaatacgatttttaaaaatttactcttttcgattctttttcttttttttttttttttaccatttcatatggatcctgcacaaaacctgcttcttcctatgcttgagaatatttctggtaaaattgaatttttattgaggtagtggatcttacaaataagtaattaatgtgttgttttggattacatggagattcaccacatataaattttccataattatttgttcattaccattcacattactcatataccaatttgatatttctaatttcttgtctttactggaatttttctatattgtttagaaaatttaacagaattatgccaagttactgtttgtgatattccttcccattcctgaaactagttggtctctgtttagttggtcaaatgattggcttgttatgcatgtttccagtaaggaatataagaacaaaaatcagcaggtatgaaagttacagagataaacttactgacaaaatacccatatttgatgaagtagcataaagtaatatacaaatgagacttgaacacatcattttctgatataaaaaagtaacaaataaaatttgcctccatcataaaccatttaatctcttggatttattttcatggtctctggatgggattataatctgtgtcccatttaatttccttggttaaaagaaataatagatgtgaaagcacaatggaaagagtaagtctctatagaaatatgctcattcaaaaaatgcttattgaatgcctatcacataatgagcatagttgtcattacccagtgataactacatcagtcaacaagaagagaacaggcactgcccttgtgcagcttacatcctggggctatcaggaagttgtattataggaagaaatacagattttttaaccaattaatttccattggaaccaaataaaagtctcaaataattcatctttgaatcaattaaatgtttataaataagaacttgaactatgttataacatttattcaagaaattattggccactttaaaaatttagcatgaatgttacctaatgttcatgagcaagtatctgtgtgaagtttatgatataaaaattcgcatcttatgtttttttgtcagcaacacatttatataaggatttggaacttggtatattaaaaactataactgagccctcttgaatagagcattaggtgttaaattgagagtttacacctttcctcagtcaatgttaagcctcatatgcttggctcaaaggcaatgcaaagaatcaattaaaaaaacagattgtctaagtaatatttatgtttcatgatcataattagtcaagtggaaactagtgaaaagaattctagaagatttcatgggttttttcctttggtttttatccttttgctgatagtttaatatttcctggagtgcgactgggagctgacagtcaattcagtgattttcttgatggattgggaccagcccagcttgttggccgccaaacccttgccacccctgcaatgggtaagaatcattttttttttctacaagaaaattgatgttttgtgtttgacaaagtcatttaaaatatttaaaattgtgtaatagcaatacaagtgagaagcaacattttagctacagagttactgtttgcaaacaactattctaa

SEQ ID NO: 36519 - DNA, 2300 bp, Homo sapien
cagcgaaagtagcagtctgcaacaaggaaaacagctaagttaagaggaagtggttttcattttactgcttgcagaaaggccaagattttgacgtttaaagcgggcacacgagtcattttaagtctctagatctttcaccctgaaagtccctgcacagaaactccatagggagtctaaatatagcaacagcaccccctcccgccccctccgccttcagtcagggtcccgcgcagctctaggattggagagcttactccagggcgctctctgcatctgcctcgaatagcaccgcacggagcaacctctctcgcacctccacagtgcgtgggtgtgaagtgtattaggggaaagctagagagtgactctgggtgatggtgctcggctcacagtcacatggcgtcgccgccagctgcacagagctcccagctagcttctgctgcccagaggcttggggggaaggagggagggaagcaggctcctgctggtgaccaggagcaggcgagagggcttcacacaaataatagtgataataaagagtaaaagcaaagcatttaaatcgagctattgcagaagacagaaatcagctgccgcgggcgtgggtgtgtgtacagggtgggggagaattgggaaagtatttatctcggaggggcggagacagctgcaagaagacttttgtcttagcattgttttagccttaggaaaggaaaaggcccgaaggaatccaccttgcaactatctgctatgtctttgtggtggaagcttagttttgccttcaatttaatttgatgattttctttcatatttggggaagagccactctgttggaagaagtccccgagcctggcacccttcagttttccctatgctgaatgtgagatttaaactgccttttctttgtaatacactgtttctgaaggccagaggctgcggccagtggcaccgtggcctctctctccgccaagggcgcataggctttgggccacccgggtgccaggggtggtggaagacccagtcagttgttccttgcaacaggtctctaagcttgtatgttacaacataaggtgggtggggtcggaaccccgaaaagccggcgtcctggacaccccatcctccaggtgttctttcccagacactgggtcctcgccgccgctgctgaacttctcaatcatatgactttctcggacttaaatggaaatttcttgacggagggaactgggtttgttctcccaggcttcgcgctgcagtcaggcagagccccggggcagctcgctcaccgcggaggagccactttggagttttacgccctttccacaccccacccatggactggaaaggatgttcagttactcgcgagcttgtctgatactgggatggaaagtcacagtccgcaggctggagtgaggcgcgggaagatgcctggtccttgcctcgcggacttggcagccgcgtcctgcgggtctgtccactgaactgctgaggactcgcccgtgtgcggggacccgagtgccacttcccggagcgttaccttgcgctccagcctccaggctagataatacctggaaggcagggcagggctgttcccgctctcaccccttgcggaaggatggcaggatccggcgcagcgacgtagcagcgggagggcacagcgacctgcatctccagtttctcctcaggacacaaggctgacttcaccttccggacagctgcaaagcccctgccagaaccaaaccgaactcgcgcctcggagaggggcttctggggccgtttcgctgcagggcgtggggagtggagagagggaaggggaagcctggggctgggtgtgcgcgcgtgggagcgcgcctcggagcgccccgcactcccccactctatccccgggggcagtttgggaaggagggagtggtagtcgcgggaatgagggagcaagagaaaccctctcaaagtgacgccccaaacaggtccggatttagaattcgaagctaaaggctgttagaaattgggactcctcggcctcctctgcagcccctcctttcccgccccgaagcccgggcggtttgctggctgcctgcttccccgcccccggctcagaggtctctggctggcgggcgccccgtcggccgccggcttcctccttgaaacccgccggcgcacatgaggccgctgcccccgccgcaggcgctggcggccccctcgcggtgcccgtggtgatgccatgccccgccaccacgcgggaggagaggagggcggcgccgccgggctctgggtgaagagcggcgcagcggcggcggcggcgggcggggggc

SEQ ID NO: 36520 - DNA, 2300 bp, Homo sapien
attctcattcttcagtgtaagcaaaagaattggcatttaatcaccaacagtaaatatctgcattgtccattcttgctggggaatacagattcaaactggatactgcccagctacagcaaaagtttggtttcaaaaaagactgtctcaagtatatgcaatcacttaatttgttgtacttttcctaccacaccacagggcctggagcaaagctgaccactggcaatctgtgtacttggaccctacttctttggtccctaaaggaattactttaactaggagtaaaaagcatttaaccagcttaccgtattttaagaatttctccctatttcacattgtatttgctcaatgaggcatcctgtgagaaatttctctcaggattttattgcaagaaaaatctattaacacgttgcttctggcaaaagggatgaagttttaggtttcggagactgtgatcttttaacatatttgtttccttgccttggatgccaagaggctcaaaggtgaatttgggacccacattacaaatagtaatagtgtcccagatccttctggtatacatttttatggattaacttcattcccaatttctttgcactgttctatcattatcttactttcactgtattatatcaatcacaaatatttacagacattgtaccaggaactgggaactcaggcatagtctgtgtcctcatcagggctttcagttaaatgggaagacaaacttttgcttatttttatccacttgtaccgcatatattatgtaagcagccacagatgttttctgcacgttacaaggtattcaggatatatttgaccaagtaacaaaagccgtaaagatgtgtttttgtctattactactctttctttgaaatgggagtattcaatctaaagttgcattttttttaaaagaactaaatgacgccattgattcaaattgaacttaaatgaaaatgaatagattttgctcacttggatttctggaaagtctttatatttgttacatttacatattactatggtaatcttgattcatttattcctagcatgaactacccactccctaaacaagaacctcctaatgttttacccttatcttccgaatttctttacaaacaccatatcttgactttggagcacccctatcaggtacctcttctcccacgactatcatcttacctgaatttctctttgtttccctcaaagatattataaagcacttatcagtgctttgctgaaatcaagacattttatctactctattcccctgatgtagcaatctggttaacctatcaaaataagaaataagcattatttaatgtaatttttttactcttgatgaacttatgttattttctaggaatgatagttgttctttccctttttttttttttttttgagacagagtttcgctcttgttgcctaggctggagtgcaatggcgcaatctcagctcactgcaaagtccacctcctgggttcaagcgattctcctgcctcagcctcccaagtaactgggactccaggcgtgcaccaccatgcctggctaattttgcatttttagtagagatggggcttcaccatgttggtcaggctggtcttgaactcctgacctgaagtgatccactcgccttggcttcccaaagtgctgggattacaggcatgagccactgtgcctggccctcaaatttattataaatcatttgcttaatattctatctagaatatttctaggaattgttattgagcttatcaatatacaaagcccagggcctcctattttactcctttttggcactcaggatattttttctctctctggtcatttggcattcatcacattttttcaagattttttaaaatttatcatactcctgtacataaataaaagctaaaatattatgagaaactattaatgaaagttcttcagtttcatcttcaaatactttgataccttatgatacaaagctagatgcaaaaatatgaacttattaatagccaacaattttcccatctcatattttcactgtttcttaatcatatttttaaaaatcccttttagtttaaaaaaagaaaatcatgggaggaggagccaagatggccgaataggaacagctccggtctacagctcccagcgtgagcgacgcagaagacgggtgatttctgcatttccatctgaggtaccgggttcatctcactagggagtgccagacagtgggcgcaggccagtgtgtgtgcgcaccgtgcgcgagccaaagcagggcgaggcattgcctcacctgggaagcgcaaggggtcaggg

SEQ ID NO: 36521 - DNA, 2300 bp, Homo sapien
taccttctagttgcttttgagctccatttttgtactggaagatttccttagatacatagtaaattgaatgttttctcataataaaatgttggagactagaagggtgactggagtttctgagtgtattagagctgattaactttgatcttcaccataggttgacctgagtcaaccacttttgggggaattcctggcaacagtatctttagctcttttttcttgcactgatcagattccccagagagtagctactcaaactcctagagggaaaaggtcttactaccattattacgataacgagcaggttgtggtggatcctcaacattcaatctgtgtatgatcacttaataccccagcttttggtttaatacctgtcctttgactgtgttggatgtatctttggatgaaggggtgaactctcatctaaagatttctatcttctgctggaataggagaggaccatatgcccaggagtctgggagagattgcacgcaaccttccttatcttagttatcccctctttatgcttggatcaagaagtacctaacgttgccaattcctgagccttttgagttttccaaagtgtaaatcttgttgttcttagcttttctcagtgttggcatagggttttctctctggtgtcagctagtcagttacctaacttgtccatctgctttcccacttccaaaattatgttgttgtcatctcctttccttttctcttcttttatgggtttatgtctttttttaaagtatttcatcactatagttttagtgggtttttcaaaatgagcaagattagctgtatatgttcaatctaccatcttaacccagaaaggaacttctgtcttaattatatgtgtatgtgtgcatctttgtatgtgtgtgtgctgaatcacagcataaactataatccttattgtggatgaaagccaaaaaagtcagttagtccaggccaacaaaaagtaatcaagttcagtcaaaggctagtcatattttctctttgctatgaaagcctcccatagagctgagagagttttgaagacatatgaggacattttttcagaatgtggtattcataggaagctctaagtctatctctttagaaaaaaaaaaggtaagctacacttcctctaatactgcatttgaatgtgtccttcatttctgttttgagtactaagattatttattctaggtcccaaatttttatgtcaagaatgtcataatactaaataagtaaaataaaaaataataaaaataacaagtaatcccagtgctaagttatgcaatctgtatcaatctgtaatcttcaattccactaaaaaaaaaaaagtttgctctccaaattgcatctactttggcaaaaatgcatggaaaatgcaattacctgttcaaaatattaaaattagctctttagaatattgctttaaaagctcaaaaggatatttaactttgaaaccaatatgtgctgcagatatggatacctagaggcttttttttcaataaaaactaattttcagaatttttttcaaatattgtatcatttctacagcctaaaaaaaatgtagtgagagtgtgttcacagatgcatcaaaattgttattatagcattatcttttatttctatgggaactcagtgagatgatttttctaactcttaattttaaaaaactcacttgtaagctattactccaaatctcctaagattcagaattgagtaaacaatggtcacatgattgagattttacaatttgttgctacagtaccagcaatataaagtattgggataaatgtcagtttggaaaaggtgataggtgtgaaatatccaaaagtgacatgtgaagtaatgctatcttgctgtaaagtatttagatttccattagtgttacattgttcctgaagagaaaaactaagtctggattgccttcttttttatattaatatggatgatacagtgagagagagagagagatccctcttccttttgtaccaatgtgaacattcttctattatttactaattataaatatatagatccaagaatttaaagtgggcttacagattgcatttccacctaaaaataaacacgcagcatactatatttattcaacaaatatttcccaagttctactataaaagttactcattcttttactttaaacttcttttgcctcttaaatattttcatgggctaataggggaagattctatttaaaatgtttataaaaagtaaacattatgtggaaattttgggtttttttcacagtaggattttgaagtatacctagtcacgaatgatca

SEQ ID NO: 36522 - DNA, 2300 bp, Homo sapien
accttccaggagagatgaccgactccctcttcatctatactctgggagctccaattccagtaataggaataatatgactagaaaaggtggtccaaaatatgtctctggtcctagcagaaatcaatagatgacactaacttcttttctggaggtccagcaaactagcttaaattaaagtttcatggtggttatgaatgatttcatagtttttggtttcttcttggccagccaaggacagcttttatttgatagcaaacactgtttgcagcacctccctaaaacattactgctgaggcagaagagttttgtggcaaggttaaaagactacctgtctctctagaacagattcagatgaagttgggacatgatttcatggtctggttttgaaatcggcctttgtctttgcaacctattactaggactaataatcattttgtttctagtaattacctgcatttgactagtacatcctgttcagtctttctttttctttttctttttcttttttttttttgagacggagtttcgctcttgcccccaaggctggactgcaatggcatgatctcggctcattgcaacctgtgcctcctgggttcaagtgattctcttgcctcagcctcctgagtagctggcattacaggcgcccgcaaccacgcccaggtaatttgtgtatctttagtagagacgaggtttcaccatgttggccaggctggcggtgaactgctgacctcaggtggtccacgtgcctcggcctcccaaagggctgggattacaggcgtgagccacagcgcctggcctcctgttcagtcttaaatgctactgtgcagtcattatattttcacttgtatattttgtactaaatgtatatgagagaccaaatgtatgtggatgcagagaatgttctcccgataaccttgtgatctgtggactcagacagtggtgtagatctgaacctcacagatgaaagtcctgatggctgactttgtctttggtcaaaagaggaggatgaaaagtgaaaaatcacccaggaacttgcagtgggaagctgacaggccaagctgaatcttccctaccacacacaaacatctcctgcaaaattttttttttttttgagacggggtctcgctctgtcactcaggctggagtgcagtggtgcgatctcggctcactgcaacctctgcctcccggcttcaagcgattctcctgctgcagcctcctgagtaactggaattacaggtgtgcaccaccacactccggctaatgtatttgtatttttagtagagacagggtttcagcatgttggtcaggctggtcttgaactcctgccctcctgatccgcccacctcagcctcccaaagtgctgggattacaggcatgagccactgcacccggccgaagaatattttaagcagtcaagtttgctcagtgattgtcatgcaacaagatatagaaagtctattctgtaactatatttgaaaccagagagagataacattctgcagtgaagaccacattagtctctcaacttcctagataaatttaccagaataatcatcaaattgcaccattttagagaactggctcctactccttaaacacgccttggactgccctagtcaactcctacaatgggctccctatgacactatcctatcaagtttattttcctctattgtttgctctcccttgacgcaacacaccaaataaaccaagtcgtgttggaatacactgtgtggtcactgggtggctgccgacacctgtgcaaatctagggagcccatttggagccttcctgcacctccataccctcaaccccctgctccaaaattctttgaatttagagtgaagaaaaatttctgattccaggacatcagaaagccaagcacttatcagatgattaagtttgacttgaaagaattaagctcagagcagataattacttggaatgaattatcttgggaagacctccggggattggacatccaccctaaggtggatcaaggggcgggttgtttggattccaacaacccttattaaggacaaccctttttaaggacagagcctaggcccttcctcgcttttccaagtcttttgccaaccagtttgttagactttcccctattctgaatcaggtgggagcacagcatggccgtgggaacgagtgctctcagcaaggagccgtggtggaccctgcccgaaaactttcattctccaatggtgttccacatggaagaggaccaggaggagctcatcttcggtgagtggcctttgcccacgtcccctccttcatctgttttttat

SEQ ID NO: 36523 - DNA, 2300 bp, Homo sapien
ttagaggaaatatagtgtggtgattagaagcataggccaggcatggtggctcacacctgtaatcccagcattttgggaggccaaggtgagcagattacctgaggtcaggagtttgagaccagcctggccaacatggtgaaaccccgtctttactaaaaatacaaaaattagctgggcatggtggcgcatgcctgtaatcccagctacttgagaggctgaggcacgagaatggcttgaacccagaaggcggggattgcagtgagctaagatcacgccactgcctggtgacagagctagactctgtctcaaaaaataaataaataaataaaattttttttaaaaaaataagcatagactctaggaccaggcacagtggctcacacctgtaatcccaacactttgggaggtcgaggcgggcggaccccttgagcccaggaatttgagacccgcctgggcaatatggtgaaaccctgtcactataaaaaaaataccaaaaaaaaaaataggctgggagtggtggctcacgcctgtaatcccagcactttgggaggccaaggcgggtggatcatgaggtcaggagtttgaaaccagcctggccaaggtggtgaaaccccgtctctgctaaaaatacaaaaattagctgggcatggtggcaggcacctgtaatcccagctactcgggaggctgaggcaggagaatcacttgaacccgggagatagaggttgcagtgagccaagatcgcaccactgcactccagcctgggtgacagagcaagactccatctcaaaaaaaaaaaaaaaagcctagctgggcaaggtggtatgtgcctgcggtctcagctactcaggaggctgaggtgagagaattcattgagcccggcaggttggagctgcagtgagccatgatggtgccacagccctccagcctaggcagcaggaaagaggcccttctcaaaaaaaaaaaagcatagactctagggccaaattgatgtgctcaagcaaaggttttgccacttacggtgtaaccttgggccagttgcttaacctctcttgacctcacttgccttctttgtaaaccagaggtgataatagtatacccatttcatagggctgtggtgagaactagaggagttaatacatttaaagagcttaaaagtgtctggtgcatagcaagtgctacgtaaatgttaaacctttcctgcccttttcctctgctcctcctttcccttgtttcctgttacagcattccttctttttttcttactatttcctcactatgcctttgcttgaatactaaaaagaaactactggtccaacagcaggcaacacctcatgcgattactttaaatgacttcaaaataatacaaacatatccagcacaatagtttacattttaaaggtgttacacccattttgttttgagatgtgtcaacaaaacccgtgtttcttttctttctataagtttaaaatgtccccaaatcaattaacaatagaggaaagtcacacgatctgttttaatttttctctttatactgctatctcctgtttcccctgtttttacacttctttgcagctcactttccttatctgtaagatattcttaggatgaacttagtaagaaatgtgcaagatctagatgaagacccaccagataggatgctctcttgcagacacgcaactcactgactcaaccaatgaggaaattatcccacaaagcagataatcctaatggagggcagaattcaggactgagcatctcagtgatgccgccgggaacccaggcttctctgtcccttcaccggactaaccgagttcgagaccacaggggggtcaggtagccaaggctgggctttgacggtaggaatgaaggaggtgagggtggcgcgccgcaggcctgggccactccctgagtagggcggcggcggcggcggcggcggcggcggcagcggcggcagcggctgcaggcctggccgattgtgaggagacagcggtacctcctgggccgcgcacccgacccttccaggggtcccggctcgcgccgcggccgcgcgaggcgcgctcgagcggaagtggcggcgaccccgccggaagcgcgcggctgcggcgcgggaagcaacccagagccctcctcccgcctgctctgtgtaggagacagcctgcggagcccactgccggcgcgcagagagcccagcagctcttgagtccaggaagcaagggtgggaggagggacgagccagtggcaatgacccagacccggacgacccccattgctgagccagcggagctgcttggtgagtggcc

SEQ ID NO: 36524 - DNA, 2300 bp, Homo sapien
ctgtacaccgaattccttcttcagtacagacagagttactacttcattcttctctcaacattataattgttttgcggtttctggggagaatttatcttacttatttccttatctcaaaggcctatgcagaacagctaaataggtaactgatgagaaatatactactagacaaactctaacactcactcaacctaaaggtcttagaaatttgttctgtgacattttattgaaactacaccctgcatccaaccaaaagtaagggctgaatgactccttttatcctagagtgcactagtctctggggtatacatgcactcctcaatcagttctcagatgattctgcctctaagagcagcagaaactacaggtaatcatctccgggcttacttgaagttgtgtgctcattccaaaatctgccttgctcactcaagagtccaggtatcactggccttcgaggtcattaggcagcatccagtctttgaagcaaaccattccaggtttttgactctgctttcctgtcaatgtcagctagaggaactcttctccctgccttggccctggctggtcctggttccactctggctcatttgcttccacacctggcctatgataccacatgactaattccttcctgtgtgcctctggcccaggcttgccaaaggaatgcactcagagcagctctacctattcctgtccatcagttgctggttgcgcactggcactgcacatacctgctccacagaatcttaaaccttcaggactctacctgctcacaggtcctgggttcctacaggcgttcttcatcaagggtggggccacagctttgccccaagagggcaacctgcctccttgttcctgtactggcttgagactcctaggctgtgtctgaactagctgataggccagaagctttaggatgaaaagaatactggaggagtcctcaaagttagaacttttattggtgtctgtgtcccctcactcatcttagctatcttgacccttccctacttaccttaatgatttcgtgatttcaatgaaaaagacgcaacctagataagattgcaaggtcccataccttcctgggggcagagttgacctcagacagggtcttgctttgttgcccaggctggaatgcagtggcgtgatctcagctcacagcagcctcaaactctcgggctcaagcaatcctcccacctcagcttcccatatagcttgggctacaggcgtgcaccaccatgcccagctgatttttaaattttttgtagagacaagttctccctctgttgccccagctggtttcgaactcctgggctcaagcgatccttgctctttggcctcccaaagtgttgggattacaggtgtgagccactgtgcccagcccgaccttttgttaatactcccatctaattgtccaaacggacttgaacaaaagaatcttcttcccaatactgccagggagggcaaaattcttcaaattcatgtttgaggccataaacgaacaggagtaaaatggaatccgcaggaagcaatgacaagaaacccaaaaacattcatttccctccagcccaagtggcagatgggatctcaaatacaccacggtgtgatgcgtgacaggaggcatccactggggatgtggagcattttaagtgccctgcagagggtgggcctgggtcacccccccccccaccgcgacacccctccccaggcaacattcctggggagtctggacctcccttggtggaccgacacccgagggtctctagggtttttcaccccatatcggggtgaactgaaggcatgggaagaggcagccccacagcctgggtccccaaaaccccctccgggctgagagcaagagatgccgcctggaggccactcaccaagcagctccgctggctcagcaatgggggtcgtccgggtctgggtcattgccactggctcgtccctcctcccacccttgcttcctggactcaagagctgctgggctctctgcgcgccggcagtgggctccgcaggctgtctcctacacagagcaggcgggaggagggctctgggttgcttcccgcgccgcagccgcgcgcttccggcggggtcgccgccacttccgctcgagcgcgcctcgcgcggccgcggcgcgagccgggacccctggaagggtcgggtgcgcggcccaggaggtaccgctgtctcctcacaatcggccaggcctgcagccgctgccgccgctgccgccgccgccgccgccgccgccgccgccctactcagggagtggcccaggcctgcggcgcgccaccctcacc

SEQ ID NO: 36525 - DNA, 2300 bp, Homo sapien
acaataataatgggagaatttaacaccccactgtcaacattagacagatcaatgagacagaaagttaaaaaagatatccaggaattgaactcagctctgcaccaagcagacctaacagacgtctacagaactctccaccccaaatcaacataatatacattcttctcagcaccacaccgcacttattccaaaattgaccacatagttggaagtaaagcactcctcagcaaatgtaaaagaacagaaattataacaaactgtctctcagaccacagtgcaatcaaactggaactcaggattaagaaactcactcataactgctcaactacatggaaactgaacaacctgcccctgaatgactactgggtacataatgaaatgaaggcagaaataaagatgttatttgaaaccaatgagaacaaagacacaacataccagaatctctgggacacatttaaagcagtgtgtagagggaaatttatagcactaaatacccacaagagaaagcaggaaagatctaaaattgacaccctaacatcacaattaaaaaaactagagaagcaagagcaaacacattcaaaagctagcagaaggcaataaataactaagatcagagcagaactgaaggagatagagacacaaaaacccttcaaaaaatcaatgaatccaggagctgcttttttgaaaagatcaacaaaattgatagctagcaagactaataaagaagaaaagagagaagaatcaaatagacgcaataaaaaatgataaaggggatatcaccactgatcccacagaaatacaaactaccatcagagaatattataaacacctctatgcaaataaactagaaaatcgagaagaaatggataaattcctggacacatacaccctcccaagactaaaccaggaaaaaactgaatccctgaatagaccaataacaggctctgaaattgagccaataattaatagcctaccaaccaaaaaagtccaggaccagaaggattcacagccgaattctaccagaggtacaaggaagagctggtactagtccttctgaaactattccaatcaatagaaaaagagggaatcctccctaactcattttatgaggccagcatcatcctgataccaaagcctggcagagacacaacaaaaaaagagaattttagaccaatatccctgatgaacatcgatgcaaaaatcctcaataaaatactggcaaaccaaatccagcagcacatcaaaaagcttatccaccatgatcaagtgggcttcatccctgggatgcaaggctggttcaacatatgcaaatcaataaacataatccatcatataaacagaaccaaagaaaaaaaaccacatgattatctcaatagatgcagaaaaggcctttgacaaaattcaacagcgcttcatgctaaaaacactcaataaattaggtattgatgggacgtatctaaaaataataacagctgtttatgacaaacccacagccaatatcgtactgaataggcaaaaactggaagcattcccttagaaaactggcacaagacagggatgtcctctctcaccactgctattcaacatagtgttggaagttctggccagggcaatcaggcaggagaaagaaataaagaatattcaattaggaaaagaggaagtcaaattgtccgtttgcagatgacatgattgtatatttagaaaacctcatcttctcagcccgaaatctccttaggctgataagcaacttcagcaaagtctcgggatacaaaatcagtgtgcaaaaatcacaagcattcttacacacccagccccattttcgacgccctctacttggcagccggtgagcccccggcccctgcgtttctggctccagccccaggtggcggcgctgtaggctggagcccctggaaagcgctggcctggcagccctggggagtgttccaggcccttggaccgcagggagggcaaccaaatggcagaggcggtaacggagagcatccctgaacggtaaaaagtcgtctaaaggatcgaagaaacggagtgtgagcgagtccgtgggcgggacagcaccttcgggtgccggtcagaggagcgagcggcggaagaggcgggtccagggcggtgtaattaaggcgcggagcccagaccctcctgctacagtgcctcgggctttcctggaggcgggcggcgggatgctgctccgttctccgggtcctctcctccggttcttgtcgtttggtcacgccctcagttcagtcggttattggaaaacgatcaaggcccaaagatggtttacg

SEQ ID NO: 36526 - DNA, 2300 bp, Homo sapien
atttttagtacagatggggtttcaccatgttggccaggctggtctttaactcctgaccttgtgatccacccgtctcagcctcccaaagtgctgggattacaggcatgagccaccatgcccgccctgttttttgagtttttaataaaagtcattgtgactggtgtatgatggtatatcggtgtgattttaatttgcattcctcttctgattagtgatgcggagcattttttcatgtgtttgtaggctgcctgtatttcttcttttgagaaatatctcttcatgctccttgcccagttttgtttgtttgttttgtggagacagtctcgctctatccagcaggctgcagttcagtagcctgatatcggctcattgcaacctccgcctcaggagttcaagcgattctcatgcctcagcttcctgagtagctgggattacaggtgcccgtcaccatgcccggctaatttttgtatttttaatagagacaggatttcgccatgttggccaggctggtctagaactcctggcgtgagccactgtgcccggctttgccccatttttaatggtttttttttttcttgttgttttgcaaagtactttaatcatctcaattagcaagtaagaatttcccaactactaaatcattcctacatatgaaatatattcagccggttgggcatggtctgaatatatacattcggcctattaatgtggcaaacctgaagttctcttcagtgtttcaatactgaataaaaataaattataaattataatttgtcttatagcaacacatctaaaacagttattattattattatttttgagacagggtctcactctgtcacccaggggggagtgcagaggcaccatcactgcttactgtagactcagcctctctgggatcaagggattgtcccacctcagccttccgagtagctgggactacaggtgcgtgccacctagtccagctaatttttgtattttttgtagggatagggttttatcattttgcccaggccagaaggattgcttgagaccagcttgggcaacataacgaacccttgtcagaaagggaaggggaaaagaaaggaaaggaaaagggaaaggaaaaaagaaaggaaggaagaaagagacaaatataattgtgttatttagagaacagaggcatcactgggcatggtgtcgggagcttgtagtcccagctactgggggagctgaggagggaggatctcttgagcccaggagatggaggctgcagtgagctataatcacaccaccgccccctagcctgggtgacacagagagaccctgcagcaaattttaaaaattaaaaataaaaaagagaatagagatgtcaaaaattttcaaggaatctcatcttgtgtccaaaccacgagaactatctgtggttaggtgtgttcatggctgcattaattaaaagcgtgctatagtcccactactggggaggctaaagagggaggatttttttgagccctggagttcgaagccaacctgggcaacatagccaggccccataactttttttctatccattttttttttttactatgcaaatctcactacacagaccctataacagaaaaaaaaaagaaaaagaaagaaaaaaggcgggcgcttattctgctctgtactcagcagtctcaggcaagtgacagaataatctgaaaacctggtccagagggaggaaacgtagtggccagggatcagaagcgcgtgagggacctatgaagtattcattctgcaagtattagttctttcctctgggagagatactgggcttgcccacgccttcctgagtccatggttaagactcccgctgggcaccagcggattcctggtgcccagagcccggttcctcctaccgggtgcgctgggaaaagggctgctcctgacagaagggacactctaagagcagcccaggaaccggtgcacttgggcggcctcggaagaagccggggctcctggaggcggaggcgaggcctgggacccaataagaagggcgcggctagagaggaggggctggccaaaagcccttgaaataaggcccaggcagaaccgcggttctagtctcccagctccagctcggcctttgggtttgctgtggtgtccttgtctcctgcaggaccggccgcagcatggacgctcccaggcggtttccgacgctcgtgcaactgatgcagccaaaagcaatgccagtggaggtgctcggtcacctccctaagcggttctcctggttccactctgagttcctgaagaatccgaaggtagttcgccttgaggtt

SEQ ID NO: 36527 - DNA, 2300 bp, Homo sapien
tgagatggagtctctcgctctgtcatcaggctgaagtgcagtggcacaatcttggctcactgcaacctctgcctcccgggttcaagcaattattctgcctcagcctcccaagtagctgggactacaggcgcacaccaccacgcccagctaatttttgtatttttagtagagatggggttttaccatgttggccaggatggtctcgatctcttgaccttgtgatccagccgcctctgcctcccaaagtgctgggattacaggcatgagccaccacatccagccaatattttttgcatttttattagagatggggtttcaccatgttgaccaggctggtcacgagctccagacctcaagtgatctgcctgcctcacattcccaaggtgctgggattacagccatgagccacaccatgcctggcctggtgtccactgtgtttgatggatgattgaactgaaaaaaaaaaaattttttttttttgagacagggtctctgctctgttgcccagactggagtgcagtgacaccatttcggcacttcggctcactgtagcctcaacctccctggctcagtgatcctcccacctcagcctcctgagtagctgggactacagcctgtaccaccacacccggcagggtctcactatgttacccagactgatgttgaaccttggggctcaagagatcctccgcctaggcctcctaaagtgttgagattacaggtatgagttatccctgctggcctaaactgaaatttgttcagataattcaaagatcctaatcaaaggagtgcacttgcagctggcttgaagccctggagtagtagtatgtccagccacagagccaggctgcagtgacggtaatgcttcaggaatctattcaatttatttccttagctctaaaattatggcaggccaggcactgtggctcatacctgtaatccctcaactgtgtgaggccaaggcaggaggagttggataccagcccgggcaacatagggaggtcttgtctttacaaaataattagcctggcatggtggtgcacacctgtagtcccaactattcgggaggctgtggtgggagtatcacttgagtccaacaggtcgaatctgcagtgagtgatcgcaccactgcactccagcctaggcgacagaggtcaaaaacaaaacaaaagaaaacaaacaaaaaaaacatagcaaacatccagaagactgtgtagagcaatgaatgtctctcaagccagtgatctttttctcttcatttttcacatcaggtgggtagtgtgcccacttcgtaacaaggtttgagggaggcacatttgacacaagagcatgaaaacccaatcacacttatgacttacaaaaggatcaagtcagtgatctttaagctgtgggccattaaatacattttgtgagccgagtgcagtggctcaggcctgtaaccccagcactatgggaggtggaggtgggaggatcacttgagtccaggagttcaagaccagccttgggcaacatactgggaactcccatctctattaaattttttttttttaattttgtggattacaaccatttcaaaaactaaaataagcgtaaatgtatcaaaatgcagcttacatagcgaggataaatgctgttttgtcaatctgttgtttcaagttttttatgtgtggattgggtcaccttgtaacagtgacttacctttatgggtcacggttgaaaacatttccggtgcagtggctgactgtaatcccagcactttgggaggccgaggctggaagatcacttgaagccagaagccaagagttcaagacctgcctgggcaacacggcgacaccccgtctctatttaaaaagaaaaaaaaaagtttccaaggcactgagatgccaggaacccgaggtgtgtgtccagtaggggagggagcaaattgggcgtttggaaaaagtcccacgcctggaaaggaatacacagtgggggggtggggggcggggcacatcgactacttcaaggcacactcccacggttcagaaaaccgattggctaaaactgggaaagtcccgcccacaacgctcactggccaatggctgcgtgaaatcagtgcgaagtgggcgggatagagagcgtgggcgggggggctagcctcgtgcgggctccttaagtagcggctgcgtggcttccctggcacgctactcttacgacgtcacggtcaggtggtgcagagctggacggcaacgacgtcggacgcgccccttcttggaacaatgtcccaccacggaggagctcccaaggcctctacgtgggtc

SEQ ID NO: 36528 - DNA, 2300 bp, Homo sapien
aattggaacccctgtgtactgttggtgggattgaaaatggtgctgccactatggaaaacagtatagattaactaaaaaattaaaaacagaattaacatatgatccagcagtctcacttggggtatacatccaaaagaatttaaagctgagtctcaaagatatattgcacttccattttcataataacactactgaaatcaaaaggtggaagctacccatttatcatagactgattaatagataaagtaaggtatatacttaataatggaataccattcagccttagtaaggaaaaaaatcctgtctcatgctacaaaatgggtaagcctggaggatattattcttagagaaatgagccaattacaaagacaattactgcatgattctacttatatggattacctaaagtaatctaactcagaaacaatgtaaatggtgggtccctgggatggggcaggaaaaaatggggagctgttcaatgagtatacagttttagtcatgcaagttccagagatctgggatacaacattgtgcttattattagtattgtgatatacgtttaaaagagggtatttcattttttacaataaaaaagatggatccagatccaacatcaagtgagtgctctgtagcacagtgccctttcatctgctaagtattaacttaagtgatttttattgcaaacctagtggctttctttcttggagcatcattcttcagatctgagcccaagccttctgaaaggccaatgagtctctgggtagtacagcaattagtcttacaatgcactattttgtagcagcctccatctattcatttttctcaggttttaaaaagggtgaaatacacctaataggtaaaatgtggcaatttatactcgggcttaatggcaatcaatggggtaatcattctaatcatttttaaatgcttttcaaaaaaattcagaaatgggccgggcttacgcctgtaatctcagcactttgggaggccgaggtgggtggatccacaggagttcgagaccatcctgggtaatatggtgaaacctcatctttactaaaaacacaaaaattagccaggtgtggtggcgcacgtaatttcagctactagggaggctgaggtgctagaatcgcttgagcccgggaggtggaagttgtagtgagccgagatcacgccacactgcactccagctggggccacagagctgcctcaaaaaaaaaaaaaatcaaaagaaagaaaaaaattaaaaattcagaattgaatgttaacactcaagatgtagtaagaaaagtttttaactttttaaaaattaaggaaactaaaagcaagatacaactgctctaggcagccctacaatgaccttatagcttttctttgatttctggctctaaatggtactcatagaaagactgattaagttttgtttttcattctggggttagctgtctgttaaaaggcctgttctaagcatccctcttcagccctaagatttcataagtcttctaggagttgctctcccaaatacattgtctgtataaacaccaaaaggtggattaaattactttttttttttttttttaattgagacggagtcttgctctgtcacctaggctggagtgcagtggcgcgatctcagctcactgccaacttctgccgccgggttcaagccattctcctgcctcagcctccggagtatctgggattacaggcgcgcgccaccacgcccagctattttttttaatatatatatttttagtagagacagggttttgccatgttggccaagctggtctcgaattcctgacctggggtgatccgcccgcctcggcctcccaaaatactgggattacaggcgtgagccaacgcgcccggccagattaaattatactctatccccaggttttacaaatagctctgggagagacctgaacctcactaggtggcagctgattggaggtgaggcagtggggaggaaatgccttcgcccaggctccgcccctggccccacctatcctgccctgccagccactcccattctcaccgattaccgcgccaacaaagtggctcttcaaagcaaaacacagcggcagttcctcgtgaccagcggccacggcctccgggggcctagaggtgcctctccagcgaccacctctgccgacactatatccctcaggacctgttcgattcaactcctccgccggcctcctctctggcgctcgggacactgtcgagcttcgccgactagcaacgacccacgtagaggccttgggagctcctccgtggtgggacattgttccaagaag

SEQ ID NO: 36529 - DNA, 2300 bp, Homo sapien
aagtatttactccaattgcagtcaatctttgtttcattccatcttgtaaaagttgaatattttctctttcttatttttttcttttttcaaagtatttttcatttgttattaatttttttctttttaaaaattattattttatttcttattgatttttaaaaaaccctatttaaatttacattgaaaaagttggccgggcgctgaggctcatgcccgtaatcccaacagtttgggaggccgaggcaggtggatcacgagataaggagtcccagaccagcctggccaatatggtgaaactcctttctactaaaaatacaaaaattagccgggcatggcggcgcacacctgtagtcccagctacttcggaggctgaggcaggagaatcgcttgaatccgggaggcagaggttacagtgagccgagatcgtgccactgcactccagcctaggggacagaatgagactccatctcaggaaaaaaaaaaaaaaaaagggaaaagtttctggccaggcgccgtggctcacgcctgtaatcgcagcactttgggaggccgaggcgggtggatcacttgaggtcagcagtttgagagcagcctggccaacatagcgaaaccccgtctctactaaaaatacgaaaaattagccgggcgtggtggcgggcgtctgtaatcccagctacccgggaggctgaggtaggagaattgcttgaacccaggaggcagaggttgcagtgagccaagatcgcaccattgcacttcggcctgggtgacaagagcgaaattctgtctcaaaaaaaaaaaaaaaaaaaaagaaagaaagaaagaaaagaaaaagaaaaaaaagaaaagaaaaagtttctgtggcagggcacagtggctcatgcctacaatcccaacactttgggaggttgaggagggagaatcgcttgagtctaggagttcgagaccagcctgggcaacatagtgagacctccccatgtatacaaaaaaattaaaaagaaaagaaaaagctgggcatggtgtccgcacctgtagtaacagctactcaggatgctgaggtgggaggatcgcttgagccctggtggctgaggttgcagtgagccgagattgcgcccccctaactcaaaccaaaattaaatttaaaaaaactttcacttgaaagagaaaagtttctctgtcaatgtttttgttttgttttgttttgttttgtgatggactctttttctgttgcccaggctggagtgcagtggcgcgatctcggctcactgcaacctctgcctcccgggttcaagcagttctctgtctcggcctcccgagtagatgggactacaggcgccaccaagcccggctaattttttgtatttttagtagagacggggtttcaccatgttggccaggaaggtctcgatgtcttggcctcgtgatccgcccgcctcggcctcccaaactgctgagattacaggcgtgagccaccacgcctggcctctttttcttttttgagacagagtctcgctctgtcgcccaggctggagtgaagtggcacgtctcagctcactgcaacctccgcctcccgggttcaagtgattctccagcctcagcctcccgagtagctgggattacaggtgcccgccaccacgcctagctaatatttgtattttttagtagagacggggtttctttcgccttgttggccaggctggtcttgaactcctgacctcaggtgatccgcccacctcggtctcccagattgctgggattacaggcgtgagtcagtgtgcccaggcaacacacacacacacatatatttaattataagaaagaccaggtcttgctgggttgcccaggctggtctcaaactcctgagctcaagcgacccgcctgcctcggcctctcggatgctgaggttacaggcgtgagccaccgcgcccggccctacctcatcttcttaagacaggggcacggattgcctggagagttagaaacttcgagacttttgtagcctcaggaaaggccgcggccagcctcttcgcggcatgggcgtggctcccagcgacttcccagcctggggttccccttcgggtcgcagactcttgtgtgcccgccagtagtgcttggtttccaacagctgctgctggctcttcctcttgcggccttttcctgaaacggattcttctttcggggaacagaaagcgccagccatgcagccttggcacggaaaggccatgcagagagcttccgaggccggagccactgcccccaaggcttccgcacggaatgccaggggcgccccgatggatcccacc

SEQ ID NO: 36530 - DNA, 2300 bp, Homo sapien
acgcatgaggggcgcctgtccctgtgggtaagatagggctataaatgccctcatcttgccacggctcttctaggcctttttagggttaaggcatactcccttctgagaatttctggtctaactgattgtctagcttcacatcctgtttctatggattgtttgtaaccagcttttgctgcaactgttactgctgattaatatcttgctaatcataggttatggaaagactgtttctgttttaaggctctgttagaaattactgatgcacacaatatattgtaaattcttatctctgtatactgtacttctgcatacagatgttatgttaaagaattacttcatccccatgtgaccatctcacctcataatcaaatgaccctaaatccctcactaacctacccctgccctcactaaacttaataataaatgctggtatatccagtgtattagcagcattgcaggaccagaaggcagtgacccccctggacccagctttcaatatcttctgtgtgtctattatttctcgacctgccaatccgcctgggaacaaagaaagagccccattgcattgtgggctgctggccagatcctgcaataccacacttgttttattctccagtcaaacgttgcctttctgagaaaggctgtgaattgagaaaggctgtgaattccaaaaggctggacatttaacctccaaccaaccgattcttctaattaaccaattagccatcatgaatctctctctctcttttttttttttttgagacagagtctcactcttgtcgccaggctggagtgcagtggcacgatctcggctcactgcaacctctgcctacgggttcaagcaattctcctgcctcagccgcccaagtagctgggactacaggtgcatgccaccacacctggctaatttttttttttgtattttagtacagacggggtttcaccatgttgcccagattggtctcgaactcctgagctcaggcaatctgcccccttcggccttccaaagtgctaggattacaggcgtgatccaccatgcccaggcaccatcatgaatctttcagtccacaaatatatttgaactcctttcgaatctattctttttcttttctttttctttttttttttttgagacggagtcttgctctgtcgcccaggctggagtgcagtggcacaatcttggttcactgcaacctcggcctcccaggttcaagcgattctcctgcctcagtctcctgagtagctgggattacaggtgcatgccaccactcccggctaattttttttttttttttttttttttttttttttagtagcgatggggtttcaccatgttgaccaggatggtctccatctcctgaccttgtgatccacctgcttcggcctcccagagtgctgggaatacaggcgtgagccaccgcgcccggcccgaatctattcttattttcagcccttagtttttatagacaaacagaaggtgacggtgtatcagattgtcagatcacaaagatctgataaggcaaagtgatcaaattcattgatcgtaggtggccacctggcgataaggactgcagggcctaagaaagtacaaaagatgacctttagtaggagctcccaacccagaaccacaggaaatcaaaaaaagcccgcacgggcggatcacgaggtcaggaaatcgagaacatcctggctaatacggtgaaacccagtctctactaaaaatacaaaaaattagccgggcgtagtggcgggcgcctgtagccccagctactcggaggctaaggcaggagaatggcgcgaacccgggagggggagcttgcagtgagccgaaatcgcgccactgcattccagcctgggcaacagagcgagactctgtctcaaaataaataaataaataaataaataaataaataaataaataaataaataaataaataaataaaaataaaaaataataataataaaaaaagcccgcacgaactaggaaagaaaatacacaaccggccctccgtgcgatcacccatctccctcaccaggaaagtagctccaaaccgccaatcagcggcgacgctggacgtagacgtcctaccccgtgatattaaagcaagatggccgcgccctgcagattgtctcttgttgcgtaagtttttttgaccgtcactcgtgtcagcttcaaagtcagatagatttttctcccagcatgttctacttccgaggctgtggccgttgggtcgcggtttccttcaccaagcagcaatttccgttggcacggttgagcagtgacagcgcggcgcccc

SEQ ID NO: 36531 - DNA, 2300 bp, Homo sapien
ctttaaagtcttttatctggaacagtttgtcaatctttaatggtgccgacatttttgaagtgtagaggccacttttacctatctctcgagttttaaaaaaatgtggcgtggcatggtggctcacacctgtaatcccagcactttgggaggccaaggcaggtggatcacaaggtcaaaagattgagaccatcctggccaacatggtgaaaccccgtctctactaaaaatacaaaaattagctgggcatggtggcatgcccctgtagtcccagctacttgggaggctgaggcagaattgcttgaacccgggaggcagaggttgcagtgagcagagatgatgccactgcacttcagcctggcgacagagcaagactctgtctcaaaaaaaaaaaaaaaagtatattgtatgtgtttaagattgaggatgaagaattggccaggcacagtgactctcacctgtaataccagcactttgggaggccaaggtaggaggatcacttaagcctaggagttcaagaccagcctgggcaacataatgagaccctgcctgtacaaaaaaaaaataattgatggtcctagtttctggtgagtgttatcctgatgtatggcttcaaatattctgttactttgagcaagatacttttatatatttgctttggtagtatgcaaattatgataaccctttcttcttttttgagacagagtcttgcccaggctagagtgcaatggtaatggcgcaagcttggcccactgcaacctccaccccctgggttcaagcgattctcctgcctgagcctcccaagtagctgggattacaggcacctgccaccatgcctggctaattttttggatttttttagtagagacagagttttaccatgttgaccaggctgttctcaaactcctgacctcaggtgatccacacaccttggcctcccaaagtgctgggattacaggcgtgagccacggcgcccagcccaaacaaagcaaggagtccctgggtgggcacaaaaacactttttttttttcttttttttttttttgagacggaatctcgccctgtcatccaggctggagtgcaatggtgcaatctcggctcactgcaacctccgcctcccaggttcaagtgattctcatgcctcagcctcccgagtagctgggattacaggcacccgccaccatgcccagctaatttttgtctttttagtagagacaggatttcaccatgttggccaggctggtctcaaacttctgacctcgtgctccacctgccttggcctcccaaagtgttgatattacaggtgtgagccacttgcacttggcaataacttttttaaaaaagtaaccatggccaggcacggtggctcacacctgtaatcccagcactttgggaggctgaggcaggtggatcgcctgaggtcaagagttcgagaccagcctggccaacatggtgaaactctgtctctaccaaaaatacaaaaattagccgaacgtagtggtgcatgcctgtgatcccagctacttgggaggctgaggcaggagaatcgcttgaacccgggacacagaggttggagtgagctgagatcacgctactgccctccagcctgggcaacagagtgagactccgtctcaaaaaataaaaacattaaaaaaaaattaaactgctagttagatttagagttttgcttaaatttaacttcatcttttgggatgtttatttttggcaagaatacttcataagtaatactaggcattatgcacaagtttagtgtctattaaagtcagtacgtatcatgtggaatttatttggataagagagaaactagtagataagcaaatcagtattgcatctggttactgttttttagccagaagatcagctgccatgttacttgactcacaccaaccctagagtggatgagattgtccttaagaaccttcaccttaatagtcatgttaaagaaacgacaagaggacctcggtaagggcaaaatgtcagtgctcagttactttaaggaatgacgtcaatcctcttttgttcatttcaagtttatttaaatgttctattctagatactgtccctccattgaatcaaaagttttgcgttttccaaaccgtctacatcaggtttggttggaacctgaaggaatggattctgaccttatctacccacaggggttatctatgacgctaccagctgagttacaagagaaaatgatcacatgcatcagaggcttggagaaagctaaagtgattcagccaggtaaagaagatcacaagtgcccttcagtataaggtcag

SEQ ID NO: 36532 - DNA, 2300 bp, Homo sapien
atcagattaactgggaaagatacagtacaggcagatcacttgagcccaggagttgaccagccttggcaacatggcaaaatacaaaaattagccaggcgtggtggcaaaaacctgtggtccctgctattcagggaagatcacttaagcccagaagtcaggactgcagttagccgttaacttccactccaaccagggcaggagtaaaaccctgtctaaacaaaaaaagccaagcactaccttgaaatcaactgaagttagctctcacttttgaaatccactccaaaatttgtaaccaattccaacatagtaactgttaaaagaaatgccacttcatcttaaagcttaaaattcatttattgtagtgagcaagtttgtaatgaataccagcaggtggtgctcaagccacagttgtctaagacactgggtttcacaggaagttaatctcaatctcagtatatgcaagtaaactgactcattcctgcttccagtgggaacaatttttcagttaaatcttgcttccttgcatgtcaagaattctctactggtaaatcttacaggtgtcaactttcattatcagggcatctattggccatctattaaaggccttacctgttttttctgtcatccagcaaatcttagactatttacttgtgtaaacattagatagcaaagaaactaaggacaaaaatctctagttcaatttagacttgatacctcagagcactggctgatgggaaggcattttatctaattcagactcagatgagggaaaacgataacacttcattacagacttgtctatggccaattcaagtacctttgaatcttgagcaatacacattgccagtcactttaagaggccttatctcttgggctgctttaactcctgcttagcatgtccttaagaacacatgtcctggccaggcatggtggctcatgcctgtaattccagcactttaggaggccgaggcgatcacctaaggtcaggagtttgagaccagcctgaccaacatggaaaaacctcatctctattaaaaacaccaaattagcacatgcctgtaatcccagctacttgggaggctgaagtaggagaattgcttgaacccaggaggaggagattgcagtgagattttgccattgcattctagcctgggcaacaagaactccatcttaaaaaaaatttttaaaaaccatcacacaaacagaaagcatgtcctttaattttacctatccttcaaacttaagcaaaaattttccttttataaccaaaaaaaaacctttagacacttttacatatgggaggtcaggcacagtggctcatgcctgtaatcccagcaggaagatcgcgaaaagcatttttcaaatgcacaaatgcttaaagattcaggagtaagtgggctattacacctgttaagcctattaccatgtagtttcattcctagtgaccaagtagacaaactgctaattatcaaagcataaaaggtattagactctgcaggagaaaagcaatgtagattagtctaattttatagctacttcaaattgccatctttttctattagaaccttgttcctattctgaatagcactcaatagaacttgtgaaaccatcaaactggcataaagcttactccactgacttcaaaatggacccttccactcatagggtgtacactagccactacacttatttcttatgtcatggcaaatagtcaactttcactgcccagtcattttaacccacgtttcaacatgcacatcccagtaatttggaaacattttgtttccaaagattcacttaacattggtttagcaacatgaagctttctatgcaacacaaggactcagtttttggcctgttttagtgacaggcaatcagcaacatgctgcatttctctccagtgttgtaatcaaagcaaccctcccatagctttaaatgatattccttccccttccaattatgtggggggaaaacaaccctattctccacccagaagtgttaactcaagaattacattttcaagaagtttccagattcgtaaaaccagaattagatgtctttcacctaaatgtctcggtgttgaccaaaggaacacacaggtttctcatttaacttttttaatgggtctcaaaattctgtgacaaatttttggtcaagttgtttccattaaaaagtactgattttaaaaactaataacttaaaactgccacacgcaaaaaagaaaaccaaagtggtccacaaaacattctcctttccttctgaaggttttacgatgcattgttatcattaaccagtctttt

SEQ ID NO: 36533 - DNA, 2300 bp, Homo sapien
aattacttccacgcccctggctgcagtacgtgattcttgatcccgagcttcgggttggaagtgggtgggagagttcgaggccttgcgcttaaggagccccttcgcctcgtgcttgagttgaggcctggcttgggcgctggggccgccgcgtgcgaatctggtggcaccttcgcgcctgtctcgctgctttcgataagtctctagccatttaaaatttttgatgacctgctgcgacgctttttttctggcaagatagtcttgtaaatgcgggccaagatctgcacactggtatttcggtttttggggccgcgggcggcgacggggcccgtgcgtcccagcgcacatgttcggcgaggcggggcctgcgagcgcggccaccgagaatcggacgggggtagtctcaagctggccggcctgctctggtgcctggcctcgcgccgccgtgtatcgccccgccctgggcggcaaggctggcccggtcggcaccagttgcgtgagcggaaagatggccgcttcccggccctgctgcagggagctcaaaatggaggacgcggcgctcgggagagcgggcgggtgagtcacccacacaaaggaaaagggcctttccgtcctcagccgtcgcttcatgtgactccacggagtaccgggcgccgtccaggcacctcgattagttctcgagcttttggagtacgtcgtctttaggttggggggaggggttttatgcgatggagtttccccacactgagtgggtggagactgaagttaggccagcttggcacttgatgtaattctccttggaatttgccctttttgagtttggatcttggttcattctcaagcctcagacagtggttcaaagtttttttcttccatttcaggtgtcgtgaaaactacccctaaaagccaaaatgggaaaggaaaagactcatatcaacattgtcgtcattggacacgtagattcgggcaagtccaccactactggccatctgatctataaatgcggtggcatcgacaaaagaaccattgaaaaatttgagaaggaggctgctgaggtatgtttaataccagaaagggaaagatcaactaaaatgagttttaccagcagaatcattaggtgatttccccagaactagtgagtggtttagatctgaatgctaatagttaagaccttacttatgaaataattttgcttttggtgacttctgtaatcgtattgctagtgagtagatttggatgttaatagttaagatccgacttataaaagtttgatttttggttgcttctgtaacccaaagtgactaaaatcactttggacttggagttgtaaagtggaaactgccaattaagggctggggacaaggaaattgaagctggagtttgtgttttagtaaccaagtaacgactcttaatccttacagatgggaaagggctccttcaagtatgcctgggtcttggataaactgaaagctgagcgtgaacgtggtatcaccattgatatctccttgtggaaatttgagaccagcaagtactatgtgactatcattgatgccccaggacacagagactttatcaaaaacatgattacagggacatctcaggttggtgggattaataattctaggtttctttatcccaaaaggcttgctttgtacactggttttgtcatttggagagttgacagggatatgtctttgctttctttaaaggctgactgtgctgtcctgattgttgctgctggtgttggtgaatttgaagctggtatctccaagaatgggcagacccgagagcatgcccttctggcttacacactgggtgtgaaacaactaattgtcggtgttaacaaaatggattccactgagccaccctacagccagaagagatatgaggaaattgttaaggaagtcagcacttacattaagaaaattggctacaaccccgacacagtagcatttgtgccaatttctggttggaatggtgacaacatgctggagccaagtgctaacgtaagtggctttcaagaccattgttaaaaagctctgggaatggcgatttcatgcttacacaaattggcatgcttgtgtttcagatgccttggttcaagggatggaaagtcacccgtaaggatggcaatgccagtggaaccacgctgcttgaggctctggactgcatcctaccaccaactcgtccaactgacaagcccttgcgcctgcctctccaggatgtctacaaaattggtggtaagttggctgtaaacaaagttgaatttgagttgatagagtactgtctgccttcataggtat

SEQ ID NO: 36534 - DNA, 2300 bp, Homo sapien
agccagcaatggtagagggaagattctgcacgtcccttccaggcggcctccccgtcaccaccccccccaacccgccccgaccggagctgagagtaattcatacaaaaggactcgcccctgccttggggaatcccagggaccgtcgttaaactcccactaacgtagaacccagagatcgctgcgttcccgccccctcacccgcccgctctcgtcatcactgaggtggagaagagcatgcgtgaggctccggtgcccgtcagtgggcagagcgcacatcgcccacagtccccgagaagttggggggaggggtcggcaattgaaccggtgcctagagaaggtggcgcggggtaaactgggaaagtgatgtcgtgtactggctccgcctttttcccgagggtgggggagaaccgtatataagtgcagtagtcgccgtgaacgttctttttcgcaacgggtttgccgccagaacacaggtaagtgccgtgtgtggttcccgcgggcctggcctctttacgggttatggcccttgcgtgccttgaattacttccacgcccctggctgcagtacgtgattcttgatcccgagcttcgggttggaagtgggtgggagagttcgaggccttgcgcttaaggagccccttcgcctcgtgcttgagttgaggcctggcttgggcgctggggccgccgcgtgcgaatctggtggcaccttcgcgcctgtctcgctgctttcgataagtctctagccatttaaaatttttgatgacctgctgcgacgctttttttctggcaagatagtcttgtaaatgcgggccaagatctgcacactggtatttcggtttttggggccgcgggcggcgacggggcccgtgcgtcccagcgcacatgttcggcgaggcggggcctgcgagcgcggccaccgagaatcggacgggggtagtctcaagctggccggcctgctctggtgcctggcctcgcgccgccgtgtatcgccccgccctgggcggcaaggctggcccggtcggcaccagttgcgtgagcggaaagatggccgcttcccggccctgctgcagggagctcaaaatggaggacgcggcgctcgggagagcgggcgggtgagtcacccacacaaaggaaaagggcctttccgtcctcagccgtcgcttcatgtgactccacggagtaccgggcgccgtccaggcacctcgattagttctcgagcttttggagtacgtcgtctttaggttggggggaggggttttatgcgatggagtttccccacactgagtgggtggagactgaagttaggccagcttggcacttgatgtaattctccttggaatttgccctttttgagtttggatcttggttcattctcaagcctcagacagtggttcaaagtttttttcttccatttcaggtgtcgtgaaaactacccctaaaagccaaaatgggaaaggaaaagactcatatcaacattgtcgtcattggacacgtagattcgggcaagtccaccactactggccatctgatctataaatgcggtggcatcgacaaaagaaccattgaaaaatttgagaaggaggctgctgaggtatgtttaataccagaaagggaaagatcaactaaaatgagttttaccagcagaatcattaggtgatttccccagaactagtgagtggtttagatctgaatgctaatagttaagaccttacttatgaaataattttgcttttggtgacttctgtaatcgtattgctagtgagtagatttggatgttaatagttaagatccgacttataaaagtttgatttttggttgcttctgtaacccaaagtgactaaaatcactttggacttggagttgtaaagtggaaactgccaattaagggctggggacaaggaaattgaagctggagtttgtgttttagtaaccaagtaacgactcttaatccttacagatgggaaagggctccttcaagtatgcctgggtcttggataaactgaaagctgagcgtgaacgtggtatcaccattgatatctccttgtggaaatttgagaccagcaagtactatgtgactatcattgatgccccaggacacagagactttatcaaaaacatgattacagggacatctcaggttggtgggattaataattctaggtttctttatcccaaaaggcttgctttgtacactggttttgtcatttggagagttgacagggatatgtctttgctttctttaaaggctgactgtgctgtcctgattgttgctgctggtgttggtgaatttgaagctggtat

SEQ ID NO: 36535 - DNA, 2300 bp, Homo sapien
taggcacttatttaaataggagaagctgtgacttcatagcaagtgttggggttaggaaactgggtggataaacttgctgatgctgtagatcttagcctctacatgagatcatgtggaaaatctgaaagcattttaggttccttatgtttgcaatcaaataactgtacaccttttaatttaaaaagtaccatgaggcacacacacacactcgcaggaactttttggcgtaacaaaactagaattagatctaaagctaactgtaggactgagtctattctaaactgaaagcctggacatctggagtaccagggggagatgacgtgttacgggcttccataaaagcagctggctttgaatggaaggagccaagaggccagcacaggagcggattcgtcgctttcacggccatcgagccgaacctctcgcaagtccgtgagccgttaaggaggcccccagtcccgacccttcgccccaagcccctcggggtccccgggcctggtactccttgccacacgggaggggcgcggaagccggggcggaggaggagccaaccccgggctgggctgagacccgcagaggaagacgctctagggatttgtcccggactagcgagatggcaaggctgaggacgggaggctgattgagaggcgaaggtacaccctaatctcaatacaacctttggagctaagccagcaatggtagagggaagattctgcacgtcccttccaggcggcctccccgtcaccaccccccccaacccgccccgaccggagctgagagtaattcatacaaaaggactcgcccctgccttggggaatcccagggaccgtcgttaaactcccactaacgtagaacccagagatcgctgcgttcccgccccctcacccgcccgctctcgtcatcactgaggtggagaagagcatgcgtgaggctccggtgcccgtcagtgggcagagcgcacatcgcccacagtccccgagaagttggggggaggggtcggcaattgaaccggtgcctagagaaggtggcgcggggtaaactgggaaagtgatgtcgtgtactggctccgcctttttcccgagggtgggggagaaccgtatataagtgcagtagtcgccgtgaacgttctttttcgcaacgggtttgccgccagaacacaggtaagtgccgtgtgtggttcccgcgggcctggcctctttacgggttatggcccttgcgtgccttgaattacttccacgcccctggctgcagtacgtgattcttgatcccgagcttcgggttggaagtgggtgggagagttcgaggccttgcgcttaaggagccccttcgcctcgtgcttgagttgaggcctggcttgggcgctggggccgccgcgtgcgaatctggtggcaccttcgcgcctgtctcgctgctttcgataagtctctagccatttaaaatttttgatgacctgctgcgacgctttttttctggcaagatagtcttgtaaatgcgggccaagatctgcacactggtatttcggtttttggggccgcgggcggcgacggggcccgtgcgtcccagcgcacatgttcggcgaggcggggcctgcgagcgcggccaccgagaatcggacgggggtagtctcaagctggccggcctgctctggtgcctggcctcgcgccgccgtgtatcgccccgccctgggcggcaaggctggcccggtcggcaccagttgcgtgagcggaaagatggccgcttcccggccctgctgcagggagctcaaaatggaggacgcggcgctcgggagagcgggcgggtgagtcacccacacaaaggaaaagggcctttccgtcctcagccgtcgcttcatgtgactccacggagtaccgggcgccgtccaggcacctcgattagttctcgagcttttggagtacgtcgtctttaggttggggggaggggttttatgcgatggagtttccccacactgagtgggtggagactgaagttaggccagcttggcacttgatgtaattctccttggaatttgccctttttgagtttggatcttggttcattctcaagcctcagacagtggttcaaagtttttttcttccatttcaggtgtcgtgaaaactacccctaaaagccaaaatgggaaaggaaaagactcatatcaacattgtcgtcattggacacgtagattcgggcaagtccaccactactggccatctgatctataaatgcggtggcatcgacaaaagaaccattgaaaaatttgagaaggaggctgctgaggtatgtttaataccagaaaggga

SEQ ID NO: 36536 - DNA, 2300 bp, Homo sapien
ttaaacgcgagaattgagatctcccttcacctaatgaaagtctcggccactatcgcaacattcagaacacccagtctgtgttgcacaatatgttacttaggtataaatcaaggattcatgtaattttgtcattccttgcgtgatattttaaaaaacattctgtgtaaggtatttataaagcgtttactattatccgcaatcacaggggcttgaggaaaaactttgactgtggccgggcaccgtggctcacgcctgtaatcccagcactttgggagaccgagccgggtggatcacttgaggtcagcagttcgagaccagcctggccaacatggtgaaacccccgtctcttctaaaaatacaaaaatttgtggggcgcgcttgtagtcccagctacttgggaggctgaggcaggaggaatcgcttgaactcgggaggcagagcttgcagtgagccgagatcgcgccactgcactccagcctgggcaacagagtagaactccgtctcaaaaaaaaaaaaaaaaaagaaagaaagaaaaaaaagtggactgtgaaaactgaaaggactagaaaaactacactacaaagatacagaaaccaagaaagcaccatagcgtttgccttcaactgcttcccaacttgttttcctcttccaatttgattgtggtttcctctccagaaggaactccacagtacttagcgttggccacatagtaggttctcaaatacttgttaataaataagtttgttcgagaagctgggcaatgatattctacagctggaagaagaaacataatgatctagtaattagctcattaaaaataaacgttcttctttcctcagaggagcatttcccaaggcctgccttgatagccatccaaaaaggccaagctcatccaatcttgccctagatttatgctaaaatgcagttacaatcgataggatgacagaaaacgacagcacttatttaaatataataggcacttatttaaataggagaagctgtgacttcatagcaagtgttggggttaggaaactgggtggataaacttgctgatgctgtagatcttagcctctacatgagatcatgtggaaaatctgaaagcattttaggttccttatgtttgcaatcaaataactgtacaccttttaatttaaaaagtaccatgaggcacacacacacactcgcaggaactttttggcgtaacaaaactagaattagatctaaagctaactgtaggactgagtctattctaaactgaaagcctggacatctggagtaccagggggagatgacgtgttacgggcttccataaaagcagctggctttgaatggaaggagccaagaggccagcacaggagcggattcgtcgctttcacggccatcgagccgaacctctcgcaagtccgtgagccgttaaggaggcccccagtcccgacccttcgccccaagcccctcggggtccccgggcctggtactccttgccacacgggaggggcgcggaagccggggcggaggaggagccaaccccgggctgggctgagacccgcagaggaagacgctctagggatttgtcccggactagcgagatggcaaggctgaggacgggaggctgattgagaggcgaaggtacaccctaatctcaatacaacctttggagctaagccagcaatggtagagggaagattctgcacgtcccttccaggcggcctccccgtcaccaccccccccaacccgccccgaccggagctgagagtaattcatacaaaaggactcgcccctgccttggggaatcccagggaccgtcgttaaactcccactaacgtagaacccagagatcgctgcgttcccgccccctcacccgcccgctctcgtcatcactgaggtggagaagagcatgcgtgaggctccggtgcccgtcagtgggcagagcgcacatcgcccacagtccccgagaagttggggggaggggtcggcaattgaaccggtgcctagagaaggtggcgcggggtaaactgggaaagtgatgtcgtgtactggctccgcctttttcccgagggtgggggagaaccgtatataagtgcagtagtcgccgtgaacgttctttttcgcaacgggtttgccgccagaacacaggtaagtgccgtgtgtggttcccgcgggcctggcctctttacgggttatggcccttgcgtgccttgaattacttccacgcccctggctgcagtacgtgattcttgatcccgagcttcgggttggaagtgggtgggagagttcgaggccttgcgcttaaggagcccctt

SEQ ID NO: 36537 - DNA, 2300 bp, Homo sapien
aggaccacccgcgcccgccttgccgccccagcctccctccctaggaagcagggtgcgccccggtgcgcgcggggcttccccggaccggcgttccagtccctctccggcttccggcccaccccggccccactgagagcagaaatgtgatctctgccctgagaaaatgctcgtggccagtgactacccctaacgcacaataatatggctccgatgggctcaaaggtattggttttttgttttgttttgagacaaggtctcactcggtcgcccaggctggagtgcaattgcgtgatcttgactcactgcaacctccgcttcccgggctcaagcgattctcctgcctcagcctcccaagtagctgggattacaggcatgcgccaccacgcccggctaattttgtattttcagtagacagggtttcaccatgttggccaggctggtctcgaactcctggcctcaaattatacgtccgcctcggcctcccaaggtgctggtattataggcgtgagccaccgcgcccggtccagtgttggttcttaaacgcgagaattgagatctcccttcacctaatgaaagtctcggccactatcgcaacattcagaacacccagtctgtgttgcacaatatgttacttaggtataaatcaaggattcatgtaattttgtcattccttgcgtgatattttaaaaaacattctgtgtaaggtatttataaagcgtttactattatccgcaatcacaggggcttgaggaaaaactttgactgtggccgggcaccgtggctcacgcctgtaatcccagcactttgggagaccgagccgggtggatcacttgaggtcagcagttcgagaccagcctggccaacatggtgaaacccccgtctcttctaaaaatacaaaaatttgtggggcgcgcttgtagtcccagctacttgggaggctgaggcaggaggaatcgcttgaactcgggaggcagagcttgcagtgagccgagatcgcgccactgcactccagcctgggcaacagagtagaactccgtctcaaaaaaaaaaaaaaaaaagaaagaaagaaaaaaaagtggactgtgaaaactgaaaggactagaaaaactacactacaaagatacagaaaccaagaaagcaccatagcgtttgccttcaactgcttcccaacttgttttcctcttccaatttgattgtggtttcctctccagaaggaactccacagtacttagcgttggccacatagtaggttctcaaatacttgttaataaataagtttgttcgagaagctgggcaatgatattctacagctggaagaagaaacataatgatctagtaattagctcattaaaaataaacgttcttctttcctcagaggagcatttcccaaggcctgccttgatagccatccaaaaaggccaagctcatccaatcttgccctagatttatgctaaaatgcagttacaatcgataggatgacagaaaacgacagcacttatttaaatataataggcacttatttaaataggagaagctgtgacttcatagcaagtgttggggttaggaaactgggtggataaacttgctgatgctgtagatcttagcctctacatgagatcatgtggaaaatctgaaagcattttaggttccttatgtttgcaatcaaataactgtacaccttttaatttaaaaagtaccatgaggcacacacacacactcgcaggaactttttggcgtaacaaaactagaattagatctaaagctaactgtaggactgagtctattctaaactgaaagcctggacatctggagtaccagggggagatgacgtgttacgggcttccataaaagcagctggctttgaatggaaggagccaagaggccagcacaggagcggattcgtcgctttcacggccatcgagccgaacctctcgcaagtccgtgagccgttaaggaggcccccagtcccgacccttcgccccaagcccctcggggtccccgggcctggtactccttgccacacgggaggggcgcggaagccggggcggaggaggagccaaccccgggctgggctgagacccgcagaggaagacgctctagggatttgtcccggactagcgagatggcaaggctgaggacgggaggctgattgagaggcgaaggtacaccctaatctcaatacaacctttggagctaagccagcaatggtagagggaagattctgcacgtcccttccaggcggcctccccgtcaccaccccccccaacccgccccgaccggagctgagagtaattcataca

SEQ ID NO: 36538 - DNA, 2300 bp, Homo sapien
ctaagacaatcatttaactttttaaaagtctccagtagagaccctggaagtctcagtgactatacttcagtaattacattataaaaagaccctggctgggctcggtggctgttgcctgtaatcccagcactttgggaggcagaggcggaggcaggcagatacttgaggtcaggagctcaaaaccaggctggccaacatggtgaaaccccatctctaatacaaagattagcttggcgtggtggtgtgtggctgtcccagctattcaggaggccgaggcaggagaattgcttgaacctgggaggcagaggttgcagtgagccaagatttcgccactgcactccagtctgggcaaaaagagtgaaaaaaaaaaaattagccaggcatggtggcacatgcctttaatcccagctactcaggaggctgaggcacaagacttgcttacacctgggaggcagaggttgcagtgagctcagattgtgccactgcactccagcctgggtaacagaatgcgaccctatttcaaaataaataaataaaagtaatgaaattaaattaaatcagacatggtggcgtgcacctgtagtcccagctactcaggaagccaaggcagaggatcacttgagcctgggaagtcaaggctgcagtgagccatgatcgcaccactgcactccagcctgacgacagtgagaccctgtctcaaaaaaacaagaaaataaataaataagtaaataaatgtaattgaactttttttaaagttcctcagttgcagtatatacaaatacaacatttccatcatcacagagagctattggatagcactgctgtagacacagaaaaactgacagcccactcattaagtctcttctcatattttacgcttaactgcctgtaatgaccaatgtgtattcttatcagttgttaataatagggaggattcctgcatattaggtggggcagaaaaaaaaaaaaccaaggccgggcatggtggctcacacctgtaatcccagcactttgggaggcaaggtgggtggatcgcttgaggtcaggagttcgagaacggcctggccaacatggcgaaaccccatctctactaaaaatacaaaaattagctgggtatggtggcccaggcctgtaattccagctattcaggaggctgaggcaggagaatcacttgaacctaggaggcagaggtggcagtgagcccagatcacgccactgcactccagcctgggtgacagagtgagactccagctcaaaaaaaagagagagagaatgaagacagagattttaaaaaatctttttaagaaacaaggtcttgctctgacaacccaggctggagtgcagtggtgccatcatagctcactgtaaccttgaacttctgggctcaagcaatcctcccacctcagcctcctgagcagccaggactacaggtgtgcaccaccatgcctggcgaattttgtttttaatatttcgtagagacagggtcttgctgtgttgcccaggctggcctcaaactcctggcctcaagtgattctcccgcctcagcctcctaacgtgctgggattacaggtgtgagctgccacacccaggcaagatggagtattattctaacctcatccaacagagtttattattcagtttatctcctttggttatatgtattttaaaccacattctgtgtcagctattgcttctctctagaaacatatttttaagttgttcttgtcttgttcttctctaacaccatggaattttagctgagttttggccacatgtagatttaataacattgcataatgagattttccttttatagtatattagttgtattacgcccatgttttccagcattttttttttctcatgaaatttgttagtcttccaggcaatatagtgtttctacagtaggtggcagcaatttcaaatttcagatttataccatattaaggtagagcaaatattaatgctgggtgttttttcccttttataactttttaactccaggaatgattggacctgcagtattcctggtagctgctggcttcattggctgtgattattctttggccgttgctttcctaactatatcaacaacactgggaggcttttgctcttctggatttagcatcaaccatctggatattgctccttcgtgagtactaatataaagatttgctgtgattgactttaaattatatttttaaaaatcctgataaaaggccagaggcggtgactcacacctgtaatcccagcactttgggaggccaaggcaggcagataacctgaggtcaggagtttga

SEQ ID NO: 36539 - DNA, 2300 bp, Homo sapien
gaggcatgattcaattacattttaagaagattattcttgcagctatgttgagattgacatgagaaatctgatgataggttcaagaacaggtactatctaaggttcccttttacctattgaataaatcccaaactccttgaactaggggcaagattctttacagtcttcactactttgttgcagctagccttatatctctggcagatagtgcctagcatggagtaggtactcagtaactgttcaactgtccaacctatttttccagctttatctgcttttcctttcctttacccaaatgaagttcccaagcctactctctgctttactacttccattcctttgcttgtcctgttatactacctctatatcttttttctaatcttgtttctatgggaccacattttagccttttttttttttttgagccagggtctcactccaggctggaaggcagtggcacaatcgcccctcactgcagcctcaacagctgaagcgatcgtcccacctcaacctcccaagtagctaagtagctggtactacaggcgtgcatcaccaccatacccagataatttttgtatttttagtacagataggagtttgccatattgcccaggctggtctcaaactcctaggctcaggtgatccacccacatcagcctcccaaagtgcagggattacaggaatgagccactgtgcccagcctgttacccatcctctgtaagcagtagacttgtctgtcctatccttgtttctctctccaaagtttataaaatagtcttatgtgttgttctaggagcacagcttgggacagtaatttctcttcctctttctggaataatttgctactatatgaattggacttatgtcttctacttttttggtaagtttaaaattttaactaaattataatgtaacaaattcaaaatgtaataatagtagcctaataatgttttaaaaatatatcttccaaatcactgaaccacagttctgaaacacttcctgataacctgtttttcaagttggtatgatttacttgacctatttgagttacgagctgatgttagttttggaatatttctcagtagaaatgactgttgatcctgtacttaaatagtacatttgctatcaaaaaatcactatcttaggtattttgaatttcttctcaagcaaagtaggatgttctcacttggtagttttaatgttttttttttttttttctttttacttagtcccaaggcattttattgctcaatttccttggcagcatgatacacatttttaataaattagattttcacatagacatgtcatgcaagaaatatatctgcaatcaaaatttaaaactcaactaacaaaaacagacacctttggaaatatgtagattgtggaaatgtatcttcaaaaagatttgtctggtagaccctgataggcaaagtcatgtggttaaaagttgttttcttctggctgggtgcagtggctcacacctgtaatcccagcactttgggaggccgaggcgggtggatcacgaggtcaggagttcaagaccagcctggccaacatggtggaaccccatctctactcaaaatacaaaaattagccaggcgtggtggcacgtgcctgtagtcccagctactcaggaggctgagacagtagagttgcttgaacccagcaggcggaggttgcagtgagccgagatcacgtcactgcactccagcctgtgagacagagcaagactctatctcaaaaaaaaaaaaaaaagttgttttcttcaaaatgtataagcaataatacagttatagcaattatcccattaaagaattgagagaaacttgaaattgaatccaaactgaagtcagttttacattgaatttatagttacataattttttcaagacatgtaaaaattgttgttggtgctttctaattttgtgtttttgttttgttttgtttgttatttggtacattctaattttatctaactattatttttctattttaaggtactattggaatattttggtttcttttgtggatctggttagttagtgacacaccacaaaaacacaagagaatttcccattatgaaaaggaatacattctttcatcattaagaaatcaggtatggactttgacacattttaaaaataatgtcagaaactttttttcttcagaattaagatatcagtttttaaaaatatatattcctattgtgcatgctctagacaaagtagaataggcaaatgaaatgaacatccaaagtattgtctggctgggtgcagtggctcacacttgtaatccca

SEQ ID NO: 36540 - DNA, 2300 bp, Homo sapien
cgatctcctgacctcaggtgatccgcccgcctcggcttcccaaagtgctgggattacaggcgtgagccactgtgcccggcatcctttttttttaatcatggtggtacattcactgatttccctttttactgtgagccctttacgcttgataactactgagcaactgtcacagatgctgcaactgtcataggttctgcaagtttgcttctagattcttaaatgcatttagtttacgatggctttaagtattaatcatggcttctgattcaaacccagcctttgaggatactcttcgaggtaagaaatttatcaagagaaatttcatgccctacccttggcagtaaattttttttgctatgctacatttaacaatgagatggctactaactcataatcagtaatatatcatgtcattgtaagtactcaagtacttattgaccatgtttcagatagtttttcagaaatagtaatgccattaaacctccttacctgcttttctcatgccgtatatctttgccagctgacaaggagtaggggttcagtttgaatctggaatagatctttttctcagcaaaggtgataaaactactacctccatgttttaatgaacttttttatagttcaggctctcatgtgtgaaatttttaccaaaactacagatatgagaaacagctaatctttgacaaatgtttcttagatttgcttaatctaagaatattctttaacattttttcataattatttttgtacttttaaaaagcaacctttttcattatttagacaatatcatgtaattaacttttttaattaaagcagccgggtatggtggccaatgcctataatcacagcactttgggaggctgaggtgggtggatggcttgagcccaggagttcaagaccagcctaagcaacatggcaaaaccctgtctctaaaaataaaaatttaaaaataaataaaaattttccccaatctttatttcagctccagtgtgctgctctgctcgttacaacttagcaattttggccttttttggtttcttcattgtgtatgcattacgtgtgaatctgagtgttgcgttagtggatatggtagattcaaatacaactttagaagataatagaacttccaaggcgtgtccagagcattctgctcccataaaagttcatcataatcaaacggtaggtgctattttttaaggaaacaattttaattatcctaaaatacttgcaagtaaaaatattaaaaggtcttttttcatcctacagaaactatactttgtttgtgtatactctgaatcactttctttttgtgttttcccaggaactgattgggcaataacttgtaactatagctactactgctatgccgtaatacaccttcatctgtttgaaaagtagttcttccattccctctataaacataccatgcttaaagaaaatttggaaaaacctgttttatataacagaaaattaaactgttttaaattttctaaatagcttttataggagtattatttataaccctatatcacttatagagttacagctgcaagagagtttaggtaatctcagttgcaagatgaaaaacaagaactggccagtttcttaggacattcttttctgaatgtacacatgcccaacctaagccacataagtcattttgcctgccttatgttatagtggtattaataaatgtgtattcatcatttgtttataattaagttatatatacttcattttatgttgcttatcacacgaggagatagtacagaaagaaaagctagtattctttttagaagtacatttgcaggctgggtgcagtgactcatgcctgtaatcccagcactttaggaggctgaggcaggtggatcacctgaggtgagtagttcgagaccagcctggccaacacggtgaaaccctgtctttactaaaaatacaaaaattagctgggcgtggtagcacacacctataatcccagctactcaggaggctgaggcaggagaattgcttgaacctgggaggtggagtttgcagtgagccgagatcacgccattccactccagcctgggcaacaagagcaagacttcgtctcaaaaaaataaataaataaaaaataataaatttttggccgggcgcggtggctcacacctgtaatcccagcactttgggaggccgaggcacatggatcacgaggtcaggagatcaagaccatcctggctaacatggtgaaaccccatctctactgaaaatacaaaaaattagacgggcgaggtggtgggcgcctgtggtcccagctactc

SEQ ID NO: 36541 - DNA, 2300 bp, Homo sapien
acaaaaaattagccgggcgtggtggcatgcacctatagtcccagctactcgggacgttgaggcaggagaatcgcttgaacctgggaggtggaggctgcagtgagccgagatcgtgccactgcactctagcctggacgacagagcgtgacctcgtctcaaaaaaaaattcgacaacccaaattaagacactttctacaaaacctaccagtactctacaaaactgtcaaggtcagcaaaagcaatgaaagtcaggaactgtcgatctagaggagcctaaggagacatgtaatgtggcatcctggatgagatcctgggaccgaaaaaggatattaggtaaaaattaaagaaacgcaaattaagtatgaacttcagttaataattatctatactggctcgttagttatgatatatgcatgatactaatgtaagatcttaataataggtcaaactaagcaaagggtatggagaactcactgtactatctttgcaacgtttatgtaaacctaaaatttctaaaataaaaaatattaaaaaaaagaattcctctggtttgaagtctttcaagtctgttgcaactatattccctggcccaagttatctataaccttggtcatctgggagcttgttagcaatacagaatctcaggcacatcccagatgtactgggcttctcagagaaacagccccaattgggtagtttgggtaataaagttttggctttcacaatataggctggccaactcgacccaaaacagatgatggtgcacatgcctggagacccaggaggacctgtggtgcagatgaagtctgaggacactctgctggagaagtctcccttgcttgggcaagagaagtgggggagtcggattttttattctagataggccttcaactgattgaaggaagcccacccagattatggaaggcagccatctttacccagagttcaatgattttagtgttaacctcatccaaagacaaccagcaagttaacacataaaattaaccatcacaccagatctgctgaatctgaatctacattttaaaaggatttgccaggtgactctgcataatccagtttgaaaattgcatttttctacaacccttagagagtgtaaaaatctacatggtaattcagtaactcagaaacaaggcttgatttgctgctttaacttgagaacttttctagcatttactgatctggaggtagggatgcctacagaaatcctcgccctcccttctaggtaaaggaccctcccctttgttctcacgtgaacctcactaagcttctaacctggtttactgaattagtggcttgtgggtcttccctgtctacaccaaactctccgagagcatctacatcttattttctacctccacagagacagcctttattggcggatccagatctgccctgccaaggcaagctgggttttcctagtttcactttcagagtccgcaaatgctagcacaatctatccaaattctatcgtggagataaagcatgcacacatacatcagaggattccataggtcgaaccatatgaaactacctatgttgattacttttacctataaaaccagcaacatcataggactcaacaaatttccattgctgtttttccgcctaaaagctattttaggaccaggagcagtggctcacgcctgtaatcccagcactttgggaggccgaggaggattgcttgagcccaggagttcgaaaccagcttgggcaatataataagaccaagcctctacaaaaataaaaagtagaaacaaaattagccagatgtggtggcatgctcctgtagtcccagctacttgggggagctgaagagaatcgcttgagtccaggagttggaggttgcagtgagctgcgattgcgccactgcattccagcttgggcaacagagcaagaccctgcctgggagaaaaaaaaaaaaaaaaaaaagctattttagggacaatatgccgccacagtcacgaggtaaatatgccgccacagtcacgaggtagatcgtacaaaggttgctaacagtatggcaactgaccgctaacaagcgaatgtcaagttgtgaaatgcacaccacccacttccctagttcggtcgaagccctccccttaattatgtgcaattcaagtccccactgcccgcccgcaagcccccactcatcctcgctgcgggcagggtggcccctgcactttacaagggggtgcaggagcgggagacggtcgtccgaacaccggctccccggcatgcgtagaccggcgggcggagcgggctcactttgcgccaatcct

SEQ ID NO: 36542 - DNA, 2300 bp, Homo sapien
gtctcctgagtagctcggattacaggcatgtgccaccatccacacttggctaattttgtatttttagtagagatggggtttcacaatgttggtcaggttggtctcgaactcgtgaccttaggtgatccacccgcctcggtctcccaaattactgggattacaggtgtgaaccaccacgcctggcctcattttcagtttttcttaataaaaaatcccacttctgagatgaacatttttcattaatccttttaacacatttttattgaatagctactctgtgccaggcatgtaatagcctcatctctatgcaaatccatatgcctaaatttttgcatgactacgcctttcgacaagtgtgtattgtgggaaggagggcataaacaggaaggtggcatcactttaaaatccacacagatttatacaatgtggttctaagactttctgtaagtcttctcgggaggcaacattatcatctaatcttttgcagtccctcttatgtttgcctacctctagaatgaacctgaatttattaatccacctttatgaagtgaaagattgagaagaattttctgtgttcttaattgcctttgctcatcaaattgcccccaaattgcccccacttgtagagtctccatggcctactgtctgctaaagtaaagcagaatcccagtcctcgttccagacctgccaagtcagagtctgttttcatgtgattctcacacacattggcatgtgagaagcactgagttagaccttggtgcttggcccacccttgaccatggtcctcctctctgaacaacggaggtgaggagaccagtagtaacagctgtgtcaggaacaggtcagcacccagggatccacacagacacttttgaccattcctaagtcctgcctgcacaggaagttggccactaaagataggctgcctgaaggaaaggacataaggacctttgcaagctgttcagcagggagaaaaagggtggaacaggaaagggaggaaagcaagtttctggattccccaaaccacagtttgtctaggtgctactttctcacttttccttatttagcacatagctttgtcatgagacatctttttgctgacctcttttccgtttgcattttgccccatattagaatgctaccatctaaaaccgctccatgaattagaaagtttaagttgtcagggactgaatgtgtctgttttccaacagtttctggcagttccctgcttttatggtgtagtcatggtgaaacctgagtcatctgaagatggtggcagtgccagagagcaggagagaggagctgcaaagaagccagacagcgttgggcatcaataactcctgggcaccaccggccactggccttcattctgacaggagagccaacccaaccctaactgtgttcagagattgctccaagctttacagttctaccaaattctttctgtagcaaaaatataaaggcatcttcttaggtaattttttttcagggttccaagtagcaacacctaacgtctgcagtgcgagttctcttcttctttttttttttaaggtgataaatcataacattttcctggaaaggaaagcagtagacctcattttttgttttaaggaaaaatagtttttctgtttccattcatatacattaaataactacccaggaaatacgccccggttttgcgcgcgtgtgcgtgcgtgtgtgtgtgcgtgtgtgtgtgtgccgtttctctaaaattctgactcatagtctggaggacaatgattgacttttttccacttcacatagttgctatgaatttctcctcacaaggatgggcctgtttactcaccctgggcatcgttggtagagcgctagtgtaaacagcctgaggaacccggtgggccggggaagtgggcgcgctctgttctccgcggccagctgggacgccgggccaggtggggccgcctgcgtttagcaactgctttctcaccccctggatttgcgatgtttgccacagcagcgagaagcgccattgtaatggggatgggaggggtggagcctccaagtcctgtctcaatttagatctctcactctgctgttaggcgcgcccatttcagattactaaactcgaattaagagggaaaaaaaatcagggaggaggtggcaagccacaccccacggtgcccgcgaacttccccggcagcggactgtagcccaggcagacgccgtcgagatgcagggcccaccgctcctgaccgccgcccacctcctctgcgtgtgcaccgccgcgctggccgtggctcccgggtaggaacgtgggc

SEQ ID NO: 36543 - DNA, 2300 bp, Homo sapien
[414 bp omitted]agtgagaattaaaagtatattaggtaagatactgcaaatttggggtttctctgctatactacctaacacatgaccttattaacatattccagttattactgcagaagggtaagactttatgctgtttatcttacctttttcaaagactccttctgcttccaggacagagacagtgaggtttgatgctgtcttgagcagctccgccttcacagtcacctgtgaagggcagtgttccagaagctccaccccaatagtcacatttcctccgggcctgatgatccctggggctgtcaccagaaaccgaggcctaaagagttcccaacaagggaaaaacaaagtttcttatcctcacatctcctttcttttgtgaccctcagatttcctagtgcgataggcactccatactgcgccaattgcagttgtttccgttaacattgcccactgctctatttggcaactgaattgaaatgctactgaaacaacaataattcccataaatcaattttaatgcagtaattcatgcatcactactagaggaaggcctgtgttattatttccattttataaaccacgaaccgcacagaaggaaccatgatgtaaatggcttgcaccggggcataatggagttattggcaaagcaaaagtctctaagcttctcctttacagaggaccttatcccagcgtgattattttcttgttgttgttgttattttttaactaagattttgcctgtttcttattcaaacctttatccttgagtagctgcccaacgagggtaaaaaattatttaaccaataccattgattgaaatataccatttgaaaataaactacaactggtgaaaattccaggtatagcgaatcataaaagaagtcactaaagcagcactttctctgctataactaggggttagggctcaactacagaaatctttaggaatgaatggggcttgccattattgggtgctgttgttttcttcctataatgtctgcccctgaacccatacatcagtcccctccgccacactttggcaatgctaaggttgagacatcttggttagaaaaaatatatcatgtctttgagagaagaatcgcaatctgggagcaaaaagttgagaagcaaaaggcagaggcaatgtggactaaaaataaaatgactctcttcagaaagttgttatggccggggagacgcttaaacaacttcatgagtggagaaagttaactgtcccatggagagccacgctgaagctacatatggtcaaacctccaggccagtaccaggctggggactgcagccgcgagggcatttcccacccgctgctgcacagcagccgccacctccccgaagccctggcccagagccgcagagcggcccaggcccgcgcgcccgcgcgccccccgcgcgcccacgttcctacccgggagccacggccagcgcggcggtgcacacgcagaggaggtgggcggcggtcaggagcggtgggccctgcatctcgacggcgtctgcctgggctacagtccgctgccggggaagttcgcgggcaccgtggggtgtggcttgccacctcctccctgattttttttccctcttaattcgagtttagtaatctgaaatgggcgcgcctaacagcagagtgagagatctaaattgagacaggacttggaggctccacccctcccatccccattacaatggcgcttctcgctgctgtggcaaacatcgcaaatccagggggtgagaaagcagttgctaaacgcaggcggccccacctggcccggcgtcccagctggccgcggagaacagagcgcgcccacttccccggcccaccgggttcctcaggctgtttacactagcgctctaccaacgatgcccagggtgagtaaaca

SEQ ID NO: 36544 - DNA, 2300 bp, Homo sapien
acggactttgaggaagcagagtatatgaatagcatactttcaagtaatttcttagctataagagaaaggaattagtttcagttccatttgcaactatatatctttctcttatttttatgtgataatcatcacatttataaagaaacaacataattagaaatggaatatgtctaagcaagagaaagttagtgaatgtttattaatgttcagtaatgactatggaataaataaatgagctgtaggagcggcaagagatttaggtttagaaatcatccacacagaagtgcaagttgaagccatggggctctgaggtacagagtatagagtgagaagtacaaggtctaagactgagtcttgaacatgctgctccctctcccccatgctttagtgtgtaggtggagaaagtaacctacatacagtggtttgagaggcatgtcagaaaaaaattgcactggacaagttaaacaggtaaggaaggctttattcaagactattgcaatggaagagagagatgataaactcaactctgctgaaacaaaaggcagaagagtttttaagcactggggtgaactcatatgaaagtgctggaggacattgttgggaggttggtcaatgtgattaggtagtctgtgtttgctaattagtacttactgaagttaggtttccaccctcccacagagaatgagatcaattgggactctgtctttcttgatgattatacttcaaagggatggctctgaggaccttgagaaagacatgcctgggttgtaaaactggccagaggctgggaaaagatttacatctcagagagttggagaaagaatttataattgcatgttttctaaaataaatgctctaagaaaagggagctcaggggcttatagttaggaagaagcctgtctttgtaaagtcgagtcaacttgaggggaatgttaaggccctctttgtcaggcattataatcattggcacagcagaatgttgagatagagctagatgaaatgaaaattcccagcaggggccaggcactgtggctcacgcctgtaatcccagcactttgggaggccgaggcaggcggatcacctgtggtcaggagttggagaccagcctggccaacatggtgaaaccctgtctctactaaaaaagttacaaaaattagccgggcatggtggtgggcgcctgtaatcccagctacttgggaggctgaggcaggagaatcacttgaacccaggaggcaaaggttgcagtgagccgagattgtgccattgtactctagcctgggcaacaagagggaaactccatctcaaaaacaaaaaaagaaaatgcccagtaggcaggggcctcatgacaaggccatttggttcagcggtgatgcgatgactgatgctctttataaagtattagtaggtccaggaccatgctttcctgagggtaatggtgaggaagtttagaaggccatggagacagagcatgagggcctggactagtgtttgctctaaccacccactcccttggaaaggccacccctcaccctcagtccaggtggttctatgagtccccgaggagctctccttgccttcacttctgagctcacgtcaccaacatgtaggcatctgcagtttctttcctctttcgtgtttctcctttgtatactggccttccccaggtatgctagacactgctgtcttctactcagcactggctgggatctgaggggtgggagatggagaaagggaagaaaaaagatacagaattaaagaataattcagatttataccactgtgagaagttctatgacttgcaaacactctgggcgtagtttttttattcctttccctagagaagggttatgcatggttttagaattatccctgagccaaggcaaatgtagaatctttgctatattttgggccagtggtctgctattggcaagaatatgctttaaaaaagtgaaataagttaatcctcctttctctcttttttagataaagctatattggagtaaagtgaaagctgaaccatctgagaaagtctctcttaggatctctgtgacacagcctgactccatagttgggattgtagctgttgacaaaagtgtgaatctgatgaatgcctctaatgatattacaatggaaaatgtgagtttagctattttttcattatgaaaatatgtattacaagagaaagaggaaactttattgtactactttaaatatttaaagaaaatttcattagttcctttgcatgtgtaagtcaataattagtaaagcttccaaataaaaagtaatctgtatcgtaatgg

SEQ ID NO: 36545 - DNA, 2300 bp, Homo sapien
atgatcccatgacccagtaggcagtacctcagccctccacctccttgctctcttccctctccagcagtccccggtgtccattgctttcatcttttttccatgtgtacaccatgtttagttctcacttataagtgagaacatgtggtatttggtgttttcttccagtcttaatttgcttaggatgatagcctccagctgcatccatgttgctgtaaaggatatgattttgttcttttttacggctgcatagtattccatggtgatgtaccacatgttctttatccaagccactgttgatgggtacctaggttggtacctaggtatgatagattgattccatgtctttgctattgtgaatggtggtgtgatgaacataagtacatgtgtgtttatggtagaatgatttattttcctttgggtctatacccagtaatgggattgctagattaaatggtagttctgttttaagttcttagagaaatctccaaactgctttccacagttacaagactaatttatattcccaccacagttctgacagtgaactagaacagcagctaccttttctccttggcactgtgaggaaagacatttttaactaaagattttgaatatttgtattcaatcttgctcagagggaagcttatataaatctttaaaagcagaagccctgttttagttcaaatctgaaaaaaggaaagttaacttcccctctctctacccatcccccacatcctcctcttctaggttcttggtctttggtccttgacagaagaaatcagaatacagtttaaaaagcataattttaaaccactaaacaattcacacaagcaccctcaaaatttgaagtgggttatattccaaaaaaaaaaaccctgtaaattaattgttcaaagcccagaatttattacctcttaagatgtttctggttggagagtaaattggtatagcattttgagggaagaacttgataatggaaatcaaaattatttttctactctaataagagtcagtaattccactcttggaatttatctcttaaaaataaatagagaaatgtccaaaatgtatgtgtaagtatgttgatcacagtggtgaatgagatagtgaaatactgagaacaatctaaatgccagatggtaaggccatattaatacaaattatgatgcattagttcagtggaacactaagcagctttaaaaaattgttatatagttataccttctttgtgcttggcatggaaatgcgtccataatataataagtaataagctaaattgaaggccgtgtatatgctttataatactattttggatttcacatatgtgtgtgtgtgtatgtgtatgtgtgtgtgtgtgtgtattaatataaactctggatgaatgtttaccaaaatattcagtgataatttatacatggtagaattagaaataatttccaaattattttgccatctttgtgcatttcttattttaaaataatagatgtgatacttacatagtcagaaaaagcaatggtgttaatggtgttatttttggcatttttattaataaaagattgttatattgctataagttttcatattagcctgttatttcacatagagaataaagaaagtgttaccagtagacttatttgtccacagaaagtacacttcttcccttttgcattctgaaatgaaatcttgaatcttttgagctttcaattctgtgcccactctaaggctataggtgggttgaggctgagagggactgtaggccgctcttggtgacagctgctatggtggaagggggcacttggcaggggtccagggagcaggaaacctccagtgatggggatgaggtcattcaaaagtcacatgttcttgagacacaggctgcgcgtactaaacatcaccataaagtgatatcagccctaaattaaagtagcagttattcattttttatctgaatccctaagtcttgttccatgaaaccagggaagggctatttgaaagcatactttctagtacagctctcactggcttgaaagatgaaactctccttagtcattccaaagcattactgcagtccagatgtatagttcatatcttccagcaaacgtctgtgggaattatttcctcccattggtattagattatatttttccaagtcaactcttcctggctgcccttcaaggttctaaagattttctactgttgtagtgtaactagtaagaggcaaaaccatgagaatcagaggtaagtgcttatcaaaggaatagaaccaagaggacaaattctacttaaacaatgccatcctt

SEQ ID NO: 36546 - DNA, 2300 bp, Homo sapien
gggacttctctgttctcgggctcggtctttgaggctgccaccagtccacgcgcggtctgcaagcctggttggactgggctccctgctctttgtgtgttgggtggggaggcgagtgaagggttagcttgggtgcagacgccagctgtcgacaaattcggggctcagtgataccagggcaatgtggttgcaagcctgattgggcgcaacgttgagaaggtcgggtgtttcatccctgggacgcgctcactcactaggggtttgtcagacactctggttgtgaggatttgaagggggaaaatcttgtgtactgtgtaggctctttgtgcgagctgcccagctggacttcgagtgggctgtgtggttggggaatgtgcagaggcggcgattcctatttgtcttcattgtctccctcttgtcttctctcttgctttcgccggcttctgctggaggcagcctgtgtgtggggagatgtgcagaaaggggagcgccctacaagttcttgtcagtcgaaaggcaagtttggaggctatcacgcctagtggagagggaaggccaaatttgcagacgtcagagccaatggggaagagagatttacattgggaacatgccctccgattctactatggcgggcggttagttccagagaagcagctcctctgttcccttgcgccccaccccggtcctttgttgttcaacgctcccccagcgttacaggagtaacctttgggcttcaagaggccaaaacggtgcagggcctatactgaggtcagacgttataatcagaatctctccagtagcatttttctgatttcttggtgtgagcgctcgaagcttcctcccgtgcgccttgtacaatctggcaaccctgagtaccagactccctgcccaggaacaaggggtaggatgccaggatggagggggctgtaagaagaggcgacgttgttggtagaatatcagccccctatttggcttctccagtactgtgtgtggaggggtgctttggggtttcaaacttactcctcttcgcccctttggctccgcgaggttttaagggcagagctttcagtccgaagcctccgctcggggccaggttttgctctggtccgggtgagaagtttctgcagtggatgcaacttgttactgagcggcttcctattctgagaactcctgggtttcataggtttcctctccctctcttttggctcaacttaagcctcccagttccgtcctgaagcaccaggggagtgagaaaggactgggaaagccatcccatcactgagccccgcgcgggcggctgtccgggtttccaatcgcgcttggagattgaaaaagacagaaggcgcgccgcgtgtacagacagttagttaatggaaatcctgtaaatcggttttaagtgcacccaggacagagggggaggaagatggaggtggtgatatcagatgaaggatggagatccgcaggagcgggggtgaatgggttacgcatccttgcatttccgaaaatgggagtcggtcccctccccattgttcttaatgtagaaaaattcattaaagaaatctcagggatagggaaacccgagcttcattaaagaaatcccagtccgccccaagtggcggagtacgcggcttcccttggcagggaacccggctgcggctgtccccctctacgctccctcccttctccccgccccccagcggggcactgctactacggcgatcgccacctcacgccgaaggaatgctcgaagtatgcacacgttcccaaaagtagacctccttcaccgccggaggagcatacatcaccccgtggcagccgtccaccttctcaggcgtttcgtaaccgagtaaactgagagctgggaacagccctctattaagtagcccgcggcgcggagtctctttccacttggctaaggcgaaccgccccagacgcgtccgcgcgccggcagctgcaggctcaggccatctccagtcttcctgccgcgcccgcctctcctcctgggattctcctcctcctcctggacttccccgcagctgcccacgcctcggcggccgccaggtgctcctggagtgcagcgcctatcgccggggcgtgtgggggccacaccgagcaccagcttctccgacgccgggaagccgctgtcgccgccgctacctctccctgttgccgccgcctcaggtcagcctggtttctgtcccctttcccctacccccatcattcccagagacaactcgggaaacggcgtctagcttgcaccttgcccggagcggtgaagaatcctgggcgaggacagtttggac

SEQ ID NO: 36547 - DNA, 2300 bp, Homo sapien
actatcatattctttcttacatgtatggtttacctccaaattaaaaagtaaaagtatatggtgagggacggattaactatgttaaatgctgctaatagatggagaaggtgaaaattgagattgacagtttatttagcaacctggaagctattggtgattctaaacaagagcagtaaaagcctgcccaaaatgggatcaaaaaaagattaggaggaggagaaggagagacaagtataaagaaatctataggatggtaacggtaatcaaaggagtttgttcgtttgtttttaatttgggaatgtgttaatagatggaatgatccagtaaagggggaaattgtactgaataacatgcatacaagaatctatgtctactttaggatctatttaatgtgaattcatggctttttttttttttttgatatgaagtctcactctgtcgcccaggctggagtgcagtggagcgatcttggctcactgcaagctccaccttctgggttcacgccattctcctgcctcaacctcctgagtagctgggactacaggcgcccgccaccacgcccgccttattttttgtatttttagtagagacagggtttcacggctttagccaagatggtctggatctcctgacctcatgatccgcccgcctcggcctcccaaagtactgggattacaggcgtgagccactgcgcctggcctcatggctctttttggacagggtcataagcttcttagatctgtcacccaatgtaattaattgatgtattggttaatactgtctttagcagtgctaggggattggtaagaaatccacatcatctctgcgcttgggaaatttacaatctagagttggctaagtggagaaaacataagagagcacatacaactaacaaattcagattatggacaatgtacttaaaaaacccccacgccctagctattggcacgtggtaattttgcccagagttttggttatatgcataatccagaggggtgtagaaaaccaggtcctttcagtaccaatctaaggaagacatgaattggggtgtttataaaccttggtgaggaagagaattttaactgggactggtaacttggtgggcccattgacatacagtagattgtgaagaagaaaaccccaaggattataaggaatagttttaatattactaatttttatcctttgctgaaactatgggtttcttatttgaaatggcaatcaaataatttgtaagagtttgtagaaagtggaaagattattgtaatacagggtagatatttgcatttgtacatacttgagggtaagtacaagaaataaacacttgtaatggggattacttaagcaaaatggatgacaccgacagcctttctgtacaacaaataattgctgtgcttctctactccagtaatgaatgtagtgccctgctggatctgggacagcaagacttttgagtccagattcgccatcccatttcttgttccctaacgtttcctcagaagcgagcgagcctcttccacaatttggggacactgtggaagaacttcttgcttggggagttctgcagcagtcgaaggtacaagaatataaaaactggtatctcgacacagctcttacagcatattctcaacacaaggaacagtaatgtgccgcagcaattccttcggtggaaaaaactgactgtatccgcgtaagaggagtaattcttttttgaattttatgaggcttcagagctgtatttcggccaacccagtctttgttcagtttctagcggcttcaaggttgcccagttttacgccttctcgctcaaaacagacactagttttctttgatagcctggtctcacattgacttcatctaagcttattacattcgtctcataaatcgtttgctttttccccagccttagctccagggaccagcctactgaacatcgaaaaggtcaggaacgagatcacgggactgagacggcgagccggctagagcggatagagccgtactgccgctctagtttttcttttgctctctatggttaggagcgcaagcctctcttcggcccggaaagatttaagttcgtgaatgcatacgcaagactcggaggtagttccggttccggcgtggccattttcgttggtggtgttcagttgtggcggttgctggtcagtaacagccaagatgctgcggaatctgctggtgaggagcttctcatcttgcattcatgatgggggcgagggagtggagaggaggctgaggcaccacgacagaaaaccctcacctgggaggggtgccgaaggcggcta

SEQ ID NO: 36548 - DNA, 2300 bp, Homo sapien
ctcgatctgtcacccaggctggagtgcagtggcacgatcttggcttactgcaagctccgcctcccaggttcatgccgttctcctgcctcagcctcctgagtagctgggactacaggcgcccgccaccaggcctggctaattttttgtatttttagtagagacggggtttcaccgtggtctcgatctcctgacctcatgatccgctcgccttggcctcccaaagtgctgggattacaggtgtgagccaccgcgcccggcctgagaactgacttttgatttagtgacatgaaaagcagtggtaaaccttacagagagtggcatcaccatccatagggtttttcatgccagaaaccctggaaatcaacctaagtgtatttgccctcatcccatctctaggcactaagttctgtagattctaccttctctttcttttgtgaatctgtcttttgtattcctgctgccactttattagtttaagttctcaacatttttcacctggattattgtggtggcattctgtctggcattctctttaatctctctgcacattggtgccacagtgattctttttgagaggctagttttaatgtttccttcttttatttaaaatttctcttatggctgtttctgtctagcattcaggatactgttcaaacccctttacatagagtgtaattttcttcatgataggctactttctgcttttctagccacatctcctaccactcccctaccttatgctctagtcatggcaaactactatagtttctggaatgtgacatgctaatagtttacctgaaatgaccttccttttcttattctatcacattttcacatgcagttcctattaacatggaaagtcttccttgattctcctttttccacctggtatatatgcttctctcagtttccagaagtactagcttacagcctgccttaaaattatattatcctgtaattattcataaatgtgactttctatcccacttgtctgtaaattcttttgtagcatgaacaatgtatttttccattttgtattctcatcctgtagacagtgcctagcacctaatagggactcaggtttgaatgagtgaatgaaactcagtcagtaccatcaagacatcttaacacagtttgttgagagttttttggtcatctgaatggtattatgggtctgaaggagttcttgaaattacccaaggaaaatattatatactataaatcaaacttgtataactgtgatatccatccatatctaaaggcaaaacaaatttgcctattgaagagtaatctagagagtgctgaaaatttaacaaacaggttatttggcaaatgctgcagcaaagagagacaaatatcaaaactatatcatgttccaagcccccagtcagggatgtagtctctctttgtactctctccctgtagataacatctactcggcagctttcatggagaaatttgctgactactagactagcttgtattgccataccacctatactttttttttttttttaataaaaatatccattctattttaatgttgttttctgtgttagatactgaactccaggaggtcaggtgctaggctgaatcctcattgctgggaccatagaggcattcataaatgttaggtgaatgaatgattacgtcatgatgggcagtcagaaagaaatgaaagtcctatttcctatctgtttatatgcaaatatttgattatgttgttctcctcaaaactcttcagttccttatttcctgccggacattttaacactcggttacttagcttgctgaggctttattgtcagcagcagtaaccagctctggctagcttagacaggaaagaaagtattaaaggaggattgggtaactctcacacaaaatggatgggacgtacagagagtcaggtttggagacaagtgggaagtaagggagttttgaaagtataaacagtctgatccagatgccacagctgctgttgaatttctcttgctagactactactgtgactgctcatttaatcacatccactctttgtttcccaggattcactggtctatgtgggagtgtctgattgctgagtctagctcttgtacctttacactggctaccatgggtttatggagaggaagaacccatctctccctttggtttctgaagtgggaggtggagccctgcatccttccaaaactcacaatggacagttccacaaaacttggaaacaattccagcaattgccagggtaattgtatttttaaaatgagatgatgtgtgttagataatcagtgccatgaagaaaa

SEQ ID NO: 36549 - DNA, 2300 bp, Homo sapien
ttcaattctgtaaatgtttcagtcaaaatcgaatttctaataaaaaaagagacaagggattaactcattttcctatgaacaaacaaaaataaagaaaaaggaagcagataaatacatcacaatcactcagatcactagaacaaaaacaaaaaattgaaggtaaaatgaccatatatacagagtgctggaatagcagatcagttaaataattatcaaatttagtgggcatgatgatataggcagaaatggggaggaaaaacctgccttatatgtactttcgcaatatgcccatattgtggcatacatttttactaacagaacttagcaaaataaaaggactcaaagccttctccattaactgtgatagattgttttccatttgagcctggggttgaaggtaaacttaacagatcaaaacaaaatatagacctaagtatgtcagtagtgctaagaatttgagcatgaatgtcatgtaagagcaaacccaagcaagtcggttattagaaggcagcaagtattatatcactctaaactctgcctagtaaacatgtgattggctcacatttttgaaacttgtggtcattttgaaaaaaaacatttaactgtaaaatttttttttttttttttgagatggagtttcgttcttgttgcccaggctggagtgcaatggcggatcttggctcactgcaacctccgcctcccgggttcaagtgattctcctgcctcagcctcccgagtagctgggattacaggcgcggccaccacgcccagctaattttgtagttttggtaaagacgggatttcatcatgttggccaggctggtctcgaactcctgacctcaggtgatccacccgcctcggcctcccaaagtgttgggattacaggcgtgagccacagagcccagcttaacggtaaattatgaggaccaagcactctttattttctctttcctcagtttaccttctttaaggcattactgcagactaagcctaaaaaaaagtaatttgttttcaaatgatatgatttactctctggcctggatttcaaagatgtcagtataatatggattgtatatattgtttaaattttacaaataacataacgcctattatagaaattttggaaaatacagaaaagtgcaaagaaacagaaaaaaaaatccttcatccggtcagcagagttaccattttcactttttagttgcgctctatattgtacttctatagtcgctacactactctaatatcctgacttagtcaacttttatatcacgagtattttcttgggtcattaaatagctggcacttttaaagtgtttacggagtatctcattttgtagtaatgctatatgtcctggtttttataacagtaagagaaaaagctacagcctattacaaaacacttcctatatcaatgcgcaaaagagaaaggtggacacagaaaaggggaaatgtaacgtgagaattagcaatagagaaagaataagtgagaatcgcttaattagaggcaagataatagggctaagtcacattattgattcttgactttaggacaaaaggggtacatgtcacgcacctctgttccaagtttgtatttgcaccttgaatggcgatttattagataaagtcgcggttttacaacctaagcaaatactgctaatcctcccccgactcaatccaccttgaggccgccttttaaatgctccgactcccttcagagaaagcctcgaggtaaaaagaaaaacctgtctggcaatccagacctgccgtcgccacgataaccagagtagcaggcaggtgtgtgcttactaaagccacggccaacagagcgaagatgcgcctacaccgcacgcgaagtgtcaccgtagctctaggaccacgcatgcgcgaacgcagattcgcgatccaatggctgagcccgtcacaggacagatgatcagggtgcgtccgccttttcgttcccgcttctatcctcctcccctttcccctccccatgtccctccttcttctccctcctccctctctccctccctctggcgtctccagccgactttcgcttcccgtcagcagcctttggcggaagagtgtcccgcctcttccgctctacagcggaggtggctgtggcggtggcgctggtggctgcggcggcggcggcggcagcggcgctcgagcggttcctgtcagggtcagccggcgggccccctgggtggtccacctgcaaatcgcggagcggcgccccagggatcgatggcgatgaactataacgcgaaggatgaagtggacggtgggcccccgtgtgc

SEQ ID NO: 36550 - DNA, 2300 bp, Homo sapien
tgcattcttacactaacatggcaaatatgattataattttgttttatgggtaaataaaaaaactattaaaattagtacaagttaactgaccaacccaagaatggtaaatagctacttcagcatatttatattcctactttttacagatattcataaatgccatagagaaaatgtatttcacacaagtgaaacaataattcctgtggctgccacatttttgtattgatatacagattttcttgctatctagttcttgattaaaaaagtattgtttaaataaaaaaatcctgtgccagttctggtgtgaactaaaatcaatttatgtaaatcagtgtttgtatcagaaagccagtcatactttgtcccttccaggtgacagttacgtagtttacgtcaagggtttaaaataagaaaacccaaagctgcttcttttctgaacctttaccatcatttaaagtaaatttatctcctcaaatcatatgatgcagaggtggagagcaataattttgaaggcttcctggctaagtttgaaacccagccctgccacttactgactctgggatctgtagcaggctacataattcccctgtatctcatgttttttcatggtgatgatagtagcaatacatatctcatagggttactctgagaataaagtaaatgctaacaccaaggatacagaagacattatgtaaatagtcattattattgcacaacctaagttttacttaatggctactgtattaaagtataatacatatgcagaaagatactcggaagtgttcagcttactgaaatttcataaggtaagctaaacaatcctgtatagcaagcatgcaaattacaaaagagaaactagttacactcaaagccctcctcatgcccccttctagccactacccctaagggtaactaatattttgacttcccattcatttcattaatggctattctttaaacattgaaattatagcaattgataagggatttattgtagtggctttttgttttttatttaatatcaatgcttaaatctgtttgctgattactcttttaacatataggtatattttattttctaggttaaaaaagctccttgaacaagaaaaggcttatcaagcccgcaaagaaaaggaaaatgctaaacgactcaataaactaagagatgagcttgttaaactcaaatcctttgcactcatgctggtggatgaaagacaaatgcacattgaacaacttggcctgcaaagccagaaagtacaggatcttactcagaagctgagggaagaagaagagaagctcaaagccattacttccaaatccaaagaagacagacagaaattgctcaagttagaagtggactttgaacacaaggcttcgaggttttctcaagagcatgaagagatgaacgctaaactggctaatcaagagtctcacaataggcaacttagactcaagctggttggcttaacccaaagaatcgaggagctagaagagaccaacaaaaatctgcagaaggcagaggaagaacttcaagaattaagagataaaattgccaaaggagaatgtggaaactctagcctcatggcagaagtggaaaatcttcgaaagcgtgtgcttgaaatggaaggtaaagatgaggagatcactaaaactgaatcccagtgtagggaattgaggaagaagctgcaagaggaagaacaccatagtaaggagctcagacttgaagttgagaagctacagaagagaatgtctgaactagagaaattggaagaagcatttagcaagagtaaatctgagtgcacccagctacatttaaatctggagaaagaaaagaacttaaccaaagacctgctaaatgaattggaggtggtcaagagtcgagttaaagaattggaatgttctgaaagtagattggaaaaggctgaattaagcctaaaagatgatcttaccaagttgaagtcatttaccgtgatgctggttgatgaaaggaaaaatatgatggaaaaaataaaacaagaagagagaaaagtggatggactcaataaaaattttaaggtggaacaaggaaaagttatggatgtaactgaaaaactaattgaagaaagtaagaaacttttaaaactaaaatctgaaatggaggaaaaagtatacaacttgacaagagaaagagatgagttgataggcaaattgaaaagtgaagaagaaaaatcctctgaattaagctgcagtgttgacttactaaagaagagacttgatggtatagaggaagtggaaagagaaataacaagaggaaggtcacg

SEQ ID NO: 36551 - DNA, 2300 bp, Homo sapien
caacctccagcataaatgggttaatatccctccctctttcctctactggtgaaaaaattgagaatcagagagtttcagtgattggccagagattacacagttagaaagtgacagagtcagaattcagatttgattgtctgactccaaaacctatgttgtagtcactccaatccactgcctctaacagtatagaggcatagtattcctaaaaatatatttttagaagctttaacatgttaagcttagaattggaagcagtaacgttttcaataaattaatctctaacagtccagttaagggcaaggaatttgaaaatggtattttatgttgaaaatatcctgaaaagtttctcccctaatctatggttctatgacattatttcacttgtttcaacttttagtaaaaagagaacatggtcaataaaatgctgttttctacatgtaaggaccacatttagtgatgctgttacagtattaggcaaatcagtaggacttgaagatcatattttcctcctattttaggaataaagtcataatgatttttggagggtatgcattagtttagagatgctgagacacaatcatgctttataaaagtaaattctatgaaaaaatcttaacgacatgatcagagccatttctgtaatacttatctcacactgtatttaattattaatagcttctattgtgctttactaatgtatgttcaaatatttcttgtacaccagctttcagtcagtgacaagtaaaaaaaaaacacacaaatatttcttacacaatgcaatgagagactattaaattctatttacttggctaacagctaatctagtcataaatatgaaattaatcagtcagaatagtaaaggagcaaaatacactgaaagaataaaatctattatacttaaataagtgcatgtcattggttgtttataacttgcttcccttataaacctattaattactaaaatgcattcttacactaacatggcaaatatgattataattttgttttatgggtaaataaaaaaactattaaaattagtacaagttaactgaccaacccaagaatggtaaatagctacttcagcatatttatattcctactttttacagatattcataaatgccatagagaaaatgtatttcacacaagtgaaacaataattcctgtggctgccacatttttgtattgatatacagattttcttgctatctagttcttgattaaaaaagtattgtttaaataaaaaaatcctgtgccagttctggtgtgaactaaaatcaatttatgtaaatcagtgtttgtatcagaaagccagtcatactttgtcccttccaggtgacagttacgtagtttacgtcaagggtttaaaataagaaaacccaaagctgcttcttttctgaacctttaccatcatttaaagtaaatttatctcctcaaatcatatgatgcagaggtggagagcaataattttgaaggcttcctggctaagtttgaaacccagccctgccacttactgactctgggatctgtagcaggctacataattcccctgtatctcatgttttttcatggtgatgatagtagcaatacatatctcatagggttactctgagaataaagtaaatgctaacaccaaggatacagaagacattatgtaaatagtcattattattgcacaacctaagttttacttaatggctactgtattaaagtataatacatatgcagaaagatactcggaagtgttcagcttactgaaatttcataaggtaagctaaacaatcctgtatagcaagcatgcaaattacaaaagagaaactagttacactcaaagccctcctcatgcccccttctagccactacccctaagggtaactaatattttgacttcccattcatttcattaatggctattctttaaacattgaaattatagcaattgataagggatttattgtagtggctttttgttttttatttaatatcaatgcttaaatctgtttgctgattactcttttaacatataggtatattttattttctaggttaaaaaagctccttgaacaagaaaaggcttatcaagcccgcaaagaaaaggaaaatgctaaacgactcaataaactaagagatgagcttgttaaactcaaatcctttgcactcatgctggtggatgaaagacaaatgcacattgaacaacttggcctgcaaagccagaaagtacaggatcttactcagaagctgagggaagaagaagagaagctcaaagccattacttccaaatccaaagaagacagaca

SEQ ID NO: 36552 - DNA, 2300 bp, Homo sapien
agaggcttctaataaacagtgttatttagccaagggggtgttaattaattataataaatatagcctttttgagtgagtctcaatagtggagttttaaattaactttgaatgtagtcgtttagtggtattaaacagggagggaaaagaaacctgtctgtgattgacatttgtggtatttttaaaaaaggttttttaaaggtaataaaacatttccccttgctattatcatttgtctctaaatattgatttaatatggcttgaacataagcaatgcctccccaggactataattcaagtttgaatcactagaagcaaactgagtacaagatgcctgccgcttgattgtataatcggtcctgaccccttgattcccttttttttttcacatgggtttatgttgcctgtcaaaattagaccacaagtttatattttcacaaactgcctaccatcatcaacattaaactgtgcagaaacatattatatattgtgggcccactatgcatcagattctgtggccctgacttacattattttatttaattctcataacagccctgtaagttaaaacccatatccctattatacagctgagttaactgaagccacagagttacaaaatataccctttagttaccttccaagtaggtgccaagcccagattaagtctatcaatcaattgccaagacgcctcttcccccagcactagtgcagccttgccaggcagtggcaatagtttcttgttttcttcttcaatgtcagtttccccatccatattaaaaaatagctaaaaaacaaaacaacaacaaaaaacaaaacaataactaattggttagtatctgtaattttaccttaacaatgaacattgctttatgtaacttttacagaaagctacattatttgattataaccctgtaatgaaaacacacttatttagtactacaaccttgaaacatgaagtaattattatattcagttcaggctattgagaggttagacatattcttaaagcaaagggcatgactgaacattagggatgtaagaaagcaatggtcttgaccttattttttttcatattcttttctatgccataacataatggcttatacttatgtagtataaaagatatctgaaggcttaaaaatgctctgcaaacatttaattctgttaaccttaaagttaatttgactaatttatctggtatcgtgcttttattctgtaattgaaatgaaatttcataacataaatgacatacatttctatgcatatggcttagaaaaaattatactggaatgtttaatttacctaatggctttttgactagatttatcactcatacactctctcagggagaaggaaaaaaggaatgaagggaaggagggagggaggaaggaagggaggaagaaacaatgggaaaaaaagaaaagaaaaaacagagaagagggacaactaatttgaagatgatagaagcttttgaaaacattttgtataaatgctgaaacagacacttctttaactttagctgaatgtattcacctacttttgtttttgcagacagcagtttttgccatttaaaaacacttagggaaaaaaattcaagtaaaaatattttgtaaagatgaaatgatttttaaaatgaaaggcacttggcattctgtagccatactgcagtgttttcatttagataccatgtaccttaactggcattttagttgaaacatgaattttctcctgttggctgaatcatagattaggctctagtgggatccctatttaaattccagtatgtgctgaatagaactgtatagagtttagctagtttgagaaatcgggagtgaggcccatttgacattttatgcatatcttttctttatttcattcttcctccccaaatgtatccctctcccaatgcatttcccttagtgtggagcgtaattcccattcacttgctttgcttcttaagagctgccttcccttccagtcttgggcagctccaccccttctcacagaccaaagtaaatctgcacaataatgagccatataagggaggaatgacatcatcagttagtgttcccaagctgttttgcacaacattcacctttcattgttctgatgacagggctggaatgtgacggttaattccctgtggagtagggggctgagcaaggcctgctgctgttgaacaaacttcagtacccccttataaaaaaacaaaaacaaaaacaaagctactatgcttcctagtattaaggtaaggaagtcaagatctgttttgatttaagcaatgttagttactcttgtcc

SEQ ID NO: 36553 - DNA, 2300 bp, Homo sapien
ttgcttcattttggtctggagatatctgtaaagtgaactcttagtaggggtgaaataatatatccccagggttatttttagtggattttaacctggggctgttgcatttggtgtgtgtgaggggaagcatatatatttttcaaacagtaatttacccacatctcaccccgaccccccactttttttttggagacatggtcatgttgcccaggctggagtgcagtggcacaatcatggctcacggcacccatgacctcctggccccaagccataatctcacttcagctccccaagaagctgggactacaggcatgtgctgccatggtcagctaattttttgtagagacagggttttgctgtgttgcccaggcaggccttgaactcctgtcgtcaagtgatccttccacttcagcttcccaaagtgctggtgttagccgctgtgcccagcccctttgtaattttttaaaagttctgatgattctgaattatctcatacttcacttatatactttctacctctattagaacccacttttggggactgtgaatagattaagtttctaaaagatccattagctcgagaagagtcagttaatttcacatgagagctctttcatcttaatagaagtctctttttttttttttttaaatcatggttggctcagactcagaaagactgagtctgagcaaatgcaattttacatgtgtatggtagtaaatacattaaaggggcagggtgcatgctgtcagtgtggtatttggaatgagaagaactgagatgtttttgaatggcttgagcaggtgagggtcatttctttaaaaagaaggacatacacacactcctgattgaagtggcagactttctcagagacatagggttacccagcacataagctacttactgcaagtatgcaactcttaaaatattacatccacacctttacatatgcccttggttcatcttcagtttgcatgtcaaaaagagggtatctttaatctgataaattgatctcaggaagagggtcaacctttataatggtattggtgagatttttgtcagggccatattctagtttgttaatcaataatgtttctctctctctctctctctgtgtgtgtgtgtatatgtgtgtggtgtgtgtgtctcccttcctactttacctgtggccaagaggacctccttcagtttcccttagtgttaatttcacatatgtaattagtaaaacggtccccaaaactagttaattaaacaatttctaaaaagtttcaatctcggcagattcataccgttttgttatgtaggatgaagcacataaagtatcttgagacattcttcatgttgtagagacttgagggttaatgatgaggcaagcctgtcaacaaccagaggtatctcatgtcctggatttcctggagtgtttaccgtgtgttactttgaatgaatgacctgagtgaggatgctaagattttccttcttaatgttactcctttcaaaatcataatgttatagacattcctttatggtaatattattttaataacattcaggtacatagctggacaaaagtttgatatgactaggtaagtgatctagctataaatgaaacacaccagtgtcaaaagctgtttggaagtgatcttgtactcattttcacaaccaacagttgtgatacacttttttaagacctccatttatgcagaagtgatacacttttaaaaagcattttttatttcagaacatttatctgagagagcctaatcgagaagaatattgcattagtaaattgctctgcctaagacaactgctgctctgtttctcttcacattttaaaacctaagtcccaaatctcagtctgtagttaagagcttcaaacaataattacctctgtgaaatgagcagaagtccttaaaagggcctgccggttttcccgcaatcttttacagggtgagcagcgctgtatccactgataacccagctgcttaggaactgagtaaagccggctccaaacttctcagctgttgacaggcttgacttgctgagaacactggttaaatatagcacccgcgagctcagctcctcaacatagccattgctctgacagtgttgtgaagggagcagaagaggagaaacctaatctccgaacccaacaacacctagcaacagtagaaaaaacttttaaacaaaagtctgggtgggagatatacaacaacttccaatttctgctgatcgggatttcagggagaagaagctgctttccctcctctctactctgtttcctgcatgacttcagctattggct

SEQ ID NO: 36554 - DNA, 2300 bp, Homo sapien
cagaccttgtctcaataataataacaattaattaattaatttttaaaaacattattgtggcttttgtgtgagaaatggattagaggaggggtagagagattaaggaataacctgtttgaagctattattgtagtatagtgaaagattatagtggctaagattgatggggagacaccggaactggaaaaaatatgtatagattcaaaagataatcaggaaggagatttgatttaaaaaagaggggaaagaggagagagaaggagcgagaaagagagatgagagattcctagttttctggcttgtgaaaccagaaatgcatgaatgacattaataaatgacaacgctattcaccaggctaaaaaaaccaggaaaggggccgggcgcggtcgctcacgcctataatccagcactttgggatgccgaggcgggtggatcacctgaggtcaggagttcgagaccaggctggccaaggtggtgaaaccccgtctccactaaaaatacaaaaattagccgggcgtggtggcgggcgcctgcaatcccagctactcgggaggctgaggcaggagaatcgcttgaacctgggaggcggaggttgccgtgaaccgagatcatgccattgcactccagcctgggcgacaagtgaaactccgtctcaaaaaacaaacaaacaaaaatcttctacacactttaccttgtttcccattccatgtgttgctgtaacacatggtaattaccactaatttagcaatttaacacaaatttttttctgatagttctgcagggtcagaagtccaatacctttctgattgggctaaagtcaaagtgtcagttttcctttctggagactcttgaggagaactgattttcttgctttttccagcttccagaggccacacacattccttgactcctggcaccttcttccattttcaaagccagcatatatgcattttaaaagcaaagatttatttttaattaaaaaaacaatttttccaaatggaatcaagctgctgaaagtttttttttttttttttttgagacggagtttcgctcttgttgcccaggctggggtgcaatggcacgatctccgttcatcgcaacctccgcctcccggattcaagcgattctcctgcctcagcctcctgagtagctgagattacaggcacgtgccacgacgcccagctaattttgtatttttagtacagacggggtttctccatgttggtcaggctgatcttgaactcctcccgacctcaggtgatccacccgcctcggcctcccaaagtgctgggattacaggcgtgagccaccgtgcccggccttaaagatttttttaaaactacatgttgaagtctgtacaaatggccagttacccacatttgcctattacctacacttctcagtattatactgtcattggcacagacgatgtcatagaacaccacaacaggatcatgcaataacctcaggcaacaaaaataaattacattcattacactactcttgccaatcaggaaagattattggttcgcattaggaaaaagattttaaaggacgttttaaacaataagcctttccgcttaggccttcgttaatagcacaactgaattagaacagtccattccccaaagactgcacttaatcatgtcggttttctgcatcattttaattgctgttgacttttcattgacatttagcatagatttttgctcatttttgttttttaaagaacgatactgaaagacaagaaaaatgctatcagaggactacaaacctacaggagttgagtttcagtcgtgaaacattataatcattttctgtgctttccatatttccttgaatgagaatgtattatttttataataagagaaaatttttaaaggaaaagaagttaaaaaaaaaaaaggcctcacttgtaaggtagggtatggttttttcaagtctcaggcacgtaaatgacaagggactttttaaaaaacaaaaaaacactgccatttaaagctgactggtaggatcttccctgctaaattattttggaaacttctttaaaaataaatgtagaccacgaatcatttactaaacatatgattccagtacctcactaccttttctcttcggttggctgtagtttaaattctaaggtctcctcaagaaatgacattttcacatttcttaggcatctgtggtgccagaggagcaaacccatcgcacacgccaggtctgccatggggccctgggcggtggggattttggatgtaacgtgtctaggccgagcccgcgccgtgaaaggcctaccctgc

SEQ ID NO: 36555 - DNA, 2300 bp, Homo sapien
tttctgattgggctaaagtcaaagtgtcagttttcctttctggagactcttgaggagaactgattttcttgctttttccagcttccagaggccacacacattccttgactcctggcaccttcttccattttcaaagccagcatatatgcattttaaaagcaaagatttatttttaattaaaaaaacaatttttccaaatggaatcaagctgctgaaagtttttttttttttttttttgagacggagtttcgctcttgttgcccaggctggggtgcaatggcacgatctccgttcatcgcaacctccgcctcccggattcaagcgattctcctgcctcagcctcctgagtagctgagattacaggcacgtgccacgacgcccagctaattttgtatttttagtacagacggggtttctccatgttggtcaggctgatcttgaactcctcccgacctcaggtgatccacccgcctcggcctcccaaagtgctgggattacaggcgtgagccaccgtgcccggccttaaagatttttttaaaactacatgttgaagtctgtacaaatggccagttacccacatttgcctattacctacacttctcagtattatactgtcattggcacagacgatgtcatagaacaccacaacaggatcatgcaataacctcaggcaacaaaaataaattacattcattacactactcttgccaatcaggaaagattattggttcgcattaggaaaaagattttaaaggacgttttaaacaataagcctttccgcttaggccttcgttaatagcacaactgaattagaacagtccattccccaaagactgcacttaatcatgtcggttttctgcatcattttaattgctgttgacttttcattgacatttagcatagatttttgctcatttttgttttttaaagaacgatactgaaagacaagaaaaatgctatcagaggactacaaacctacaggagttgagtttcagtcgtgaaacattataatcattttctgtgctttccatatttccttgaatgagaatgtattatttttataataagagaaaatttttaaaggaaaagaagttaaaaaaaaaaaaggcctcacttgtaaggtagggtatggttttttcaagtctcaggcacgtaaatgacaagggactttttaaaaaacaaaaaaacactgccatttaaagctgactggtaggatcttccctgctaaattattttggaaacttctttaaaaataaatgtagaccacgaatcatttactaaacatatgattccagtacctcactaccttttctcttcggttggctgtagtttaaattctaaggtctcctcaagaaatgacattttcacatttcttaggcatctgtggtgccagaggagcaaacccatcgcacacgccaggtctgccatggggccctgggcggtggggattttggatgtaacgtgtctaggccgagcccgcgccgtgaaaggcctaccctgccgaaagcccgggcggcgggcgcccacaagtcagggctcggtgcggcgccgcagccagctctgcccgcgagccgagtccgggctgctgagggggagccgcgctgggggcggcggcgtcggggcgggggcgggagccgggcggcagctccagcgcccgtgggggaggagcggcagcggcggcggctggagctgctgtggcgaccgacgcgaggcggtggcagaggagacccacccctgtccacatggacagtcgcaaaggcctccgctgatgcattcacgcctgggcggggtgggcggacggccgtagcggcggcggctgcagaacgagctaggggcctgggggcgcctgacggtcgcagagacctcgccgctccggcgcggcgggtgcggccattttacggcctgggacgaagggaggcgtgtttgtgtgctcgctttcattctcctttcttgggaacccacggctgggggaagtttctcaggcagcctgggtgggcggtggatggggagtcgtgggccgagaggaaccgggcccgggaagcgccgtcgtcgtcgtcgccggtcgcgttcccccggagaggcctgagaagctcgggccgcgggcctcgctgcccgccagcccgcggacaggcccgggcgcgcctggcctgcctttgtataggcccgtctgaacgtgggagcgcagcccgcctgacggctgagcccgaggcccgcaaccctgcggcgtctaccctcctccggcgcggcccctcatcccggcgagcacggcggcggtgtgggccatggattaagaaggaggc

SEQ ID NO: 36556 - DNA, 2300 bp, Homo sapien
ctcaaatctgtgtccataagtaaagttttcttggaaaacagccatgcttatttataaattgtctatggccacttttgtgctacaacaacagatttgaatatttggacagagttgagtagatacaacagagactatatgatcaagaaagcctacaatacttacttttagcccttggcagaaaaagtttgctgatccctgtatcagtgtttattttgtataaatgtatttcatagattgatatccggaggcccccttaaagactcccagtgaatgactgagaccccagaaaatagtggatatatatcctcggatgaagcattgatgaaaccattccataaacaagtgactgtcacccacactttgattgtgttgccaggacacaggcagatattttttgtttttgtttctgggagcgtgtgggttcttaaacactctggacagtaatacctggctttatcatatgcctgacagcattgctgcatagtaccagagttaagctgtcctttcatgttttatgccctggtgcatttttatgaattagtatgtacttcccttgcctgagcattattcataatctctgaaaaatttaagtgataccatagcagaactttagagacaaccttagtagctactaatagaggagtggttaaattaaaattttttttggaacgcaattgactgttagtaactgataccacagaaagcaaaaccatcgataaagggggactactatgtagtatttttggataagtcctgtgttaaccagtcagaatagcaaactctaggcttgccaataactgtccactttctagaattgtcatgagatttatatgagatgatgtaattcacatagtatatgacactagcagttttctggaaatagctacattttgttattattaaatgcagtgttattgaacctttgtaaactgatgtttctttgcaaataatgtttatagttgcaggtctgacatcagtaaggtccatgtttgtaattggttttctagtcatttgatctcttttcgaacaaatggattcatctattcacagtagttctcttgatgctgtgcttgcattacctggaaaactgtcttaggctggggtagggcggtggatttaaagttttagggacttccagactgaatatatcatcatgattttattaatgggagtactctaatctgtgagataatcagccataaaattttaaaaacttatttacaccttatttcctcccagtaatttgatgtagattaccaaattagcacaaataaaataatggaaaatcaaaacaattaggaggtgagtagatgtgccaggatgctaaaataatttatatgttgtattttaattcaacagttgtctctgaattttctgggaactgaaattgtgtcctgtaattttataattgtatgataaaggaatctttacaaatttattttgctccttttgcctgttatatactgtgatctctctaaagtgattgttactgatatgtttatattattatttgcatctattgaagtataaagtatcaatttctgcctgtacagaaactttgatactaaggcaaaagttcttatacataagcacaagttgaaatgacagccgattgccatatttggctgtagtgttctccagatagcagcaaggcctgataagcaggggaaatgcttactttttactctctggagaaagctatcctaagatcctctaccctaattgtctcaaatatctttggaaagattcacatgaaaagaaagtaatacaataaacctccatgttcctacaaatttgcattgtctttaggaaaaaaaaagtaggcagttgaattattcttaaatccatgccaatgctatccaccatcattcccaatagctgtatgtttttactacttttaaatggttttcaaatagttgttgatagattgtcacattatagcatttttgactcatatttctggatctttttttacagttaaatcgtcgatctgaaattgttgctaatagctctggtgaattcatcttgaagacatatgtaagacgaaacaagtctgaaagttttaaaactttgaaaggcaacccaattggacttaacatgttgagcaacaataagaaattgaggtataggcacttcaccacacattcctacagaaaagataaaggaagagtttgacaccaaaaacttagaagctaataggcccaacctgtaccttttcttctgaatttgtctatagggccaagaggtagcatggtcccagtatgtggattctttgctttgaatcttaggagtaggattga

SEQ ID NO: 36557 - DNA, 2300 bp, Homo sapien
gaaatactaataaagtcaacgcatgacttttgaatgctttttctgtgtcaggctgtttcaggcctggggatatagcagtgaataagacactgtccctgttctcttatagtttatgtgtagcagggagaaacagataaacaagtgaacatccgcaacaaggaacaacagaaaatttaaatcagttaatttgactgtgtgtgtgcttactttattgggttatcaaagtgatatttaggctgggcgcattgggtcatgcctgtaatcccagcactttgggaggctgaggcgggcggatcacgaggtcaggagatcaagaccatcctggttaacacggtgaaaccccgtctctactaaaaatataaaaaattagccgggcatggtggtgggtgcctgtagtcccagctactcgggaggctgaggcaggagaatggcatcaacccaggaggtggagcttgcagtgagccaagatcgcgccactgcgctccagcctgggtgacagagtgagactccgtctcaaaaaaaaaaaaaaaagtgatatttaaactaatacttggtggccaaaatgcataatattgagggaagtagaattcaggcaggagcaagcttgtggtgtttcagggacagaaatactggctagtgtgcctggaggataaagagacaaaaacagaatattatgagaaaattggataaataggcaggggccagattatgtaaatttacaaaccatagcaaggagtttgtatttgactcaaatacaatgtgagtggctttgtggaattaagatatagagatagatttgctacgattcagtaatgagtacaaggtataagagcaaattaccatcatagtgtcttttcttgctcacgtccatttactcaacaagacttattgaacataaggcactggtccagatttttccaaggaccagttaagattttagtagcttcctgtgtgagataaaattacttggctacagccaggtgcggtggctcacgcctgtaatcccaacattttgggaggctgaggcaggcggatcacctgaggtcgggagttcgagaccagcctggccaacatggagaaaccccatctctactaaaaatacaaaaattagctgggtgtagtggtgcacacatgtaatcccaggtgctggggaggctgaggcaggagaatcacttgaacccaggaggcggagttgcagtgagacaagatcgcgcactgtactccagcctgggtgacagaatgagattccatctcaaaatatatatatattttatatatatatgatatataaaacgtatatatgatatatataaaacgtatatatgatatatataaaatgtatatatgatatatataaaacgtatatatgatatatataaaacatatatgatatatatataaaacgtatatatgatatatataaaacgtatatatgatatatataagtatgatatatataaaatatgatatataaaatatatatacgatatatataaaatatatattatatatatatacttgactacatggagtttcacacatatttacaatgcattctattttgtgaacaagttgtatgcaaattattttttacaccttaaattttttgggactctgaaatagacctactgttcttcttgtaacttgctgatattgctgtttgggtgagtggtgatggactgtaaaatcaaattttatatttgtatcatattttttaaaagataccaagtcttaatgctttcttcagatttaactttttatcagatagagtggattgtatcttcattcatttttattaattttagatctggaggaggtccaaagcaaatttaggatattttccactttggtaatttatttgcatttttaatggacagaaatgaaatataaaattataactatagttttaatataaattataaattattaaaatacttttagtcattttgtccagtgatgatgatgatgacaacgacagaactaacagaagagaaagcatatctcctcagcctgctgattcagcatgttcttcccctgcaccatccactggaaaagtagaagcagcgctaaatgaaaatacttgcagagcagagcgtgaactacgaagcattccagaagactcagagttaaatacagttacattgccaagaaaagcaagaatgaaagaccaggtacttttcacttttgttgacatttgttcagattaatgcctccattttggggtgtaaattttttttagaaggcagtttggtagtgccaagaaaaaatgatggattattaagtggggcttaaataccaca

SEQ ID NO: 36558 - DNA, 2300 bp, Homo sapien
gtaacagatctcaagaatgtgccctctagggggccagatgttttaagcatttgctctttctgtgtaagatttcacaagactttcagactgtcctcattttgataatattaatatggccataagcttgaacttgcataagtcctatgagaaagtttggatcataaataaatttaatatatcataatttccctttgtgatataaacgactattgttacttgttttgctatagatgtataaaaaaataactaaggcaataaaaacttagaaccaggccaggcacggtggctcacgcctgtaatcccagcaccttaggaggccgaggcaggtggatcacctgagatcgagagttcaagaccagcctgagcaacatggagaaaccccgtctctactaaaaatacaaaattagcctggcatggtggtccatgcctataatcccaactaatcaggaggctgaggcaagagaatcgcttgaacccgggaggtggaagttgtggtgagccgagatcatgccattgcactccagcctgcctgggcaacaagagtgaaactcttatctcaaaaaaaattagaaccaatgtaagatcactttacagagtcattgttaccacctcaccactgtacaagttctttctctttattttctattttcataaaaaatactatgctgctggatcttcgtggtttattaactgaactgtttaaaatgaaataaacaatacataatgataacagctttacttagatataatacatataacatacaattcacccatttgaagtatacaattcagtgtgtttcattgccccataaagaagcctagtacccattagcaatcactgttttcttccaatccctcctccaggcctatgcaactgtcagtcttttctctatctctggctttttgtattctgaacattttgtacaaatagaaccataaaatgtgtggtttttatgagtagattcttttagttggcatgttttcaaggattttctatgatcatgtattatcacttcatttctatttcagatatttcattgtataaatgtaacactttatttttccatttgtcagttggttagcatttttcttatgcttttgggctattatgaataatgtggggacatatgctctactctagatttagagtgtgcccttggttttttttaatttatttttattttcttgagaccaagtcttggtctgtcatgcccaggctggagtgtagtggtgtgattttggctcactgcaacctctgcctcataggttcaagtgattctcccacctcagcctcccaagtagctgggattacaggcactcgccaccacacccggctaaatttttgtatttttagtagagacagggtttcatcatattggccaggctggtcttgagctcccaacctcaggtgatctgcccacctcagcctcccaaagtgctgacattacaggcatgagccaccgtgtgcagcctaacaaggtttttggttttttgtgtgtgtgacagagtctcactctgtttctcaggctggagtgcagtggctcaatttcagctaactgcatagaatgtgtccttgttttaaaacattagatctttatgttataattttattttcaaatagcaattttcattgcctgaagataatcggatagttatcaaactttgctaataacttccttggttctaaagaagagagattgatggttctaaagaaaaaagatttactgagtttttaatacaaagcgaactgtggccgggcgccatggctcacgcctgtaatcccagcactttgggaggctgaggcgggcggattacttgaggtcaggagttcgagaccagcctgaccaacatgggggaaaccctatctctactaaaatagaaaaattagctgggcgtggtggtgtgtgcctgtaatcccagctacttgggaggctgaagcaggagaatcacttgaacccaggaggtggaggttgcagtgagttgagatcgctccactgcactccagcctgggcaacagagtgagactctgtctcaaaaaaatagaaataaataaagtgaactgttacattaattatatttgaattattttctatcaaatagatacttggtgcttgaaaaactgaagaaggaagacgctgaccgaattcatatattcagttcttttttctataaacgccttaatcagagagagaggagaaatcatgaaacaactaatctgtcgtaagtcaaactctgaaaatatttaacagatgtaagtcactcacatttaactaagtgaaaaatcacgtacttgaaagaaa

SEQ ID NO: 36559 - DNA, 2300 bp, Homo sapien
caggagttcgagaccagccgggccaacatggcaaaaactaatctctactaaaaatataaaaatcagccaggcgtggtagtgcacacctatagtcccagttacttgggacgctgaggcaggagaatcgcttgaacccaggaagcagaggttgcagcgagccgagatcacaccagtgcactccaccctgggagacagagggagactctttctcaaaaaaaaaaaaaaaaaaaaaaaagaggaaaaaaggaaatccccattatgttaggcaaacaaaaacagccagtttgtgactggtggctaaatcaagaaggatcttacaagacattttaagtggtttggactttatatcaagagtcagagagtgccattacagaaatttaaatagtggagtacataaaagacaaactgatgacgttgtaaagactggattagaaggggataaaactgcggcctgggaaactggttaggtgacttaggcagtatgcaagatttgaaatgatagtggcctgaaacaagatagtggtagtgggtataaagaggaatttgatacattagagagatattatagagccagaagcaaaagcactcagtaatggattggaagtgtggggcaaaggagagaaaacaatcacgaaagtcattagctacaaaaaaatctttaaaatgtattgatttatctaggtgtggtgactcacacttgtaatcccagcactttgggaggccaagggaggggggcgggcagggattgcttgaggccaagagttcaagaccagcctgggcaacatagcaagcccctgtgtttaccaacaacaaaaaaattaagaaaattaaaaaaatgtattgacttctattggtttgccaaatgaagtttagtattaaatccaaaattgagtcagagcagtgtgaactgagacagccatcttcatcttctccctctttttttcagtttgttttgaaatttagttttatatacttaagacttaccttctggcaatttggaattaaatttctgagattgctgtaaattatttcctttctttgtttctcttcctctttcttacttccctattttactcttaatattttattgttttagttgaattctaaaacatcttatcagaacttagagtttttatttctccacccacagaaccatggagtctttaagtatcagaaatttgtctcctcgtcagaatcttctagatttccagaagtttccaagtcgctacatataaatgttgcagaaaaacgtgtaattctcatgtgcaagtaggcttttttcagcggatacatttagcattatagtcaattgttatttcgttgccttaaaagaagctgttttcattgtaaaggtgatgtgtttttaccatataattcaaatttgcataggtacttcatattttaaaaggtgactcacaggtatgtcactaataaaaacagtaacatttaaacgactgagaaggtaggggctctaaataaagtaaatgcgtcggcgagggtaggagcgggaagaggcaaaggggtgcgaaattcccatcccaagccccctcctccaaagaccgaatggcaacttagttgtgcgggaaggttcccccctatgcagggcagcccagtccaagccggcccgatccggggccgagtgagcagtggttcttgccgcaaccgccacgcagcctcgctgccgcccaagcgcggacacctggttcctgggtcccccgcgcggagccccggactcctcgccccttctccgaacaactttctccctgcttgaactgattctcgctgttggtagactgcacagtcacagtatccagccggacaggacctgctttgccgggactggaaacaactaccgcggcaaaagaggccgtttcgccatgggaagaacaagaactcccggcttgtccaggggcagcccctctctgcgctgcagggcgcctaccctcgccccagaggctctgcgccgcgggcggggcgaccccgggggtcgcgcgccctctcccggagcgcgccctccctcccggagcgcgcgcccgacggcctgccgcggccccggcgcccccgccccttcgggcgctccgtagccgtgacgtgcacgccgcagtgccggggactcggcggggcgccggccggcgggcggagaccgactcgggatctgtccgagcaggaagccagcctcagcccggccgctgtcgccgccctgtcctggtgcccgtccgcgtcgtcgccctcttcactggccctcatcacttctcaccgcgccctccagcttcacccgtacaggtagccccgccgccgcg

SEQ ID NO: 36560 - DNA, 2300 bp, Homo sapien
tcttcctaattccagagctgatctgcagagggattaaaaaaatggtcactatgcataactaatgaagtccccagtgaaaagcaagaattaatgagcttccaattaagaaatctagcaaccaaaaattcagctggaaaaaaaaatacataatggcaacttgggtttttttctctaatacaactattaaatttagaatttgtcaacattttacaattaggcaaaattaacagctttaaatttcctagattatatctgtggggttttttcctctaatacaactattaaatttacaatttgtcaacattttacaactaggcaaaattaacagctttaaatttcctagatttgcctctgtttacatatatattttttaactatcttcattagactccaacaatttaggctataaactgtattaaatgttaagactacacagacaagttgaaagcaatttaatgctgttaaagcagtctcaaattaagacaactttaattcaaaactaggtcatcacaatttggctctataagacaactatttctcacctcagacatgtgccaagaagacttcagaaacggcttttactctaaggggagaatgcaaaccatatacaagagcgcacacatccctttgtccaatttatcagcagcgcttttttctttttttttttttttgagacagggtatctctctgtcacccaggttgaagtatagtggcatgacttcacctcactgcagcctcgatctcctgagctcaagcgatcttcccaccactgcctccagagtagctgggactataggcaagcacatgcccggctaattttttcattttttttatagagacaagattttgcatgtttgcccaggctggtcttgacttcccaggctcaagcgatccgccctccccgaagtgcttggattacaggcataagccaccacacccatcctccacacatttttaaagaatcattccaaacacttgttttttcgcagtaaaaagctaaaaataaaagctagtttatttacattttaaacatgtaacttttctccagtgatgtttgctcgtattcaggttctaagggatggggcaccgttttgcaggctgcaacacaacgatgcctgtcatagcttcttcaagccaaaagtaaatctgctgctgccctggtagagtaattatgtcagccatattcactctacctagtagcagacaacatacaggtcaaccaaatctggaagtgaactctggttaggccaaaacacaagcatgaagggaaagcccaaagagaaacaggatgcactacgaactagttccaatacatgtcatttagctgctttatgtctgaatgcaaagggttagctaacacctccgcatttggtgggaagaggggtaattgctcattctgatctaaaacctccaacctctatgactcagagctggaggacttcaaaataaaagaggctgagaaaggcaaagagacactactgtcttcccacatagattctccagtggtatgaagcatatactacttttaatcctttaattttataaacccctgatgcaagatgatgcccagaagtctgctcttacagctgaaatctagcccaagtaacacactcataagggatgagctgggtaagagatgaaggccagaacctcaaaattgtgaaggaggacaattttaagatggagctgatggtattaaaaagtctaaaagtaccattaggtcagcttttattatatcctgctttcacctgggcagacatctcttagaggacacaggcatttaacacagataatgatgtatggtaagcctgccccattagttgactacaaaagtattcttcctcaccctgtgtaaaatacttgctcctaacaatgttgatatatccaagaggtatacagtttctccaaaatatatattcaatttatggtatcttttattaatccaaaagaaaaattgagtaaatttgtacaatataaagaaagacaagaattaaaatacatttaaaatcacttaccaattgcaaagacatgaggtggtcttgtcccaagagattttccttgatatgactttattgcttctgaagaatatattttaggtatgtcaaagtatggattcactgcaatcagaatgttggcgacatatgtctaaatacgaaaagcataaacataaaatattccaattactattttcatttaaagataaacaaagctcatagaaaaaataaaatacaaaaaatttcaattatctatataactaagactcccaaatcagtcctaaatattccctgagtattccctga

SEQ ID NO: 36561 - DNA, 2300 bp, Homo sapien
acattgtacacattatagtgaggaactatgggtcacagttgtctctctgtagaatgtggataaataatagttgcaagcatttgacagttaatacatgttaaagcattgtgaacactgtgtagatcaataaatattaataattgtttttatacctaggggaaagtcaaatgaaaattcacttaaaatgttaagttttaaaatatcatataactttgtagatactggaattaataaattaggattaagagtctctctccacccctagtttttaaaaagtcccatgttgagaataaattgctcatgtatttgaatttctgtttgtcatggctttcataatatatcctaagcataaccaaaactttaaattcctgacatctgctctctaggtgttagtgttaatgggatgcctaagatactcatgtgatgtttgggacactaatatttgtagtcatagagttatggagctgtggttcttctaccttctcttggtcttgggaaagaggcaaaatggggatgtgtttgaagcattaatcataatagagaagaaagtagagactgaagagatctgtgcttaagcaattctttagtaaagaacttgtatgggggcagttatgctttccctttattttaagtaataaggggagtgatcaagtaaacaagtgaagaactcttggtgaaatagctttctgcccttgtcaggctgaagtggaggcacagctggcccgacagaaggaggaggaatcccaacagcaagcagttctggagcaggagcgcagggaccgggagctggccctgaggattgcccagagtgaagccgagctcatcagtgatgaggcccaggccgacctggcgctgcggaggtactggggcccctgggtggggtatagcgctctctcctttgctttctctacctctctgcctctcatttccatgcagaagggaataggagaaaataatattctgaaggccctgatatatttgagctaaaataattttaaaattatttgtatcgactttcatactcaagtgaatgagataattgatttttcatcatattattaaattgttgacaaataagactaaaatttcactaatgagtactctattaagaaaatatatcaacctttaccctgaaattgtttaagagtatagtatattaggtagacacctaatttctaaatacctgtcatcaaacactggcattgaaataagtgactgtgttatataatgcagtgtaatgtatttgtagttgagatttttctaatgcaaaaaaatttaatgtattaaatatcctgtcagttgaaatgagaactctactctgcaatgcctcagaataaatgagtttccctttacaagaagggagggttaaattcattgaaatattttggcttcttgggtttctgaattatctctaagcactccactatagtggagtgtataggaatgtggaagctcttattaaaagttgcagaaaggtttaatagattcagtttaaaaaaatttagtatgtagaggcattaattattttgattatttataataacaaaactaatttgtaaggttcctttgtatgtaggtatatatatgttgtatatatactgagaggcacatagacacatgtaaccatgcttttccgagcttaaaagcagtttatgacaaaatatagagtacaaccactagatggcgatgtttccttgtgaaaggatcaaactgcaatgtaatggaatatttggcaaaaaaacaaaagacggggaaggaaaagggcatattgagttgccttcatgctttttctattaggttggtgcgaaaataattgcggtttttgccattgggaaaactgcaataacttttgcacccaccaaatagtatgtgattgtattggggagctctgggactgcttgtatatgaaagtacattatattgtaaatgaactgaatatggctatatgaacaaaagatgttataattattaagctcttgggtttgagtccaatatttgggctctttattaagatttcactgtaattaaaatattttggcccagatagggcttttataaatgcagactcagctcagctgctgttctgttccttccacctgtgttgcatcagaatgattgggagtctttatgtgtaactgactagccgcctagggcaggctcttaaacgaaccaaactcttacagctgctatccctgatgtctgtgaggaagtactgcagttgacagagttgattttattatggcagaagtcaatttctaagggacttgttaatggagtcattgttggtactcatcatcaag

SEQ ID NO: 36562 - DNA, 2300 bp, Homo sapien
aattagggaaaaatagattcatcttccacctagttcatttctcattttcaaatacattgttataagcaggcttatataccgattgatggtagttttctttaaatattaccaaaataatctgtagttgaaggtaagagctaaaaatccattccctttgaccacctctgaataccccaagaaaataatatttaaggaatttttttaagtataaagccacaacaaaccacgagaaagaagacaacagtaataaagttttagaatttctacagctgacattttcaatatctaaatgaatgttgttttcaacccagaattctatatccagccaaactatcaaacaagtatgagggcagatggaaaccattttcaaacatgtaagattttaaatttacctaccacaaactttcagtaatgtactagagcagttgctccgctaaaacaagagattaagttaagaaagaagacaatacaggatccagaaatcacaagatccaacacaagaaagaggttgaaggaatcctcaggatgactgtgaagggcaatccccagatgactgctatgaacaatgacaagaaattaaataatacagactggagagggttagaaagccctgggaaagacagactatttgaagtgtttatgtgaagagatttacatatccaggggaatatttggggataatttattattttgtatttagaaactaaaaaaagttttttttaatgagactatgcaaaaagtatcatagaaggatagtggtgaagagtataggctcttggccaggtgcgtggctcacacctataattccaccactttgagaggccaaggctgctggatcacttgagcccagaagttcgagaccagcctgggcaacatggtgaaacctcatctttacaaaaaatacaaaaaattatccaggtgtggtggcatctgcctacagtcccagatactcaggaggctaaggtgggaggatcacctgaccccatggaagttgaggctgaaatgagccaatgagccaagaccacgccattgcactccaacctgggtgacagagtgagacccccatctcaaaaaaaaaaaaaaaaaaaaaaaagggtgtaggcttttgaaccagactctttaggtttaaatcctagctctgccacatatactttattctcctcaaatttaaaagagatagtattaacagtgtttatattgtcatattgaggaatctatggataatctatggacatctctaagaacaatgtctatccacaacacaagagctccatatacagtagtagttgcagtgtgtttcatgactcagcaatatgtagcatgtatagtcaaaataatataaaatcaaatattcaaaaactgaaattacaataatactgatgaagaaagatggaaagatgtttacaatgagtagaaagggtatgtgtggaagtgaagttattctcaatatctattatttgataatacctaaaagtgaaaacctccaaaatagtaatagaggcatgttatttagaagtgcaaatgagactactagaagaattaggttgatgaagtaaaaatggctcccctttgaaagaaggcatgggtagaagaaaggcacaattttttcttacaaactttgtagaaaaaaagtatttgaccccttaaacacagtgcatacagattttaaacattaaaaccagacttaaatcaaaaaagccacctgtatgtaattccaaatcaaaagcaatttataaagcagaacatagaagagaatggagacagtttcgctatctgtggagactaatacatattggataaccatatactttcagggacagaaattaagctcttttaatggatgtttcttgtacatgtcattttagaaaacatctgaccctaactgtcagccttattctctgtttggcagaacttcccctggctctctgtgtcactgtaacaggtgaataactaagaaaaaactgtgtctgtagacacttgtttataatggcattcagggtcctggagctaggctgacagatgctcctccagaaggttaatgagataaaggttcctccagctggcccttaagcagagattacacctgagggaaagacaagcagattattccagaaacagacactgctacatgttcttcataaattaacaccctcataaaggtaaaccaagaaggttatcctcaatcatctggtatcaatatataattatttttcacatttctgttactttttaatgagatttgaggttgttctgtgattgttatcagaattaccaatgcacaaaagccagaatgtatttgg

SEQ ID NO: 36563 - DNA, 2300 bp, Homo sapien
tttcaaaggatctcaattactcttcctctaaaactgggtggagggatcagatcagatagccttaggttctgacacagaatgattctctttaaaatatatgtgcgcttaaacagatgaattcatttacaatgcagtttttattagatacactctaggtgccaaacatggatctaggctctaggaattcgtagtggggatcatttaatccttcgagctgaaaataccttgtcctttcctggagcttttcttcatactttctgatttgcatctctaccctacatttgtttctgttgaggtcagaggagaaactgaggacaggggatccgtccctggtcatgagacctaggtactggtattgcatgctgcagcttatggctgacattcccacatattagttgaaggcaaaggagacacacaagatggtgctgatgatggttccagtcctccccgccccaccatcccccttttttcttgaattctgatgacctcctttctaggtaggctgttggaaggaacacgcttactggcaactgttttccagaggcactgaagcactgagcagctggaagaggatggtggagcagaaggtttaatttcacatacagttggcttctgtttgtgataacttttacattttcgcagatagcttgtctttttccctgttgactcatagttgagtgaaaaacacaaatttctaaaactagatgaaaaaatagtttttattgtatcaagagttaaggacggcaaagtacaaaatgcaaacattgggccctctacagcgatattactggtgcctcctaacctgggtgtggccatcagggctggatatgattttagagcggagaggtcagagaccagggcttccccgcctaacactggcctcctagggtgggagtggtaggcaggagcctagggccagactgctggactaaacctgtgaccatggctaaggacatgggtctcactggaggtcagcgcagcaagctctgatgtccgtagaggcgagaacaggacgccttcttcccctgaccagaaatgcagctccaggttgtcagggctgggaggatggcccagggtgggaagcggggagatagggcggtaggacccggcgggagcttccttggccaggaaaggaacagggcggggggaaaagagggagggagagagaaaaagggaaggtgatggggagcgggcgtccgcacccgccgcgccgcacgagttgcactgctctggcggaccggacctggactctatataaagagcccatctgctccgtagctcgcacgcttctcccgggctggtgcacgccgcgtccctccagctcccccagacacctgccccttcccagtgtgccgcgccaggtcctccagacccgcgcacccagtggcatggctccgagtggctcccgtgggaccagggtggcggtggcggcggcgcggcccgagcagccgcaactccagcccccgtgtccccccttttatggctccgtctccgcggggcagctcgtccgagtggccagagagtgaaaagagagggagggcagagctccggcgcgaggcgcggcgcagcgctgctcctagacttcaccccacccagctctggcggccgctgcagccccccaaaagtgccccagcttggggcgaggggtgggaatgcaagatctcgggacctctcgctggcctgcaagctttggtctctacacctaggaaactcctgtgggcaaagtctgcagatccaaaagcgtccaggttaggagacgctcagcctcaagcaactggggtaagagatcccatttggtcaaagccttctcctcaagcagtacttcaccctcctgcactagacgcctccagggagctggagcggagcagggctcggtgggccagctcttagcaacccaggtctaagacccggtgtggagaggaacaaccacagacgcggcggcttagctaggcgctctggaagtgcaggggaggcgcccgcctgccttggctgccgcacccatgacctctagtttcagctgtgaacctgggcggaggaataattgaggaactcacggaactatcaactggggacaaacctgcgatcgccacggtccttccgccctctccttcgtccgctccatgcccaagagctgcgctccggagctggggcgaggagagccatggaggaaccgggtgctcagtgcgctccaccgccgcccgcgggctccgagacctgggttcctcaagccaacttatcctctgctccctcccaaaactgcagcgccaaggactacatttaccaggactccatctccctac

SEQ ID NO: 36564 - DNA, 2300 bp, Homo sapien
aaagaagctgacgcagttagctacaaaatatctagagaacacaaaggtgacacaaaccccagagagtatgctgcttgcagccttgatgattgtatcaatggtggtaagtctccctatgcctgcaggagcagctgcagctaactataccaactgggcctatgtgcctttcccgcccttaattcgggcagtcacatggatggataatcctatagaagtatatgttaatgatagtgtatgggtacctggccccatagatgatcgctgccctgccaaacctgaggaagaagggatgatgataaatatttccattgggtatcgttatcctatttgcctagggagagcaccaggatgtttaatgcctgcagtccaaaattggttggtagaagtacctattgtcagtcccatctgtagattcacttatcacatggtaagcgggatgtcactcaggccacgggtaaattatttacaagacttttcttatcaaagatcactaaaatttagacctaaagggaaaccttgccccaaggaaattcccaaagaatcaaaaaatacagaagttttagtttgggaagaatgtgtggccaatagtgcggtgatattacaaaacaatgaatttggaactattatagattggacacctcaaggtcaattctaccacaattgctcaggacaaactcagtcgtgtccaagtgcacaagtgagtccagctgttgatagcgacttaacagaaagtttagacaaacataagcataaaaaattgcagtctttctacccttgggaatggggagaaaaaggaatctctaccccaagaccaaaaataataagtcctgtttctggtcctgaacatccagaattatggaggcttactgtggcctcacaccacattagaatttggtctggaaatcaaactttagaaacaagagatcgtaagccattttatactgtcgacctaaattccagtctaacacttcctttacaaagttgcgtaaagcccccttatatgctagttgtaggaaatatagttattaaaccagactcccagactataacctgtgaaaattgtagattgcttacttgcattgattcaacttttaattggcaacaccgtattctgctggtgagagcaagagagggcgtgtggatccctgtgtccatggaccgaccatgggaggcctcaccatccatccatattttgactgaagtattaaaaggtgttttaaatagatccaaaagattcatttttactttaattgcagtgattatgggattaattgcagtcacagctacggctgctgtagcaggagttgcattgcactcttctgttcagtcagtaaactttgttaatgatgggcaaaaaaattctacaagattgtggaattcacaatctagtattgatcaaaaattggcaaatcaaattaatgatcttagacaaactgtcatttggatgggagacagactcatgagcttagaacatcgtttccagttacaatgtgactggaatacgtcagatttttgtattacaccccaaatttataatgagtctgagcatcactgggacatggttagacgccatctacagggaagagaagataatctcactttagacatttccaaattaaaagaacaaattttcgaagcatcaaaagcccatttaaatttggtgccaggaactgaggcaattgcaggagttgctgatggcctcgcaaatcttaaccctgtcacttgggttaagaccattggaagtactacgattataaatctcatattaatccttgtgtgcctgttttgtctgttgttagtctgcaggtgtacccaacagctccgaagagacagcgaccatcgagaacgggccatgatgacgatggcggttttgtcgaaaagaaaagggggaaatgtggggaaaagcaagagagatcagattgttactgtgtctgtgtagaaagaagtagacataggagactccattttgttatgtactaagaaaaattcttctgccttgagattctgtgaccttacccccaaccccgtgctctctgaaatgtgtgctgtgtcaactcagagttaaatggattaagggcggtgcaggatgtgctttgttaaacagatgcttgaaggcagcatgctccttaagagtcatcaccactccctaatctcaagtacccagggacacaaaaactgcggaaggccgcagggacctctgcctaggaaagccaggtattgtccaaggtttctccccatgtgatagtctgaaatatggcctcgtgggaagggaaagacctgaccgtcccccagcccgacac

SEQ ID NO: 36565 - DNA, 2300 bp, Homo sapien
aataataaagaaccagccaccaggtttcagtggaaagtgttacctcagggaatgcttaatagtccaactatttgtcagacttttgtaggtcgagctcttcaaccagttaaagttttcagactgttatattattcattatattgatgatattttatgtgctgcagaaacgaaagataaattaattgactgttatacatttctgcaagcagaggttgccaatgctggactggcaatagcatctgataagatccaaacctctactccttttcattatttagggatgcagatagaaaatagaaaaattaagccacaaaaaatagaaataagaaaagacacattaaaaacactaaatgattttcaaaaattactaggagatattaattggatttggccaactctaggcattcctacttatgccatgtcaaatttgttctctatcttaagaggagactcagacttaaatagtaaaagaatgttaaccccagaggcaacaaaagaaattaaattagtggaagaaaaaattcagtcagcgcaaataaatagaatagatcccttagccccactccaacttttgatttttgccactgcacattctccaacaggcatcattattcaaaatactgatcttgtggagtggtcattccttcctcacagtacagttaagacttttacactgtacttggatcaaatagctacattaatcggtcagacaagattacgaataataaaattatgtggaaatgacccagacaaaatagttgtccctttaaccaaggaacaagttagacaagcctttatcaattctggtgcatggaagattggtcttgctaattttgtgggaattattgataatcattacccaaaaacaaagatcttccagttcttaaaattgactacttggattctacctaaaattaccagacgtgaacctttagaaaatgctctaacagtatttactgatggttccagcaatggaaaagcagcttacacagggccgaaagaacgagtaatcaaaactccatatcaatcggctcaaagagcagagttggttgcagtcattacagtgttacaagattttgaccaacctatcaatattatatcagattctgcatatgtagtacaggctacaagggatgttgagacagctctaattaaatatagcatggatgatcagttaaaccagctattcaatttattacaacaaactgtaagaaaaagaaatttcccattttatattactcatattcgagcacacactaatttaccagggcctttgactaaagcaaatgaacaagctgacttactggtatcatctgcactcataaaagcacaagaacttcatgctttgactcatgtaaatgcagcaggattaaaaaacaaatttgatgtcacatggaaacaggcaaaagatattgtacaacattgcacccagtgtcaagtcttacacctgcccactcaagaggcaggagttaatcccagaggtctgtgtcacgcatgtaccttcatttggaagattatcatatgttcatgtaacagttgatacttattcacatttcatatgggcaacttgccaaacaggagaaagtacttcccatgttaaaaaacatttattgtcttgttttgctgtaatgggagttccagaaaaaatcaaaactgacaatggaccaggatattgtagtaaagctttccaaaaattcttaagtcagtggaaaatttcacatacaacaggaattccttataattcccaaggacaggccatagttgaaagaactaatagaacactcaaaactcaattagttaaacaaaaagaagggggagacagtaaggagtgtaccactcctcagatgcaacttaatctagcactctatactttaaattttttaaacatttatagaaatcagactactacttctgcagaacaacatcttactggtaaaaagaacagcccacatgaaggaaaactaatttggtggaaagataataaaaataagacatgggaaatagggaaggtgataacgtgggggagaggttttgcttgtgtttcaccaggagaaaatcagcttcctgtttggatacccactagacctttgaagttctacaatgaacccatcagagatgcaaagaaaagcacctccgcggagacggagacaccgcaatcgagcaccgttgactcacaagatgaacaaaatggtgacgtcagaagaacagatgaagttgccatccaccaagaaggcagagccgccgacttgggcacaactaaagaagctgacgcagttagctacaaaatatctagagaacac

SEQ ID NO: 36566 - DNA, 2300 bp, Homo sapien
cagaaagtcagtatggatatccaggaatgcccccagcaccacagggcagggcgccataccctcagccgcccactaggagacttaatcctacggcaccacctagtagacagggtagtgaattacatgaaattattgataaatcaagaaaggaaggagatactgaggcatggcaattcccagtaacgttagaaccgatgccacctggagaaggagcccaagagggagagcctcccacagttgaggccagatacaagtctttttcgataaaaatactaaaagatatgaaagagggagtaaaacagtatggacccaactccccttatatgaggacattattagattccattgctcatggacatagactcattccttatgattgggagattctggcaaaatcgtctctctcaccctctcaatttttacaatttaagacttggtggattgatggggtacaagaacaggtccgaagaaatagggctgccaatcctccagttaacatagatgcagatcaactattaggaataggtcaaaattggagtactattagtcaacaagcattaatgcaaaatgaggccattgagcaagttagagctatctgccttagagcctgggaaaaaatccaagacccaggaagtacctgcccctcatttaatacagtaagacaaggttcaaaagagccctatcctgattttgtggcaaggctccaagatgttgctcaaaagtcaattgccgatgaaaaagcccgtaaggtcatagtggagttgatggcatatgaaaacgccaatcctgagtgtcaatcagccattaagccattaaaaggaaaggttcctgcaggatcagatgtaatctcagaatatgtaaaagcctgtgatggaatcggaggagctatgcataaagctatgcttatggctcaagcaataacaggagttgttttaggaggacaagttagaacatttggaggaaaatgttataattgtggtcaaattggtcacttaaaaaagaattgcccagtcttaaacaaacagaatataactattcaagcaactacaacaggtagagagccacctgacttatgtccaagatgtaaaaaaggaaaacattgggctagtcaatgtcgttctaaatttgataaaaatgggcaaccattgtcgggaaacgagcaaaggggccagcctcaggccccacaacaaactggggcattcccaattcagccatttgttcctcagggttttcagggacaacaacccccactgtcccaagtgtttcagggaataagccagttaccacaatacaacaattgtcccccgccacaagtggcagtgcagcagtagatttatgtactatacaagcagtctctctgcttccaggggagcccccacaaaaaatccctacaggggtatatggccccctgcctgaggggactgtaggactaatcttgggaagatcaagtctaaatctaaaaggagttcaaattcatactagtgtggttgattcagactataaaggcgaaattcagttggttattagctcttcagttccttggagtgccagtccaggagacaggattgctcaattattactcctgccatatattaagggtggaaatagtgaaataaaaagaataggagggcttggaagcactgatccaacaggaaaggctgcatattgggcaagtcaggtctcagagaacagacctgtgtgtaaggccattattcaaggaaaacagtttgaagggttggtagacactggagcagatgtctctatcattgctttaaatcagtggccaaaaaattggcctaaacaaaaggctgttacaggacttgtcggcataggcacagcctcagaagtgtatcaaagtatggagattttacattgcttagggccagataatcaagaaagtactgttcagccaatgattacttcaattcctcttaatctgtggggtcgagatttattacaacaatggggtgcggaaatcaccatgcccgctccattatatagccccacgagtcaaaaaatcatgaccaagaggggatatataccaggaaagggactagggaaaaatgaagatggcattaaaattccatttgaggctaaaataaatcaaaaaagagaaggaatagggtatcctttttaggggcggccactatagagcctcctaaacccataccattaacttggaaaacagaaaaaccggtgtgggtaaatcagtggccgctaccaaaacaaaaactggaggctttacatttattagcaaatgaacagttagaaaagggtcatattgagccttcgttctcacc

SEQ ID NO: 36567 - DNA, 2300 bp, Homo sapien
tgtaatacatttaagtacctattaattattttggctattttagaacatcttcattattgtattgaaaaatatttttttaactttcagttacctatataatcatccaaccaataaacatctatctaaattgaatgtttactatatcacacctgaacaagcacaacaagtctgcaattttaattcaccttccaattctttcacctttcaccttcactctctcaaccacattcgtcttactaggtactgtgcaacttataaatcttacaattacagtctctgcctgtatgtgggcattgattagtctgatagagagtcaagcatgtttttctctaactaatgtacatctgttacgatcaaagagacagagatttcaatcaggaaactcctgcgaggatgctccaagtctgagctgcttctccaggggtaaggccttactgtgaccagaacattttttaaagtgggccttatataggcttatggtttatggattctggtttcaagatttcatttaatgtttttacatctgacacatcaaaacctgtccatgaaatgtaggctttgtttaaaagctatcaaaaacttcactgtgaaagaccagaatcaaataatttattttctaaaaccttactgacaatcacagataccaaagaaattgctttctatgaaacagaggacaagaaagcacaaacttcagaaaatcacagtgattactatattttgctagtattacatgaaatatgatcacagtgggcaatactgtcttccaacaccttcttcttatttattttggaatcaatagttcagactgtccctggtaaatgctaaacatatatcttcaaataacttagcctttgccaaggaaataatctcatagtcctaggatacataaaacattcataaaatcccctttaatcttcacttctgaggacaaatgatagtgtttctccaaagcgctgaagattataatataggccataatatgcatcagtcatcctactagtgcctttcaaggtcttgatgcatttacctccttttcccccagggtgccaggaatacccataaattctgttgatccaagtaggtggactctgttctgaccttcactaaccctggagggtccagaatcaccactcacatctgagagaccctctcccgtttttgtggaggtatcaccccaagagaaatctaacaatggatcttgcaggtaccaaaaaaaattgtaattgttggcttattaaacacatgtcccccttccctcccaagagtatctttagtccttataaagaacaaagtaattaaatagcatatacatacatcattgttggataaaacgttatttatttaaagcaccaatttcaaaatcttgaatcccttttgagcactcctttttattctctcctacagctagtcagttattaaataagcttatttttgtctgttacaaaatgcaccacactgaaatctttaccctttagccttgctagcatcctagtccattctcttctcatcatgcttagaatacacctatcttctcctagcagattttcctgttttagttccttcctctctcctacatcccacacacaactggtgtagattttacaccaggcctattacacggtcctttaatgtctcccctctgtttaatgtcttagggcaaacctcataagaacaatcatattttgtgccctggacatactaaatccaaacctcaggatgttcttcccttcctgggttgtagaaacccctgcttattgatgctctacgcttccttgttcacatgctgtctcttctctgaaaatccctaaccacatgcccgcagttttctttccattaatattctatgacactcactgccagtctcaggtgtttggatcttccacatatatatgctgtggggaaaagcaagagagatcagattgttactgtgtctgtgtagaaagaagtagacataggagactccattttgttatgtactaagaaaaattcttctgccttgagattctgtgaccttacccccaaccccgtgctctctgaaatgtgtgctgtgtcaactcagagttaaatggattaagggcggtgcaggatgtgctttgttaaacagatgcttgaaggcagcatgctccttaagagtcatcaccactccctaatctcaagtacccagggacacaaaaactgcggaaggccgcagggacctctgcctaggaaagccaggtattgtccaaggtttctccccatgtgatagtctgaaatatggcctcgtgggaagggaaagacctgaccgtcccccagcctgacac

SEQ ID NO: 36568 - DNA, 2300 bp, Homo sapien
cccacggaaaaggactaggaaaagataaatacggccaatcagaacttttagaattaaaaggacaaacagatcagaccagattggggtgtcatttttaggagtggccattgttgagcctccagctcccattcctcttgtttggctaactgccaaaccagtttgggtagaccactggccgctgaaacaggaaaaactgaggctttaaaagagttggtgcaggaacaattataaaagggtcatatagaacatactttctccccttggaatcctcctgtatttgtcaataagaaaaaatcagggaaattgagaatgttaacagatttaagggctgttaatactgtaattcaacccacggtgcagcggaacaatgcctgacaggaaggaaggaaggtaaaaggggctggacaggatatgtggtggagggatgcacatgcagggagctgggaaaaaggaaaaaggaaagataattatttggggaagaggatttgcttgtgtctctccagttgacaatcagctgccagtgtgggtgcccaccaaacatctgaagatttatcatgagccacagcatctaggggaccacctgtacagtgcaaactgaaggtctgaaaagcctctatttgctttccctgtgccttgtgttacaaggggcctgttcctcattatcagtggcctcccggctacagccacaaaagtttttgcttctgtttcagatttactaaggtgggggtgagggtatgcttgtgtttttgcaggatatgaatgaaccctgtggatgccctcaagatgtgtacgaccatggaacgggagactggagggacccatggatcccaaccatggaccgggttcccccagtacaagacagttgaatctgaatgcaaagatggaacgaagaccaactagagtcacaatgcttaaagaaccaatgctttctgactcagctcctctctaccctgaatacaagagagcctaatagttaggcaggaatatcatcacccctattcagcatgaaggaattacataagatggaccttcatccttctgcaacccctaggattaagggtcctctcgtaaaaggaaaaggagagatatgtgtgaagcattcaaaccagagtgactccagtttgaataagggctaagaaaaatgaagctggatcaccaaccagcaattagggctgcacagcctgcaattgccttgctcaattaaaagaggccaccttttatgttagtaataatgatagctagtaataatgatagtaataataccttctcttttacaaaaaagagaagggggcatgttgggaaaaagctgagtgttgggaaaaaaaactgaggcagggcttgcatgtctgacataatggcctctggaatgtgtctagacttgctggctccttgcttctagccctcctaggctcctagatcgattgtattcccattatctcaagtaccagaacatgttccatataaatactaaaccgtcacagctgtagatcatgtgcctgcccttttgacccccacattctcatcacctgcttctttgttggattaccaataaatagcatgggctcccagagctcagggccttcgcagcctccacaattgcgatggccccctggtcccactttatttctcaaattatctttttctcaatcctttggctccaccagacttcgtcgcccccatgacctggtgttgggtctgatcaccccaacaatgcaccaccacgcctggccaatttttgtatttttagtagtgtggggaaaagcaagagagatcagattgttactgtgtctgtgtagaaagaagtagacataggagactccattttgttatgtactaagaaaaattcttctgccttgagattctgttaatctataaccttacccccaaccccgtgctctctgaaacgtgtgctgtgtcaactcagagttaaatggattaagggcggtgcaagatgtgctttgttaaacagatgcttgagggcagcatgctccttaagagtcatcaccactccctaatctcaagtacccagggacacaaaaactgcggaaggccgcagggacctctgcctaggaaagccaggtattgtccaaggtttctccccatgtgatagtctgaaatatggcctcgtgggaagggaaagacctgaccgtcccccagcccgacacccgtaaagggtctgtgctgaggaggattagtaaaagaggaaggaatgcctcttgcagttgagacaagaggaaggcatctgtctcctgcctgtccctgggcaatggaatgtctcggtataaaacccgattgtatgc

SEQ ID NO: 36569 - DNA, 2300 bp, Homo sapien
ctttatacataataaacattaacaaacatttttccccatttatttgcccccccacctttgtttttattttgctttatataactgattttttttagtatagtccaatttttcaaacttttccttcatggttgctgcacatgaaattatgattaaggccagccttcccatcccccagaatatttatatttacatataggttcttccaattatttttctttttggtctcatctgaattattttcaatgtatgatataagatacaaattctttaaaaatatagcttacaatgggccaggcaccgtggctcatgcctgtaatcccagcacttcgggaggccgaggtggacggatcacgaggtcaggagatcgagaccatcctggctaacacggtgaaaccccatctctactaaaaatacaaaaaaattagccgggcgtggtggcgggcacatgtagtcccagctactcgggagctgaggcaggagaatggcgtgaacccgggaggcggagcttgcagtgagcccagatcgcaccactgcactccagccagaatgacagagcgagactccgcctcaaaaaaaaaaaaatatatatatatataaaatatactatagctatatagctatagtatattatatatatagcttacaattatccctgtaccatgtaatcattttccactgatatgaaatcttttatcgtatactaaatacttacactttaactcctgttgctttttgtttatgacattcactcattcaataatttattttggaggctatattcttccgcatttatcgtaagggaaaaagaatttttcaccaagtttaagaaacattattttgggtgtcttaaataataaaagactatgacggaaagttcttaacgttagtttttaaattaaaattgttttcagctaacaataaacaagatggatatacacaaaattatgttaatctagtgatgagcctaattaaaggaggggggtaccattgatttagttgaattatactaatcgaaaagaacagaaaaaacgatggtgaagaaactacaagaggactgtcagcttttcagggtccttttaaaagaacagttcttgtccttctagaactagttattcaaaattcttttttcccccctcgattctcttgataaaattcagatagtaaagacgtataagtcagtggggctatttttacaaagatcattgcttagtgctaggaagagaatccagaagacgggaagttgagggttgtgttctaaaagttctctgaagaaaagggtacagagaagctccaagttgtgcaggcccagcaaactccatgttggacgtgctttgctaccacctaaatctcttctgtcggaattcaaggcccgaaccattccagggattttagaaaaaaatggggagacacaaaaatgatgccaaagccatagctatcattacaaacatccattatgttcactctgctttccatatgcaacgcactctacatacaatgggcgccttataagcacatagcaaatgtgaaaaatattatcaacattgctttgataatattaatatattatatatattagaatatattatatattagaatatattatatatattagaatatattatatattactaatataaaaaatattatcaaccctgctttagagaagatgatactgagatatgaagaatcataaactgtccaagatcacaggggcaaaaagttcacctcaactgaaacctctcacgaaccacaaaaatgtggccgagggagcctcaaaaagcagtaccccaagcggggacggtaaagtcagaaaagacaaggctgggggtaatcacagagaaatctaaaaacccgctcggcctcgctactcttctccttcctctgaggtgcagaggcgcggtgggacgacaaggagttgcgagaaagggcagagctcactgaggaggcaacagagaaagtccgctaacaatttttgaaggccgtaagttaaacatgttaaaaactgtagctactcactcagccgacatctagtaaaaaagatgcggcaagatcaacaaggcatatagcttgcgcccgccagaagttccgcggcctccacacccatcccggcatactttgcgccgtgcacaggcaagccctggtgcgcattggccccttcggccgccgtcggccggtagttactatggaaacccagctgccatcgctatgtctctgcaaaagacccctccgacccgagtgttcgtggaactggttccctgggctgaccggagccgggagaacaacctggcctcagggagaga

SEQ ID NO: 36570 - DNA, 2300 bp, Homo sapien
cataaaataaaaagagctcacaggtctctaatatataaaacaacataagctgggcatggtggctcatgcctgtaatgccaacactttgggaggccaaggcaggtggatcacttgaggccaggagttcgagaccagcctggccaacatggcaaaacccaatctctagtaaaaatacaaaaattaggtgggcatggtggcacagtcctgtaatcccagctactagggtgactgaggcaggaaaatctcttgaatccgggaggcgaaggtttcagtgagccgagatggtgccactgcactccagcttgggtgacagagactctgtctcaaataagtagtaagtaaataaattaactaagtccaacttagagtaatcaagattcagtgttcaaggcaagacataagaaagacagtaacctcccaattatctctgctaatggatgaaagcagtcaggtagataatttgttcaggagataatacaaaatatcatttatattttcagaatgaattatgggtcttcacaaagtctgtattcattttaaactttagaattctgagctgtaagatttataaacatcacttccctgcttaaagggctcctcataatccaaactcctttgcttaaaagatggagcctgagccgggcgtggtggctcacgcctgtaatcccatcactttgggaggccgaggagggcagatcacctgaggtgaggagttcaagaccagcctgaccaacatggtgaaatctcgtctctactaaaaataccaaaattagccaagcatggtggtgcatgcctgtaatcccagttacttgtgaggctgaggcaggagaattgcttgaacccaggaggcggaggttgcagtcagctgagttcgtgccattgcactccagcctgggcaacaagagtgaaactccgtcccaaaaaaaaaaaaaaaaaaaaaaaaaaaaaaagatggagcctgactatcctcatctcctatcatatcttcctcccctctattgtatttttctttaagaattagcccaagtctgagctatggaagtgagacactgtctcaaaaaaaaaaagaaaagaaaagaatcagcccaaattcaccttcttggcattcctttcctaatataacactaatccctgccatgcaacacttcactccctatacttgtaataaaaacttatcctgtatcataattcttaatttacttgtttctcctccatattctaaacttctccagagccaagaccatttgttctttttttgcctgtatgagttatggtccatacacttcacataatgtgtactcagaaaatgccttctgaatgaataatagaaaaaaaatgaaacaataagtgaacaaattattcagctatggtatagatcatagatttatgaacttgtgtgaaggtataatccttacttctagcgtggttttcattgaaaagtgttttaaagttctaagcaatatttactcattcaaccaacaaacattaagcctttcttttcattgttcatttttgtttttggtttttgtttttttttgagatggagtttcgcttttgtcgcccaggctggagtacaatggaggcagtctaggctcactgcaacctccgcctcccaggttcaagcaattctcctgcctcagcctcccaagtagctgggattacaggcgcctgccaccacgcctggtaatttttgtatgtttagtagagatggggtttcactgtgttggccaggctggtctcgaactcctgactgatcccccacctcaacctcccaaaatgctgggattacaggcgtgagccactgcgcctggcccattgttcatttttaaacaatactttatattgtcttagtttgtttggtctgctgtaatgaaaaaccatagcctgggtagcttataaacaacagaaatgtgtatcttacagttctggaatctgggcatccaagatcaaggagccagtagatttggtatatagtgaatgctaccaagaattaccctgatatctctgcttcccctttattttcttctctctccaactgtaggcataaaatgacctcacaatgtctggtcctccctcacaaaagtgtttcggtcactcaggatgcatatctaagttctagtgcaagagaggactaggagtaaatgctgaagggagtgtttaacccctttaacccattgcagtatgagcaagactactgtaagattcctttaacacagtgcaaccaaaagacagacaccttttctcctttttgcttcacaacagaccacctcagccaccatgacacccagtaggaggtattc

SEQ ID NO: 36571 - DNA, 2300 bp, Homo sapien
ccatggaggacagccatcaaaacttgtgaagaggggacctggaaggaaacctaaagtagaagttaataccaatagtggtgaaattatacacaagaaaaggggtagaaagcccaaaaagctacagtatgcaaagccagaagatttagagcaaaataatgtgcatcccatcagagatgaagtacttccttcttcaacatgcaattttctttctgaaactaataatgtaaaggaagatttgttacagaaaaagaatcgtggaggtaggaagcccaaaaggaagatgaagacacaaaaattagatgcagatctcctagtccctgcaagtgtcaaagtgttaaggagaagtaaccgaaaaaagatagatgatcctatagatgaggaagaagagtttgaagaactcaaaggctctgaaccccacatgagaactagaaatcaaggtcgaaggacagctttctataatgaggatgactctgaagaggagcaaaggcagctgttgttcgaagacacctctttaacttttggaacttctagtagaggacgagtccgaaagttgactgaaaaagcaaaagctaatttaattggttggtaacttgtaccaaaatattttacttcaaaatctataaagcaggtacagttaaggaataagtagaactaaggcttctgcttccttgctgctgtggtggagtagggaatgttatgatttgatttgcaaaaaaaaaaaaaaaaaaaaaaacaaacttacgagacacttcacttctttaaatgaatatatatatatatatataaatatatacatatatattttaaatgtttgctatttattgcccttagataggttatgcattttcacattcatttcattcactgtttgaaacgaaagaaattgatctataatgaattcctgatttatttatagaaaagacaattctgctacactctttaggagcataatattcctagtgatagagcatttcatgttaaaatgaattatttttgaccaagtgaggtacatttctattgatacaagtcatgcccctaaaagatagatgttatacagagtagcagtgaattaagaaatgtttcctctaaaagataaatataaaatttccaccatttgataccctaaacagtttaattttaattatagaatgttcatctacaaagtatctagaggaggcttttgctttattccatttctgccaaacaagagaaaatgtactgatgaagggaaacatatccacattggaaaacatttgactgtctaatttttcagaccttgattcttatatcactcaatctctgtttattgtgccaaagactgagaatcagtgcagtggaaagcctgtttttgacgtcaggacagcatacacttttcaatattggaaaggctatatattctaaagagcaagttattaaagagttatgctgagatatatctttttttggtactaatagaaaataatgcactggtgggtcctttgacagagatgttctagaggaaatgtttaagtggttaaaggattcaaggaaaatacaggaaaaaaggtatgggatttgatgtttacttgttgatctggattaatgtcatttctaaactttagacatatctaatagcctaaaatgacttacaaagaaacgtgtctgtgtgtgtatgtgtatatattgataaatgggtataattaaatatatatacaaacacatacttatatactattacccaggtataaattcttttttcaggattttttagatagcagtagaataaaaataattttaaaatgtcatactttatagtttaattttaagggggaaattggttattttcaattattaaaggttaaaataggccaaatcactttttatgcaatcatgttttatacagtggtctcattgcacattgtgttttttctgcactttttacggtatccttatcatgctggtatgtcaatatacaccctaaagaaaaactccatttaatgattgtgccttgtattctattattttttgcatcattagtaaaattaagttgtctattgtaaatgataactatatgacttaggagaatgtattgctatatgtactgctatggaaaaggaaagcagttatttatttgtttatggtacagttagttattttataccttaaaaaccaacatacttaccatttctattgtttaaaaattactgtccatttttttaaaaatttaaagaatgtagtattttctgaggactggtatggtacaaaaatgtaatcaaaattttcagatactacatttttaaaaagtgaggatggggaaaata

SEQ ID NO: 36572 - DNA, 2300 bp, Homo sapien
tggaataaagaaaactaatatattagactttagtttctaaagatttttctgatcttcttaggtgtacttgctgttgcttccttgatatttgtcaaaaagcgtagagataaggagaagtcctccctgctatgtggttcccaaccatcccaccctcaaagcattcttcaagtctttttcaatatcaggtgttggaagtttaagagaaaaaaaaaaaaaaaaggaattcctaactatattcctctttctcccttgaccccttaaattgctaaagattggaaattaaacctagtgcttcagagatgaaacaagacatgggtggatgagaaggaaagaactatttgtatacatacactaattgttggactgcaactagaaatataagctgctgatgtcttccaatattgttgtaaatatctcacatattgctcaacatgataattgctaaagtatactatacataaggtttgacttacaatggtttgacttagatttttcagctttacagtgatatgaaagggatatgaattcagtagaaaccatacttcaaattttgaattttcatctttttctgggcttgtgatgtactctttcatgatgctgagcgatgtcagtgagctacagctcccagtagctcccagtcagccacgtgatcatgaggttaaaccaatactgtacagtgtattgtacagttgattgccatatgatgttgcccaaccataggctaatgtcagtgttctgagcacatttgaggtaggcttggctgaggtaaaatatttgctaggttaagtatatcgcatgcatttttgacttaatggtattttgaatttacagtgggtttatcaggatgtaacaccatcgttagttgaggaacatctgtatttcaagatacattatattttaaataggcttttggcattaccctagttttgtagccaatttaggaaaaaaacatttgaaagacaatacttacatgaattagaaattgcctgttttccaacctgataataaactctgttataaacctaagttatgttcttattcaatacaatgatgacttcaatgtattacattcaatacaatgtaagtaggtttttgcttcttccttcactcattggtgttagacttcttacagtttgtttttctttcgtgaaacttctagttcaatctcttgttaaactattactgtcagtttgccctgctggtattaatctaatactttattttacacacagttttctatatgatacactgaagatatctgtgattctgttatcagaatgagccttgtgaatctatttgaaatgcacagtttttctttatgtttctatgtccacaattagatacagtgttattccatatgattgtatttctgttcacaatcagtaagattttctaagtgttttctttattattttaagtcaggccacatattagataatattctcaaaagttgtccttggatttttatttactttcagaaataaaattgtaaaactccagattttattttagcattgtcaattaagtgttcagaaaataattctcatttagttaggtttcttggtaaactagcatgctatatttttatgattttgtatctcataaggtggctgtcagttaacttctcatttgtatatgtcatttgattaccagtaagataattagattaaaattacttgtttcctttttgttcagaagtgagggttctttattaccaaaaaatgacagcacacatgacaaaaatacataaagccaaaacttaaaactctcccctttctactctcctgccactccccatatagacgttctccctcccaaaaagaggcctttgttaatatggtgtgttccattccagacatcttgtatgcaaatacgtagttatggttgcccctctttttttcccctaacacaaatgcagttatgctgctttgaaaatgactttataagaccaatggtttttacagttggtttagactgaagttgaaaagttggaatgtcttggttttaaatgatgtacacatatttctaaatataaggaagttaaaacttctatattttgtttttttaaggcgggtttcttccctaatgtgggaagttcgatatatagagcataatacacgaacatttaatgagcctggaagccctattgtgaaatctgctaaattcgtgactgatcttcttctacattttataaagtaagttatcttttcatatgtaattatgatagttttaataattaatggcactacagttcctcttaaaatagaaaacatactgtttgtaaagaagaaacatttaag

SEQ ID NO: 36573 - DNA, 2300 bp, Homo sapien
gctatcagcctttggtacatctgattgtttaaatttttcacatacattacttgatatgataaattgtattttattttatttttgagatggagtctcgctctgtcacccaggctggagtgcagtgccgtgatcttggctcactgcaagttccacctcccaggttcacaccattctacctcagcctcccgattagctgggactacaggctcctgccaccacgcctggctaattttttttttgtatttttagtagagacagggtttcaccgcgttagccaggatggtcttgatctcctgaccttgtgatccgcccgcctcagcctcccaaagtgctaggattacaggcatgagccaccgcgcccggccgataaattttattttttaaggagttgcatttgccaataaattgcggaacaaataatagagatcaaagtgcagcaatattccagaagtgagctcataaccttggcaaagtaatgtggctaacattggacaaatcacagagaattaaaatgaatgagcatcataattttctcatttggatcttacaattttattctaatttatgggttaatatttctctaaagttagtatctaattaatcttttatatctgaggatatatgcattcacccaccgactgccatttaaaattacattagtaatttttacttcagcccctcctcggaaatgtattaaggcttactctcaatggtggacttcagtagtagtccaggttctttgcttaactttcttgttattctacagatattgttcgttatgattaggcacacattactcagtccttcctctttagcataataatcagtctgtgtagggtcataagatacagctctttgaaactttatgtttagtgtgaggtagtggtggtgtcaagaatgcttcttattaaactatatagtagctttttgttaagtgtcactagtatgcatctgaggaacaactgtcaacagcatgcagttgtgttctattaacttttctcctggctccaattttcttttttatcatattcttttaccttgtttttctaatttttaattcatttcatgctatatgtttttataaacttttaaatcctttttggtaagaaaatgagaacataactacttttctctttgagtttaaaaataaaactgattcagattaattgctaacttaattcattttaacttaactgtgtgtcaaaatgtggagtgctttaatagaactcattagtcaaaaactaccaggaggtagacatcaccatttctattttatagacaaggaaaatgaagttcaaaaataattaatatattcaaagttatacagatacgttatttgaacccaagtctttcaggctctagcctatgctagccacgagaaaactcaagtactgtgatagctgaggaacaggaaaacattgcataaaggaagtaagtgacttacagttttcttatgacacagaaggaacatgagaatatttagataagaaaaagccatagcatttatagcttgttcaggtctttgggaaaaagcaggttaagtaatacgacgacagcaattggataaggaaatagacacaaggagtgtcctctgttttaaaaagaatagttgttttatttttgtttcttttttgtttccttttacaggaaagggagagtgagtgagtattaagggtgattgagatgaaggaagacaggttggattttatgttgtttgttgtttttagcgtggagtcttgattgattgttggttggggaaacttgcttacagaaagtaagaaattaaaagactaagtaattgttgagtggaacttgccgcaattataattttatttcagtgaaaagtttgggtatagtgttaatgatgaatttcaaatgctagattggtaaaaatgcctaaaacaagtgaatttctgtataccttaatgaaatataaaaaatagaattgaaaactgttaagtcacacttcaagtatgcttactaaattccttttttctcttggtattgctgattgtacttacttatttttggagtttgtggttcactttttgtcttctgaaatcatacaggcagtttaggtacttaaaggttaacgttaggaaaaagcagtgacagcagccatgcatttcagaatgatgagttagtttttgttcttggccaggtgaccgcttcaggtctgtcatagatgatgcctggtggtttggaacaatcgaaagccaggaacctcttcaacttgagtaccctgatagtctgtttcaatgctacaatgtttggtaaggaaatatttgttgtattttagt

SEQ ID NO: 36574 - DNA, 2300 bp, Homo sapien
tcaggggtcagggacccacttgaggaggcagtctgcccgttctcatatctccagctgcgtactgggagaaccactgctctcttcaaagctgtcagacagggacatttaagtctgcagaggttactgctgtctttttgtttgtctgtgccctgcccccagaggtggagcctacagaggcaggcaggcctccttgagctgtggtgggctccacccagttcgagcttcccggctgctttgtttacctaagcaagcctgggcaatggtgggcgcccctcccccagcctcgctgccgccttgcagtttgacctcagactgctgtgctagcaatcagcgagactccgtggggtaggaccctccgagccaggtgcgggatataatttcgtggtgcgccgttttttaagcccattggaaaagcgcagtattcgggtgggagtgacccgattttccaggtgccgtccgtcacccctttctttgattaggaaagggaactccctgactccctgtgcttcctgagtgaggcaatgcctcaccctacttcggctcgcacacggtgcgcgcacccactgacctgcgcccactgtctggcactccctagtgagatgaacccgttacctcagatggaaatgcagaaatcacccgtcttctgcatcgttcaggctgggagctgtagaccggagctgttcctattcggccatcttggcccctccccgcaataatggtattaatgaatagaatgaaagtatgggatagtggctatcccaaaatgttactaaaaacttagcattttaaaacacgttcttctactagtgggtgtcagactgctgtgttcaagtactagttctccaagacagtagtcaggagtcacttaaatttgatcttcatgaaatgtggataaatgtatgccctgctgtcttaccaggatttgtgtaaggattaaaatatatgtgaaagtacatttttcatttcaatgttttctgcatatgtacaaactacttgctaaaaaagttaacaacaaaagtggacaataaacttattagtcaacgttattatgcaacatagattaacttattttgattttaagaataaaatggtgaaaccagaaaataacttttcatcttaacttataagtgtgtattcaaagtaatgttatttagaacactttggttatgatttagtgatgttaagacaacttgagagaaaggaggagggagaaaatattagaatttctattagctgaaaaggcattagattttctctttgcaatttcagctgataccctgtatattggattaaaggaaacacatccaggttgtaagattatgactttattttttaggtttattatttccgacaaggacatgaagcctatgtcgaaatggcccggaaaaataaaatatatagtatcaatcccaaaaaacaaccatggcataaaatggagctacgggtatgacattgatttattatttaatagccccaaaaatacaattatggaatttggagaaaattgtatcaaaggttactattaacacaataagaaactgcatcatgaagataccttgtttaattgaagcagtcctagagagtaggaggtgtttaattttcatccagagaaacacaagatttgactgaatttatatactccaatgcagtttatgggttgggtacaaaatttagttatagtgaaaattaggtaataagtctaaagtaagctttgtattcgtaaatttgatgcgtatttctagatttgtcatcagtagttcagttaccaataggtctttggaatggtgatagaaaacttactttagtaactatactttagtaaagttctccttatttttttttccttttttacgttttaaaaatttcattgtaacttgcatactataaagtgcacaaatcttaatacagagctcagtgaatttttacatgtacacagtcatcaccatccagatcaagatttaaaccaagaagttttttctcaacaatgtttagcagtctattttgtggtttattttgtaaagatggttccttatattctctgtctctctcaggaacaagaacttatgaaaatagttggcataaagtatgaagtgggattacctaccctttgctgccttaaacttgcttttctagatcctgatactggtaaactgactggcggatcatttaccatgaagtaaggactgttgaaagaggcaatggttttcttagtattgtagattgtttttcaagattcagatacatttgaacatcttttaggtatttttaggtatgtgacctaatcaatttgtttctgtttg

SEQ ID NO: 36575 - DNA, 2300 bp, Homo sapien
agcaatgcaagcctcctgagttaactatcttatatagtggaatttatggaatactaatgataagaggaataagctctcctttttcttgttatgcctaccttatttgaccagaccagtgaggattccttcaactccttatactggcgattcacattgttgcagagcttatgaccttggctaactttgcaaggtcttaatagcaaaaagagagtatagcctttggggatggcaattatgattagctgctacacttatcccccaccttagtggctcttaaaatagacgagacaaagtatgaagtagaggctgtaagagttcctcagttgtacaatcaagggctctcctattcccacagtagtgatttctggtaatgatgtgcaaatgtgtgtggttatatctagtagttttctgtattcaaaacaggtcaatgaaggaaaaattgaatttcttttggctcgacagcagaatcagagtatttcaaaccctgagatgacataggagttcctgtattaaaagagtagtggtggttttagcagttgaggacggttgtaaagaatgctggactctggagtttgtaattatgtttatgctgacagcagaagatcttctgtaagagccaagtactccagagagtgataactgtgtgatttggcaggtaccatttacagtggccatggctggagctagtataaataaaatgctcataagttgaagacaacctattttagaatagcatagctgaaaatagtgtaagttcttaaaaatcattttaaatttcatagtgaaatcactaaatcatgctagagaacatcttaattatttgattcttatctgggatgattaggataatcagagatttaggtacgtgcttataaagaacatttggacagtggagaggggtagtggggagggttagtgacaatggaataaagctccagaaaaatctgctttttcagtgttaatgttaacagcagtatttttagaggcatgaggtcatatatcattaaatctgggaaagctaattattgcttttaacatagtataacttaggttcctttaagacatttatgttcataaaattgtacaaaataagtaaatatgctcacatactaaaattaatatagaagataatacaactagattctttattttgcaacatgattggttcagtaaatcgtttgtcaatgaaggtaaactaaaaagaaatgacaaacatgattggaagcagtatacaaaatatagtaaggcctgtatttttctgaatcatggcatgctttgaagcataagatacacctaacgtgtagggtgtaggtaggtagaataattttatctaaatgaaattttgttactttacatgcagagtaaagtttgcaaacacagtctttcccctgggtaggaacacttctgactctgccagttcaatatccagctaccctgagagcactagtactggaccataagagttcccctgtctggaactcccacctccccttaaaaaaggaatccccatatctccttaatgttgacaccttctgtgctctccagggttatctttttgctgtcaatagaactgagaaaagtgaccccctcttatttttatatgctcacagaatttgtaacatatgcaacactcagaagtcagtatttttcttaaaatcttggaaggtacttaaatttgttttttcacttaaagttgtgactttatgtatcttcaggttttgggggagtttttttgcgatatttaagtaaagcctatagaatttcaagaaacttttgaagatgagttgaaaattagggaagtttttttgtagtttaagtatttgttctgtcatttctctttattataatctttcttttcgtttttataaaacaagtcttaaaattttatcttgtgtgttatctaataatcccttctctccttctagtgactactccagtgattactctgactggacagcagatgcaggaattaatctgcagccaccaaagaaagttcctaagaataaaaccaagaaagcagaaagcagttcagatgaagaagaagaatctgaaaaacagaagcaaaaacagattaaaaaggaaaagaaaaaagtaaatgaagaaaaagatggaccaatatcaccaaagaaaaagaagcccaaagaaagaaaacaaaaggtttggtttttaacattacaaatttggtgttttctagagaaacagtttaaagcacacatcttgaagtacaattgatcacaaacattgttgaagtgtatcagcaaataataatagaaaaaactcagaaatacacagtagtaaaa

SEQ ID NO: 36576 - DNA, 2300 bp, Homo sapien
ttgaaggtattctatagttaagtaaaataaatttgattcatatttgtacatctttatcagttaattcgctacatattgttcttatttgcactttaaaaagtgattgtatagcagtgctaagattccaattcagatttgtgtttatgcagcagcattttgaatggatgttagggtatttttaaacaagttataaaaaaaatctggttatttgtagtaaattgataagaaaattaaatgaaacatgagtagatccaaatagtgtctaatacctgttcctcctacctttattttcagttttactttttccgctcattttataattgtggataggagtattacctgagataagggatagcaaactaatgaagtgagtctgtctttgccatactaatatccaaacatgttcattttctaacttctagatgttcagtgccactgccatggattcagtattccttgtagtagtcatacaaatataggcatcatacatgcatccagaatactctgaatttttactcctttttcaaggacaatttgatttttttaaggggttagtgggtagatcatttagcaaaagtacttaaatattttattatatacaggtattgttttcaatactgtggaagagtgttactcttgagtacactgcatatacaaataactgtaatgcaaggtagaatgaatatgctacaaaacaaagtcttaggggagttctgaagagagcagcctcatttaattgcaaagtttgtaaagaaaagttactgagggagttgggccttaaaagtttgataagattttgacacatgggaaatgagacaacagaaaaatttcagcagaattgcgagagaaatattttctagtgaaggtgactgataattttaacatggtatggttatatattcacttagtgaaattattttttgagcaaagctttacttctataaatattgaaaaattcattctagtcagatatattcataaacttctttcttaaattccagttagatgtgttatatatttaggataaatgtgaatggttttggagtaaaatattaattcagtatatactgtaattttgcttacattttattatctaattttcagagattttgaagttatgttttacttcttaacaattgctgttattcttcataggtggaatgtttctggcgacgggaagcacagatcatattattcgggtttatttttttggatcaggtcagccagagaaaatatcagaattggagtttcatactgtaagtattggtgaaaagaattagatgagtataatttatgtgagtccaagagtttatattcagcacccacttttttgtttatttgtttatatataggacaaagttgacagtatccagttttccaacactagtaacaggtaaaatatttgtctaatttaattctaattttaaaattatgaaataaagacaattttagtcatcagattttatttgaagctgtataggaaataatcacctacctaaaagatcttgaccagttatacttaaaagtgaatatagccttcacatgcataggcacgtctttctcttatttgtaataatgttagtatacttggacacttttagtaattactgctttttaaatcaccctatatattccagatatgtttcaaaatgtagagaagcttttggtatagattgaaaatgtatcacagtataatatttaaggcagacctgtttattgatgatattgtataaattttcccatgttcttgttataaaaggaaataaagctacttctaataccttgagtagaataagtcagattctttaatattgagaagaaaatcattgttttttccttggaaaatgtcgattttatttctagggtagtacatagtgaccttgaatcacttttgaaaatgttattttgtgacctagccatgaaaattggaatgtttgcatataaaattctaaaaagcccataaagtttcagaagttattagaatgctgcataaataaagatgaatgctgtctttttaaacaagatctctgggaaaagtgcattttggtaaagcatgtatgatttttctttgggggatcggattccttttaatacaggtttgtaagtggcagtcgtgatgggacagcacgtatttggcaatttaaacgaagagagtggaagagcattttgttggatatggctactcgtccagcagggtaagaggtcaaatttgaaatattatgtatatattgattttttaaagtatgttatagtgcaggttggtgactctcagcctataaaattatatatcatgttaaaat

SEQ ID NO: 36577 - DNA, 2300 bp, Homo sapien
attacaattatttgaagaacacttttttaaaagttaagctaaaacagcatcggtcttagaagtaaatacaatttgcaaaaaggcatacaaaatttcctatcttttcagtctatcttttcaagcctaaccacctagaaataggctactttacctataattgaatagaataaagtgtctttaaagatgcaaatatgttcagtatttgagaatagctatcttaaaaaaaataagttattctgataaccaggttgcaataggacaagtcatggtaaccttccatttttaagattcagttacaaaaggcaattttatatcctattattccaaagggtttgaggctttatttcttcttcctcatatgtatgatgatttctggatgttttagtatagggcatcacactggtgcagcacacttgggcttacagtgcagcccaaggcatttgcagcaagtatttcccactaggaatgtaaggagctaggaggttacaaggcttgaggaaacaatctagaaaaccacaatacagcttgttggtcctttccccacaaataacctttttaaaccagacccataaaatgcagtttattatctaacatttttaaggagaatcttttgttaaatgttaacaaaagaacgactatccaaattccctttaaaatgcaatccttaaaaaatattgaactctcaagtctttttggaaagtgcttaaatcatctggagataaatatcatttggtgtccttgttttctaacaaatggctttttctattgtttccattaatttcacccatattcgtttttttaaaaacaaggcccttatcctcatcagcaaaacacagatgtatgatttagcatataaaatcggtaattacatactaatttacgaaagatttttttttctccttttcgtcagttttcaagaagtcttcccgtgattaactgtaaacaggaatggtttacatctcaaattagaagccattaattagcatgacgaagtcaactgcaagatacacagattatttaaattatttaatcactattcaccttggctaaactgtagtatactctttcaatatccttaggcaggttatcgatctgtcactaaattacctccagatcagttagacatgaatattagcgtcctttcctttccctcaggtttacattctcccttctcgtaaacacttaaaaaagctttaaggttctttaattccaaatacctaattagccatcactagcctttttgtaataaggaaaaagagtatctgaagtacaaatcaagagttcgctttgcccgtttaacaataaaaaacatttaaaaaacgtacgccaaaggcaatggcagtaataaaagaaatatgcagaggtggcttcagcaaataacgggtttgcaaaacgcaagtgcttaacaaaaagcagcccaaacctctattgcaatatacagcactccaataaattacacaacacttgcataggctgcagaaataacgcaggacaagacttacacagatgccaatccgcagcatttatacacatgcacatggcaagagacagaaaccaaacactatcattcaactcgggaagggtagcgcgatcccgagcttgcccagcgtgagagtgctctctgcgtgtgtgtctgtgtacgcgcgtgagtgagacccatccttggggcatttcccctctctgggcagttttgcttcatttgtttcatatttctgctacatagaaactaacttccatctcagctccagccagcgccgctgaatagagcctgtgctgcggctccgtgtgcgtcagatccctccgcggaaccgtccccggccccctccctgccactatcggcctccacagagaaagcgccttccagccaaccggcggcttgggctccgacatcttctccgactggaaataaataaataaatcgcacgccctgcggggaggagcgggtgggggtctcactgtgccgcgtgcggagcgctggggacgaggggtcggaggcactccttttttagcgccggggggcgggggcgcgggccagagccggggccgagccctgggccgcgaaggcggcggactcctttctgcggcggagggatccgcggcggaggcggccacggccgtagtcgctgcctgagagttgttgtttcctcctcctcctcctccgcctccgccgccgttgcttgaatggtggagccgaagctcggctcgtgaacacacactgacagctatagggcaggcggcggcaccgtccccgcttcccctcggcggcggggtgtcccgtcggcggccctgaagtgacccat

SEQ ID NO: 36578 - DNA, 2300 bp, Homo sapien
agaacattttaatattaattcagatgatattatagccctgaagttgcaaaactgaggcctggtcatgttaagatacaatcaggagacacacttgaatacctggtaacaaaaaatgactctgacttctttgtatatttgagtcctacccacacttttaagaccagcctaaagttaactttccttatctgtcctactgcttgtgggatctataactacacattctggaacacatacacagttttaatgttattcaactgttttgtgctgctagtcttatcacctcattgaattaaacacaagttccaagagggcaaaaactgtatgtccctacagcattacaacagggctaggattccagatgttttcattgactttatctgtaccacttcttgctctgcagaacaacttactcagatgttcattaaataacatttcttgatttctaggaaaggttgatacagggggctaagaaggcaaaaaagtactagggggacattttaaaagcttattatattgtagagcagacaattctttagtcaagaaaaatattgtgtagtatgtaaatgctttggcagttaccccagctttgaagatcttgaagagctatgcatggattgtctccagttcttttttgtatctaagcaggctttacctaatgacagtggttcctcacataagttccagtgaacttcaggattccatgaggctgctctaagacttgactgatagatggatggccatgatcgccgtgtttaatctgaggttgttcctgcccaggtaccaactgaggtcgttaggcttcaggtataaatggaaagccttcctattaatcaaggagaggttttccatcaccggagaacactctgatgtcctcaggaatgacacacaggtgcctgtacacagttttgcccctagtctcaggaccattggctagcttatgcatgggggttccctgccttccagggaaataaaactgtagctgtaattttactgttattttagttttttttttttttccttccgtctccttgagagaggcagacaggggaagtaagaataatggtttcagcagctctggcccttgaataaacagcaaggaagggttccatcgtcagggtccattatacataaagtgtgcacacctaacctactgtttatgtaaacaatggttataattcccaggaaaaaaagatggcctccagctcacttactctgtaacccgtatcttgatgattagttcctttgtctctactagaatttccaatccatcattaaccctcagtcaaaatgctgaaaatggtgacatcacttaatatcctaattctagtaaaacagggctagaaaataccttcataaaattaagtttaaataataaatctcaagtattagtgctcttaatatgccatctgtcttcttaaactgggagtacctttggatttccttaattcctcttgacccaccctttcgtaagtgagtacgaaatgggtgagaataagactttggcatctatagcatctgattaaatctttactagtagttattggttggtgagatgcaggacaatttatgtctttaagtcccagctgaatgggggtaacaccgctcaagctgttttcaggattaaatgagataatgcaagtcaaattctgcacagcgtgagggacacagtatgtgcacaacaaactctaagacttttaaacactttcaattatttttaaaaagtggggtaggagacaagtttctacccaatttttagtaataacatataagaaggggaaagcttttgaatttttaaaacttcagtattttaaaataatgcagtcactctcacacacaaattagtccatggtctttgataaagcaagacattaggtgtaattttgcttcaaatttaatacccacactcgttgacactgttggaaacactgaggctggcggtgggagggtgcaaagcacttgcttaggaaccagctgagaaatcctcactgatttctcagggaggaggaaacctttcccttccctccccgggacaagtcgaagccccaccccgagggagatttgtgtccctgaatgtagtagttggtgtccggggcctgcgcagaagaggacagtccgcaaggggcggaagacaagacaaaaatgactccagttcgctagacgcgcagaggggcggatagcgcgcggaccccgccttccccaaccgagtgtgggttccagtcgctggggaggacctggtggccccctgaccttggacgagccatattggacgccccggcgccgtcccgtcttccacgctgcca

SEQ ID NO: 36579 - DNA, 2300 bp, Homo sapien
tcctcacaatcagctttcttcatccaacaagcaagcttcaatttcatcgtagcatttttattgtgtgcagtaaaaacattcacaattttgtttgctgttgatgatctgagtgtttggttttgaaaaaaaattaacaaagaagccaattttgtgagttatttttcatcacagaggagaaatattcaccttagcactacctttgttgtggcacctttccatctccatgaagaaaaatagccatccagtccagattgcaagtgctactcagtatccttctcacacatatcttactaaaaatgttttcactgactttttctttatttaactatcaagtatttggcaaattaatatcttgaaagacatcttcattataaatattattttaatgataaaattattaacttgtaaatttttatctagctctaagcaattggtttttatcttaattcgtttcagtatactattgtcattcactgaatgcccaagaacagggaatctatcaaaaatgattaagatcatgtcaaaaggacacaagcactaatttgaaagggtatgcattggctaaagatgtggtaataggagcattaaaaaggtaataataatgatagcaatacactgatgcacaccaaatatgtaaaaatccatgagttcataaagatgttccaaaaaagaaagtaatcaaccacctctggagagtactagatcaattaatgtattctgaaaattactaaagaaaaagtgaaatattaaacttcattgcttttttaatacatatttaatacatgatatttttaatacatatttgcagcctctgtgttaccaaagtggatttggccatatttgtaatgtaaggcttcaacacattttcctatgatgtgagctttgcctgctaagatgattctgaaactaactttgcccaattttgctttttctataatttcatatgaatgcaatcattcagtgtggtcttttgtatttgacttctttcgtacagcactttgtttttgatattcatccatgtaggaaaattttttattgttttttattgctgaatagtattccactgcatgtgctcatcacaatttgcttacccattcactagcgcttttcctgcatctgctgaaaggattgtttttccccctttattctattaatcctgccaattacattgattgattctcagatattaaaaaagcagctttgcattcccaagataagccccacaggtcatgatgtattgtccctttaaatgttgttgagtttcatttactaaaattttgttcacgacttttgtgtctatgtttatgagtgatattggtctgtaactctcttttgaagtctttcactggttttggtatcagagtaaatctggtctcataaaatgaattcagaaatatttttgcaatgctcattttatgccttgcagaactttgagaaatattacgcataaagtgtaacatgacgggtgtcattcaaatatatgtctcaaatataaaataatcagtttttgccttgttctttcttttcctaatttccgtaacaaacatgtcctattcgtcttcacatctagtttgaagttagctgaattagtgagtgatttataatcacagatttcagaaaattagagctaagtgattttagggactgttgtcactatatatctagggggggaaactgaggcctttagaagttgccacgctcttccagtacagagtaccttcccacgctttacagattcccaccatgtaacattcattaaaagcctttatgggtaggaaatgaataaggtacctgctgtgtatatatttacattataaagtttacgtattcattcttactctttttccttcctatgaagacacacactgttcttattcttacaatctcaaagagagagcagcgaaacaatgaaacttcaggattgtgtggcctggaggctactagttgaactgggcatgctcagtcgccaggcagatttttttcggtgaagtggaaactacaacagcgcgtaccgcgcgcggaggtgggcgtgccctcgtggaatttagaacgttgcctcagccaatggggcctcgcggccggctggcggggctcctcattggagcagcagggaggcgagcagagggcccccagagggagccgcggaggtgcaggtcgaagaggccgggctacgtcgtgccctgcgcgtgagcagctgcagaggcagaggcagcatccagcggcggcgccagcagttccagtccgttgctttactttttgcttcaccgacatagtcattatgccgaagagaaaggtaagtc

SEQ ID NO: 36580 - DNA, 2300 bp, Homo sapien
tagtatctatcctattccatggagagctgtgaaccagtcataggctgttccctgagaagaaactcagccgtgccatcagcaatcctcaacacttgggacagctgtggtactaagagtctcctgctgaaggtggtatctgggcagcacaccgtagcatccatcagacttgaatgacaagagtttcaatttatacctgattaccagtgtggttaccagtgtggtttgctatcaagaaattgagcattataataattttttgtgtcaaactttaaaaaaaaatattaagaccacataataattagatgctgaaaaggtatcgatgcatttgttaattcatcagacacttctgatacctctatagttttatatagtgcagtttaaatgaatatatcatacattctgacatgggcatgtgcagtcttcttttcctttctctttcttggctttccttctccctctttactgatatcaaccccagaacagtaagcagaataaataactataatatactggccctaagtagaaacagatttaaattgtcccaaatttgtttcagcaagaagcagtctgcattacctggtccccttttacacaggcatgtgttagcgaatttttaatttaattaaacacatctttctccagagccattctctagctctccattgaacacactaccaatattccctggagatagttaactctgacaggatataaatgaaaataaataagtgaaagccaaaaaaacatcaaagtgtgaccatatgtttaaacagaaagcatgcatcttggtaggaggacggtaagtgtagaagtaaatcaacacctgtttgtcagggaattgaaacagatccattcagaagttcccagctaatccacctttattaatggcaaatactctcccaacaaacaacccccctcccctgcccataataagagatttaaaattaaaaatctaattttaaaagtataaaattttaaattaaaaaagtttaaaattttaaaattaataaaggtataaagaccaggcatggtggctcacacctgtaatcctagcactttgggaggccgaggtggctggatcacctgaggtcaggagttcaagaccagcctggtcaatgtggtaaaaccccatctctactaaaaatacaaaaactagctgggtgtggtggcgggcacctgtaatcccagctactcaggaggctgaggcaggagaattgcttgaacccgggaggcagaggttgaagtgagccaagatcatgccattgaacttcagcctgggcaacaagagtgaaactgtctcaaaaaataaaaataaataaaaaataaaaaaataaaggtataaaatcttaaggatgaaaaaaatagattctaggtctctttcagacataccgtcacacgtatctgaaattaatatggacccctccctttgcagatcctgtctggtgactttataggtagagaatctcaatcattgggaggactcaatccttctaagactgagaggcacatctgttctcagtaattgctagaactgtgtttcctcatctgtaggattcaccaactctgggcactcacccactctaggggcacctcagaggtgtactccctgaaagagagtaatgactgaaagagacttaatggctgagtagtttagtgtttggttccctgaggcacatttgcacatgcccccagccaggtggggagctttggaaccatcagttacagttagggagtgggactggtatcagctgtttcccatgcaccacccagagccaaaagaatttctggaggttgctctcccctacatttaagttctaggtaagactccaatttagaattttattctttgtttggagtaatgtttattttcttgttgcaggcagcactgcatggaaattcaaatattaataatagaagttatcttgatacatattcataaggggaatggctgtgctttagtcaagagtaggctgggacttccagcacagcatgacttagcacatttggagcgcaggtgtacaacccccacacattacgtaaccacgtcatgtgaggtgtattaggtaagtactcacatgagttcatgcttggctcagagccactattgtctgtaaaaggtacaactaccttgctgatgctgtacatatggctcacttgtgcccagagagagaataaagccatgtcgaaactatctacgattccttgagtgtttttccagctacctgccacttgcccacccactcccctcagatctcagttagaacatgacaattgggctcatgaacaggatcctgaggtga

SEQ ID NO: 36581 - DNA, 2300 bp, Homo sapien
agaagcccaggatattaaaaataaaactccaaagtgcttaatgaccattgcagaatttgtttcataaacaaaatctttaaaaacaagagtctgatttctgttaactataatttcaagtggcagaaatataaatgtggttttgataactttgtttcctttatttctgaaaagcagaatcctgtgtggtactgaaataaaatgtcaaatggtatcttagaaaattctagccctatcaaaaataatatataaaaccatgtaatgtcataaaacttttaaaactgctttctcatattttggggtaaccttttaaaatggtaattcaataaactagtttttacttctgtaaatttatacattttttggtcttttttcaaggtcaaactgatactgttattttgaatatgagggggtgaataaaattgcacactgtaagaatcctgagactatgttacacacaactagacaattttttggattctcccagcgtcttaaatattttcttgcttaccaacaacttcttaacctgtaggtgaaacacaatgaaggcactaaatccgaaaccacgaaatttggaagcagacctaggcttgtactctggcattactacttactactttcgtaccttgtggtagatactttaacttctctgaatctgctttctcaagtataaacaatgaataacaatacctgtctggagtcatgaatgaagatggaatgagattacactgcctggagcattctgagtgctgaataaatggtggtttcattctcagctctccttcagcaatcctgatctgacgctcctgtgacagacatttgtccacgtaaatacggtatgttttctgattcttcctagcaacttcctttataagtaatccacccatacatttacatgttaattctaacagagtccataataacgagtgagctattttaacagtgtcagcagagacagattaaagaattgatgaaaagtaattccgtgcaatttagggattactcatcttattttcactaacagatgactgccatcttgtacagatgtatttcgcatacagaaaattacatttaatcacaatattgtttgggtgggttagtctgtaacttgaagtaaaatgtattgacaggataaaatgaaagctttgaaacagtgcaaaggtggaaaaacgaggttgagcgagaagcaggaattaccaatcttcatggttagaagattcattaaacgcatttgccttcaaatattagattctctacagaatggtggtaaaaaggccagtgagaaattaacaatagtgagaacaccagagtagtgttaaaccaccttgataatcagatggctcggagcagtttaaagccctcacgaaagaggatttttttttaccttccctgtctcccgcaattaatgccatttctaaaagagaaaatatgtcacacatcagcgctcaataggctgacatgctcctcaaaacgttccttaaaaaaaaaaaaaaaaaaaaaaaaaaaaaaaaaaaacttgtgtgcaaatatttcagatgccattccaccccaaacccgttccaaaacctaaaaatcactttcaagccaaactcacggctcgttggtgattcacagccaggatctcgaggcaggaacaatagtgcactcaccccgcatcctcctgaatcagccatttcggtaagaagatccagaagcactagcagtttgtttgtaatttgtttacaatttaaaagcaagttatttcccaaaggaaatctaagcaattgttaagtgttttacattacgcagtcgccaattttacaattcatatcatgaacccactttgccctccgcccgcgtccctctcggagcccacgacgctcagcagtcgagccctggcaccgcacagcccgtaggagcctggagcgctccgcgttttgccccaatttccctacttgggggtctccgctacagctagagcggtcggccaatggagaccttctcccgcactcgccgtcccgccttccagttccactgaagccaataaaaagggccgtctggagacagaagccaatgggagctcgggtagagtcatcatgattggctgcggtctcttcgtagtgcagtctaggcctccgcctccgttaccctggagcccaggttaccgccgctgccacccaggagccccgatcctcgcctctgtcccatccttgtgttcaaacctcccgcatctcggcaacctcggcacccgcccggcagcctccgcaggaaccaggcacccgctctttggcggtcagacgccgaggccccagctgggagtttgg

SEQ ID NO: 36582 - DNA, 2300 bp, Homo sapien
agagctattatctccaactcttttttacaaattctctgttgttctctttctactgactagcttcttcagcttctctgattctcatgttggaagctctgagcttccatgtcacaaattcaagctctcttgttttcccagttccaattctgaatctttagggtagaaatgttgcttggccttgcttggcttaggtgctcactcctagatcaataagctgtggtcagagggttaggccctgctgtatgtacagggcttgggggacccttacaacctctaggatcagaggaaaggagcagaaatcccaaggagctgagcagataacccagtgagaaagtcctttgttggcattcattcaaacctactttttcagcattgtcctctactagttccctcatattcctttctgaagcaaaaccaactccttgctgttctcctcacacaccctgaatagtctcaccctgcatcctccctatctgcagacagaaattctactcatctttaaagtaccttctatggccacctttttcctttacatccacacaacactgtattagtacagtgtgtcttgttctgtcactatttctgtatctgtctttttctttcctagacaataggtgctctgctgacagagaaatgactcgttcaactttttatccattcttgtacctttcacagagtaggctctgagttccaattatttgagtttaactatatcttcatagctgaataattccaaactgaagaaaatgctgacttttataaagatttgcatttatataggaaatacggtatctacttttaagaaaattattttctattttataaacgtgcatttccacatttatggtagcaaaattaaagtacatttgccgagagatactaaagacagcaaaacttctatttaaaattttaaacacgaagaagaaataaagtcccattaggagtgtctcttctattattgaaggaaatttaaaaagattcctactacagaaatggctttaagaaaagcaataggaaaggttataaatttgaaatattcataactgttctaaaaaatacttcataatgattgctctttgtgcaagaaatgtatcaaagagccagagacctcatcatctaatttcttactttttcttaattaacattgttcccagacctctgctaaactcccgtgttgaaaggaaaaaagtaaatacagtacagcagggaaaactggttcctttcgacaaaactgagagagaggcttgagcttttgtcaaacagaaagcacttgataaaaaactattcctaaactattagcaactatatagaagctttttatttaacagcatcctcctgggaaactgcgctggaatgtgcagcggttctgaaaaaggcacagatttggctgaactgtaaatattaggtgcacagaggcgaagccattgtgtagggaggggtggggcaggtagggtcctgatttccaatgttgatagaaggattccaatttcgtttggtatttatttttttctactacaattacagttttgctgagaaaaataaaatattggttgtgcttccatctgggtttctaattttcagtgtgtacagacaagagaagacctctcatttacccaaaagaatcacctttctgcaatctccagtgctactggacaaacaaacgagcccaaccccaccgcccacacctcccaagcacccggctcgccgatcccgcctgcttcaggtagctggggtttgcccggtacgccagcggccctgagacgatgtgtgcccgcagcacgatcgtgtctgttggcatttctgggtgtggatgctccaaaccaataaaccacaatacagaacccaagcttggactttgaaccgagcccttttgcctagtttgctttttcctcatcaagccaggatccttgccaacccacctcacagcttctgcccgggctgtggctcccctccagccacctgcgcgtgttcgggatagaagcgcggtcaggaggggagctcagtccaccagccactccagggagagacggaaactacaaatcccatcaagccccgcagccggctccctcctcctccctctccttccccttcagcctgcggccgggcggcgctgggcttttatctgcggacccgccgggagggagccagatcccagcgatcttccccgacggcagcgctttacccagaggctgccggcggctcgtagctgggttcagctctgcgtccacgccagcccggagcccggggggcaaggggtctgtcccgggcgcagcgagaggatggtcatccgcgtgttcatc

SEQ ID NO: 36583 - DNA, 2300 bp, Homo sapien
tgttgcttgtatttgcttttactctgttatgatgctaccaagattttggttagatggctgttattctaggtggcagacatgcgggtttccctccctttgcacaactaaacaaggtaggctttggttctgggcagtcactggtatttacaaaccacttattcatgccaggtaatagggttccagattgggtaagttttatgttctggttcttggtatatgtttagacagcttataaatgtaaataaacattctactcttacaggtggagtgtggacacggtgatatccgtgtgaccgccattcccagctgaaggttatctcatctatgattttcttatacgtgactggcaccccctagtgaatagggacttaagttgacctccacggtagaagaaataccagggaaatacctgaagctgttttaacaatttctccttgtattaagtattatgctgcagttttgcgtgtgtgaatggaagtatgggtagagatctgttctccctaaaaactccaggattccacaatatagaaatagtaatcaaatttttaggtgaagctcgaactaatccgaactttgttagatcatcactgtaaatgaatgggtatttatccactccctaaatgaagagacttgactggatttcttttttttatatagctactagaatctgttacacataatttaggattgagacttgagaaattgtcattccaatccagaaaactttagatttgcaaatatatttgacaaattaataaattaacattttatttggttaatttcaagaatagggcatttaaagaagtctgtgtttgctttagttcggcaataaagttcctgccactcacaataatccttattattctctgaaagacatgttatatttttgtcatcataaatatttattaattactgtttatagcactgggttaggtactcatcaagcaaccaaaaataattcttaccatctaggatgcttccaatataaaatatagacaatatataaccaggtcaattgggaaatagatcatttcagtatgataaaagatagtattcacattaacagtgtgaaagggcaggaacaataagacacttgactcactggtctttaaaatgtagcatccaaaatgagcaagtggagaaaaggttaaacaagtaggtgacacatttaaaaaacaagtagatgaaaggactattctcaaaaatcttgttttatgtgagaaaccatcaaattatgaattccaagtactgtattttttttacttttcaagggtaggctctcctataccttatctaaacaatttttcaaaatagccacaattactttgttttcctctctacactaaattgccctttgcctcttgagcgattatctttttcagattcacctcaacttcttcaggttcaagcggacttcacctgtaagcccctctcggttctccctcttctctgaactactaatggcctaatttagcacaattatattgctttgttcattccatgtatagtaaaagagtctacaaaacacatgcaagcattcatgcaattatatgttgatttgttcatgggtcgaccccaaagtctattctccatcgctgaagcatggaagacaaatacccttcacttcttcagaggcataacacatgcacttctcttgtcatggtgacaggcatgtgctggtggaggtcaaagaaacaggaacacaagtgaaatcgaggtgagtgtcaggtaaggaccaaagcaccacgcctacctcatctttgcccacagaacacccattcttcccgtgtcctgtttcccaggacgtatccggggcggataagaaatcacccgtggggaggcggtgaactcctccgcaggggccgatgcccgggacaggggcggggaaggctaatgaggcgacttgtgcggggaggggccaaggaggagcccaggtgtcccgctcccgctcgacggcgcgcgcctgcgcgagcccagttggcgtcgcacccttgagcgcagcatccctacgccagcgagtcccaatactagggagggagggagggaggaggggcggccggccccccgcccccgcgcgcggccacgtgacgccggctgaggagattggaggggcggctgcgcgaggctgcagactggtgcagcgcactgtgctggcggctgggcctcctccacctcctcgtctttctcccgggaaccttgacgacgccttccgcttggccctgccttctgccgcatccccgccgccgcggcgccttgaggagcaggagaagacgcagccgggccgccgccgttagaggggt

SEQ ID NO: 36584 - DNA, 2300 bp, Homo sapien
actagccatattaaagtataaaaagaaacaggtgaaattaaattttcataaactttttatttttgaataatttttaatttacaaaaaaattccaagtgtattaaatagtacagtgaattgctgtatactgttcattgtttttctgttaagatctcgcattactgtgatgcatttttcaaaaccaagaaaccaacattagtgcattttcattaactaaacctcagactttatttgaattttactaatttttcaattaatgtcatcctcctgtttcaggatccagtttatgatatcacagtgcatttagttgtcatgtcttcttagtctcctctgtgatggggtggtattaattttaataatatattttatttaactcaatatagcaaaaatatcattttaacctgtaattgatatttttaaaattatcaatgtttattactttttcttattcagtcttcaaaatccagagtgtattttatacttaacagtacatcacatttcatactcagacactttcactggaaatacttcatctgcatttggttctcacaaaatttacagttgaaaaagtaggttcatatacttacattgttccaagtatacttaaaagtcttccaataaattcatgactaatgcaagtttagaaaaaagaaagcaaaaaaaattactttaaatagtttaaaaataatcccattagatatcagttttcaaatttaaatataaatttaattaatcaattaaggttaattgatttaaaaattcagttcccagttgcactagacatactcaagtgctcaatagtcacagaccatcacaaggacttttgattttattccgagctagaaagggagcactgaagggttttgagcaaagtagtgacataatctgatttaagatgactttgctatgtcagagaataaattgaggtgaggcaagggcagaagcagggagaccagccaggaggctactgcaggtaacatcagttaagtgatgcagatgccttggactgaagtggtggcagtggaggtggggagaactggtaggagtccaggaatctcttgtgccagccctgactcaatctgcttatgagttagataagggatcagggatgacacaaaggttttggggctaaaaaatttaagacaatgaatttgtcttttatagattttgtaaaaaaaacaggtttgggtaggaagatcaggggcttggttttggacattttgagttcaagatgcgtatgagacatgtaagtgaagatgttaataagtaggcagtggatatctgagtatggagttgaggagagctcagctaatgatacacatttgggagccatcaacatatagatggtatttaaaaatagaagactgaaggagaccaccaaacgagagtacagaaagaagtgttagggtgaggtcatccagcaacagtattttaaggaaaatgcaagctttgtgatcaggccgcaaacagatcaacgagaattggaggaataataaactctttccaggcagaagcattagatgcaatggtgcaaaggtaagtgattagccaaccatggtatagcaagtcattttgctctgctgaagcagaaatactagctagctgacacagaaagatgcattaagtgattgagaagggctctcacgctagctgggtggctatccagagctgggaatgtgagggttctaaggatagctttggagttaacaagtgacagctgcagttagtttcctatacatacacaaaaccaacccgtcctaccacagaatatatgtcataatgctggcacaacagacacatcccttttagttttgcagacgaggagtaaccgttgccctggaccacaaagccacttagcggcagagcctcgcacccgcgaagattattactagggagatgtttttacccctgaggacacctgagcccttaagtggggcaggcttcgagggaggggggccgataaggcgacttcagacagggcaatcacgatgggcgcttgagttctgcgcagaattttgacaagggggagggtcttggcttgaagacagagcgtggagtcatttaaggataatggaagggcataagcagaagctcaaggataaaaagcactgaaattcttgagctggcggcagggctgaacgtagctcagtgaaagatcctttcttgccacatcctctctaagccaggctgtgagaaccgcgggaaacgaaggagaagggtggcggtggggtcagtaaagggccggcccaaggtgcatcttttaggtcctgatgctaggagcagccgtccctgcccctata

SEQ ID NO: 36585 - DNA, 2300 bp, Homo sapien
actacacttccaaaattcccagaaaaggacagtttcccaaattgagtaaatgtggccagggcaaggggaatggaggaaagtcccactgtaataacatagacattttcatggttaccaggcaaatggtgtggtagagatggggaaaatttaaaaaatcagtttgcaaaacaggtgaatctggcaggtgctctgtttgtttttcctggctgcatgtagttgaaagttcaaacctcttagaccttcaaaatctccctttaatctgtttttcctactttttctgttaaccctgtatcattccctacaccctgaatctagaagcaccaagctattttctcttcctggaatgcactgtgctcttcatgcctatcagcctttatacaggtttcttcttagtttggaatgccattttctccctagtctgcctggtaacttctagtcatcttttaggtctagctcagagttatatctggaaacacttgactttcaaataagagtttattgctctttttgtgtttcactttgtttgcactattctaggactcctatcacattggattgtagttgcctaatctgtctcttttctctaccaccttggacattttagaagtaaaactatgccttgatcttatttgtctcaatggtggcttgtcattgggttgtacgtagcagaggttcaataaaattctcatcagttattatttttctctttttctccccgacctaaataatctcagtacccccagctccctaaactatcaacaaatagaaaaaaagctctattcatttttatccttgttctttactctccttagtttaaacccaaatttgactatgtaaatgtaatttcattttgttaccccttccttcattaaaacaaaaatacccttcatgcacatgcaaaacactctaccccacactattaaaacagcagaaatgaacactaacaaaagccaagataaaaaatttccccaatgttgaatttttggacttagtgtgggggtaggaaaaatggagacataattctggttctccctttggcagttttcaattgctgtttcttaatctcagtcagaaaacacatttctctgcctctccttttgccccatttctaccctctcctcccttgcccctgtgcaaaaccaaagatgggttaagaggcaaggcataatggaagaggaatgttcttttcctccactcccactttcttcttcaaattctgttttgggaccatccttccccaccctcccattttcatctgatggacacactgtctctgttgtctcttgtcatatttgattttatgatatttcatgttttatgtgcttttttttttttttagtaaattcatggacagagaatgtatcctggtaaacacttagattaaaacaaatttacatagttgattactataaatgaaaattagtgactcaaattctccaggtttctaagctacttagactaagccaatcaggtaatttttgctacttctgggcaaaatgtatctgaattcctattcagtggatttgcaggatgaaatctaagtttacctctttcatctctcatttaaatgtggaaaaacgaaatcaataaaaatctatatatgcttattaagcattttaaggagggtgtgaataaggagtgaaagctttgagcagtgactacagcagtttttcgaaagtcaaaacaataaccaatgccaatcagtagctctcttcacctctcacacaataatagagacaggacaggataaaaaagggttacatttaaaaaaaagtatggatgttaaaccattggaaatggcactgtaaatgacaccggaaaagatcgcctccaggcactgtgtggaactttgcaaactcgggtcctcacccgaggaccgcacggccgacctcggggaggctccaccccagaaactatttcattggcgccacctctagcccacacttcccctcttccgcatgcgcacaaggagcagaagccgaccagctcgtcacgtcgccttccccgcccctaaatttccagttccgattggtctgtttcatgggaccgcccctctggcccgaccaatgtggaagcctcctcgggtgctccgccctccccgcaggcggcgtgcggctgcatagcctgagaatcccggtggtgagcggggatggcggttgtagcggcggctgccggctggctactcaggctcagggcggcaggggctgaggggcactggcgtcggcttcctggcgcggggctggcgcggggctttttgcaccccgccgcgactgtcgaggatgcggcccagaggcggcagg

SEQ ID NO: 36586 - DNA, 2300 bp, Homo sapien
tggtgcagccaagaaaggtgaagcattacccctccattggcttcttcacaaagcagggcaaagagcacctactgttatttggtaggtgcctacactcagtcatacaggacttctttatgcaggctgattggagaaagtaagacagaggaaattgagctgcccaggtttttttccctgcctctctttggccaagatagcaccagagagtgttaactaccttgcattccagtttgggtcattcagctcctttagcagcctcctgggaagccagatgcactccctgtggtggcatttccccaaatgtagaagagatgagaggagtcagagactgtgggcttaaagtggttagttttaaaaggctgactgcatagccctgcattggtagtggaagtgaagtaagctgctgaaaattgaaacaggtaaacctgagaaactcagaaggggcatatgaatccatacagacatacttccacctcgtacatctgatttatttctctttttacaccattttctgtcacaaatctcacagctttccaaactatagtacaactggtcaaaatgtctgaatgttgtataccaggaaaatatgctggcaactcaaccacagcacaagtctaaaatcaaattttctaatactgttctgtcaaaacattttccttctctgatttttgtcatttctcttcatggagacatgaatgcttgtattaacttaggttgaaacatcagaacttcagagttatctctgattccatccctccttccacccgtaggcaaagcacatcatgtaaacatattagcaatctctcagtagtggtgaggatactctctggcacaaattgcacatttagcaagagtttgaataaaataaataaatctgtttgcttttcagtttgctgctacatttgtgtgggaagtgctgcttgccgatagggaagtaggagaggaaataaggaaaacaataaaccaagtacagttttgcaaatacccagacacattggatggacacagaagctttcactgggagattatgaagggtagatgctttgtgtctccattgcctcctgtgatgtgacctcacattacaagccactgtggttggaactgctggcaaaatggaaagaaccaggaagaacatcaaaggagagttttaaaaggatatgaaatgtattaatttgtcgtaattatctacttttgatagaagaatctcagaggtacttaagttgatgtcttggaccttcagtccagtgctgacatcttgtaaaatgtcttaagttcctaccaggtaatttctgctttctgtcacaaagcaggagagaagttccaggaggaagtcatgtatttttctcatctttaggtatattatatgtataccccatatttccctatattatacttacacatatatttatgttacactttctatttctcttatttacgtacattattaacaaaaaatttttggaagattgtagaaataagacatgtaggcatttgaaattttgtgagaaagagcatgtcagatttgggagttagggatttttagacattgccataagaggtaagtaaatgctgacaccttgcctatagttaataaaaatatattatacatttgaagttttctaagagagtagatttaaaattttctcactatacacacacacaatatatatataactatgttaggtgattaacgttaattagcttgattatggtaatcatttcacaacatagacatatatcaaaacatcacattgtatgctttgaatacataccatttttatttgtcaaccattccccaataaagctggaaaaaacaagacttcattcctgtcaaatctacttctcagggacctactccaagggagtcgccattccttcattttattattaaattgcttcttcatagaaaacctatcttcggtgaaaaaattagactccagaaatgatattttgccagaaacatctctaaaagcctttttatctccctgatgaactcaatgtagctatggaaatttgaattccctatctggggtcagcttcagaaatgtgtttatttatgtgcttcgaattgacttatcaactaatgaaccaagaaacaatttttcttttggctgtgttttaaaagggtcttgctcaaattttaaaggttggggcattttagagtcagatttgtttcataatttttctatgtaacatattcacttcccattaaaatgtaattttccctaccaataaggtgttaggcttctgatccctcaggggaactgtggttgacatgagcattacctcatccaaatgta

SEQ ID NO: 36587 - DNA, 2300 bp, Homo sapien
tacatattaagagtaacaaatcatttaaaagtacaaatatattatgaaattatatggctacataaatccttctagtatctttttagacatcacaaaatattatttttacaatagaactgtttgttacagaaaaaaattgtcttaagaaggatagtttacttgcctaagtaagaacctaaatgtcccaatccataataaatggggccttgcatgtcttctgatgactggtttagtattatttcttagtaacgtctgctggctgagcactatgcgtgtctatgcctctttcctcatcttcatttccagaaagcttatgccacctgtgcaatgcatttttcttcaaaacaaatagaggaaaggatttattttaatgagaattttgttgtcccaatggacaaaaaaaagtccttagaattgaaatccttactgaatctctaaattaaccctgaatttggaaaaggcttcgcatcaattcacgctacaccacttctagagatcaacgccgagaatgccttttagaatgatccaacaggccacttgctcttttatgttttcaaatcatcaagtatttattaatcatctcctatgtgatagtactgttaggagatttggcagactcaaatgatgtagtcactgcctttgggctattctctggctatttcctagggcttaactttggtttaaaataatctaaatagagcaacatggaaaacaggtgaacagtaataaattagaaaaaaagaacacaagaaaaacaccaagttacatcatcagacatgtgtttaccaagctctgcaaagaaaggagttcagagtaaaaaattatcatgtataggaataaatgattgattcttaaaacggtatttatgaacaacctaaaatgattgctacttctaaaatgatttactgtcaccttgagttttgatttttaagctatctttctgctcttataactatcttgaaaaatattttttaaagaaaaatcttaatgaagaaaatacctgtggcagaaaatcccagctagcatttaaatatatacttattgtgagatgatttaaacaatagagttaacaagtaattcaaaatacccccaacccaaaataatctttaactacttttgtgtctccttccagaaaacaaatcctaaccacacacaaatatatagagagtaatttattcctttctttaaaacatgattattttttgaataggtaatatatttacatggttcaaaatgtaaaagatacaaacaagaagagagtgaaaatttctcattcgccgtgttccttagatatattcttatccttgagtcaatttgtataccagttattgtgcatactttcagaaatatttcatgaatgtacgtccaaatatgtatacatttctggtttcatctcgtaaacacctgcacccgaatgttacatttttcatttttttttttttttaacaagaagggtttctttaattctccaccgtctcgggccaaacttagttgtttagcaccttgtttcttcacattagagaccccaaaggtgaaatgtgaagaaaacccaaaactttgagtacatttttcctgtgacatattgataaaacacaatttgagtaactatgtgaagtgcggtgtattgatggtaaaaacttgacatgaaagcattttcatataaaaaggtctaaacattttagttaattccaggtttaaaaggttcaagaaaattacagtgtctgcttgaaaagctaatgtttccctacctttgcattagtagtgacatatgtctagataacattagattatatttgaaattttgggtctagctctgggcaccatcatttcaaaggtatattggcaaagtaattcattcagaagagtcttaactaaataaggatcccctggggaccctgactatataaggattgcattataggactagagagtttgtttctggtgtagatgagcagaaagaagaatatgtaaatgagtttcaaatatgtgaagggctttcctgctgaacagtcactggatggattctgagttgcttctgaaagactgtttatcagaatcatccaacaggaagtagtctactcaggaagtgactgtctcctcagaagcagaaattgttaaccacaattatgtaaaagtttccctagggaaaaaaaaaaagaaatatccaactcttcctggaacagggaagaaggaagggaagaaggaaagcagaaagagagggaatccacgaaagcatgaagtcttgggaaaactttgctttcaggtaatgtagatgggaaagaattaaaaagaaggctagg

SEQ ID NO: 36588 - DNA, 2300 bp, Homo sapien
gatccctaggagatggaaataccttcttcttgaagattaaattaggtattatgttaaggagctaaacaggttatagcccagacgtgttcaataagttcctggtactcataaaccttatctcaaggcactaccaatctcatttattaatcacgggagtgtacatatccttcctcaaacattctccaactccatacgcttccctttgtagataacgctcttctcctctttccccgactactgaaagaacatccattctttcaagatccagtccaaatgacaccttctcgggtgtctctccgtttcctatgtagttagcccgccacgcgattgcgtcagaatatacttctctcataatacatatgcaactgaaccataattatgcacctaggtgctatgccctctagattacgtgaaatgtcattcttaaatcttcagcacttagcctgttgcctggcacgtaacaggtcactaaatgctctctctatacacatgctcacacaagaatatgcatatgtatatatatgtataaaatgcctggttaagatagattcatgcgccgatggctggtcagaggaacacatgggtgtgctctgaaggaagcgatggccctatgcggacagggtagttgtcctagagtccccaggcgcacctcagtgcttaggcgcagcgctgaggggatggcctctgccacagagacagtcggatttctccattttgggacgcagctcggcagggcaccgggagggggcggcgttgtcacgcagctggatgctccacgggtgacacccccgcaccctacccctcacccccgagccgcgcagcttgagtgactaggccggggctcccccagttaggaggtgcgggctgtttttcctcccagtctgggcgggcagggctgagcagggtttggggagtattctgtgaccctggcattctcccctctgccccacctcagcccccggcagcgtctaggcgctgggaaagctgctccgggttagttgatggaggcagcgagctgccgaagagacggccacagctttctagcaaagagtggtggtggcgcgagtgagcgtgcgtagaattagctctgccgaagtcaccgaagctggaggagagaattcattttattcttgaaactcctacttttacgtctcgtggaaaaccaaatcgtattccactgacactatgatgcacttaaaatggccaaactttagggggccgcgaggaacgcgcttcgccgcctccaattttgtcagagaactcgcagcaaaggcaccggacacctagcggccctttccctggactccggggcagcacgcactccccgggcgcgctctctgcgcccactcggcccgcccagtcctcggccattggctgctcgcccgcgtctgctccgtgacgcgccctgacccccgcgaagtactggccccttggagccactcgtgcgcaggagccgcgcacgcccgaggcccgtggtgccgcccccgcgccttctcgggctcgcccagagctccccggcgcgcttcccgaggtttcgagaatcgaaacccagttatcaacaagcccttcccactcacgcgccgtgactgatttgcgtgcaagagtggactcatgagtccacacttggatcgggtttatcaatggagtaaatggtctacctaaaaaccgaggtttaaaagagcggtcgtgaggaacctccggagcccaaccgtgatgatctaaagacgggctgagtccgcgagaattttgggaagtttctgcagttgcaggattttagtcgtgatctggttttgatgaccacttatgattcctggggcatttaaagtgtctcctcctggggaaaatgaaaagagatttgtgggagggggcgtacataaattaaatgtatgtataaatacacgcatctacgggcgcacacagtatccgcacatacagcccaggacctcacgctcaccggcagtcgtcccgcactaactgctgggctagtcagctgcgtgccctgcgggcgggggagggcagagggggcggcgccctatgcagatgaggagggtgtggcgaacgtgccgctctgggccccggaagcgcagagaagcccggtataaaaaaagtactgaagacattttccccgcacaactgctaaagctccagagacacgagcgtgtgtggcagcaagagccgccagttcgggaccaccgcagctggggtggcagcggcgcaggaggggtcgcggggagggagtggtgagcgcaggcggcaggggtctgggaaagacgaagtcgctatttgctgtctgagcgcgc

SEQ ID NO: 36589 - DNA, 2300 bp, Homo sapien
gttgggtgtaagatagctctcatgtaggtaaaaccaaatgaggctcactttctccttccaggtttcctgaagctaacctttttccttcctttttacatgccctctccacaaatagagttggtaaaaagtatctgttacaatgacccgggctttaccatccatggcaaatctttctaaattataggcctttcctcatagagaccatttacggtgggcataatacaaggctgtgttcaaccatgccactctttgaactagctgcaccatgttattaccacactaaactggagtggccagtttttctataaataaatattctccttgctgggcagatgaaaacccttagtagcagttcctacattattgatttgctcgtttctagcttctctgctgggagtgtcttttgagttgttttgaaaagagaagtcttgtaaacacttgactgttgctggactcaagaaaaatccgattagcagggaatcaacaacattattactcagctgggttccctgtaattcctccatctctgggccaggtgggtggataggggtgaggaggtttcaaagagattgtgtgttcttcctggattccatttgtttctttgcaacagtcctttaatttttgtggtgttggaaatggagctaataatgacaatttgaacacaactggcttcctctctctgaaggataacaaagcagagattattggctttgaccagacaaaagtggttagacgtttaatgagttactctttgagactcctcaacacccccagaaaataaagtccaggaactcactaggaataggatagctcctcacacagcctcctaagaccgtaaatacattttaccttcagggcagtggttttgttattgctgtttgtcttgttttctttctttataaaacactataaagagatatgtgtattcgagatattaaaaggtaggatgtcttgtaaaagcctcagatgccctctgaattccttcactgccatctcttgggtttctgcagctatatcctctggccctggcaacagcttcctggccaggagaccctggcacaaacctgtgccaccagagtcaaatcagctctgtggattacagctgagttctaatctttcacactcgttccgatgttggtgtcttataaactggctgtctcacacacctctatgctattacctgaattctcagtctcttcactcttgctttagggcttagctgaatatgctgtcctaagccagacttctcatggttgggttcctgctacctcatagcaccctctattcctggtagggtctacctgccttactgggcagcatgtggccactgatggctacatctcctgccatgtgcccaactgtttggccttttacccattatagcctgattctcagccctgctacacatatgactcacaagagagcttttaagaaatacttatgccagggccccacccttaagaattcagagtcagttggtctcatgtgatattgatatttctaaatgaaaggttcttgttatgatctgagctatttagggtgttacctcataacacccctaaaattcatatattgaagtcctaaaccccagggcctcagaatgtgactgtatttggagatagcatatttaaagaggtaattaagttagaatgaggttattagggtaggccctaatctgactgatgtccttctaagaagaggaaattaggacacagagacagacacgtggaagaaatgtcatgtgaagacagtgagaagacagctgtctataaaccaagaagagaggcttcagaagaaacccgccctgtgaacactttaatctcagactcctattcttcagaactgtgagaaaataattttcatttaagcttcccagtctgtggtatttgtcatggccaccctagaaaactaacatagtccttaaatagattcaataagtagccaggagtggggaccactaatctagtggttctcaaccatcaagtcacttggagggtttgttaaagcacacattattggatcctaccctcaaggggtctggctcaatatatatcctggcctgacaatttgcatttctatcaagttcccggtgatgctgacatagctggttctaggaccatatttgcaaatcactgcaccaatttctgtgttgtagttggtttttgagtctccagcttcacctctcaactcctgccactttatggaacaccctcagtgcccaggggtctcttgtccttggtcctggttctccctgggctgccttggtaagttactcttgattcatacacatatttcttaga

SEQ ID NO: 36590 - DNA, 2300 bp, Homo sapien
attttctacagattgtctcttgcgatatctacttctatgttgctaatgttgaaaactcaataatgctatatttattatttgaaagtttagaatgtttttgatatttgtttaatcatagctctattttatttgacaaatttggttcattttaagaagaaattttgacagactccacattggataaatttgtaattaatgaaattatccgttgaaacatcatgagtggaaaaagttatggaattgtagtcttaggaaacatatttgagattcagtataacattatacagctctttctgagtctttctgtacctcagtttcataatatggaaatgagagtagtaatacctatcatgcaggcttactacaaggcttatatcagtttgtaattcagtacttatatctctaagaaaagttatcagtaatttaaagcaataaagaacctaaaaacctctgcttttcattatcgtatactaaaaaaataccctttgagtttctgtttcagtcgttaattttctaattaatttttcataaacgactatttccaagtattctggtggacactgagatacaaagatgaatgaaacacagtcctgttccccaagagactagtctagcagttaagattgacatgtaaacaataataacagtgtgtgatgctttatcataatgattgaagttttgtaggaggagagagaaggtgacatttgagccaactgtaaaagagtgagaagacatttgaagtggaatatattccagaataaggggaatagtaaaaataaaggtagctgtgtgatcatggaaaaaacactgtactctaaatcaaaaagaccagatttttgttatctctctgctacttatctaacttgttaatcagacaaattatataatattctttgagtttgttttttaatctctataatagttaatatatgctttcttcacagggtattgcaaagattaaatgggataatacacatgaagtacttaggcttttagtaaatttgtttgcccacacattagggctaaacattttagctttcagtgcattttgtactctggctctattgtttcttttaaactttatttctctttaagtttcttccttaccctgaattcaggcattctttgcttattgaagagaacagcctgcctttacttaaataactgaaatcttttttaggtccatgtatttgtacaaccaaaattctttctaattgtacgtctcctcagctttaatgtcatttcctcagtgaagccatcagtatatacaatcttccatattgtattttttcttctgtgcatccatagtactttatacattgttttatcattgcttaagtatatttttaaatcttccccatcagaattttttgaggggagaagattgggttttaatcagcctgatttttagcacctacagtaatcctgacatgctcaataaatgtgtataaatgaatcacgaagtcaatattttaggtcctgttaatttactctctgtttgactttgtgttgttaaacctgtctagtcctcagttttctcattgctgaaagagagcattggagcaatctagataatctctagggacctttctagctgtaaaattccataattaggtccatctgtattgtacctttttaagtttttctccttactggaatgcttcttactgctttcatcatatacctcttttttattatcttctcaagttcattccatccatgaggccctctcaaatgattaaatattgtgatttttatagttgttatagccagtgtgactcaatttgttatactgtcttaaattctgttctgttattttatatgtcattttgtatgttgtttcctcaactagcttgtgaattcttagaaggtaaagatcatattttatatttctgtcctatctgtaatcctttgctcataaagtatattagttccttacaaaattcggctgttaattatctgatttagagattattggtttatctggtgtgtgtatatatatatttattattagaaataggctatttcttgcagtatctttctctatgatattttatacagaaggttttataaatatagattattttgtttacttataattttaaaggtaagcttgactgcactcatttaatttgcctctggagtcaggagtttacaattcttcctctgtatctattaataagcagtttgactaatattactagaagctttaatctttaattttggcatttgttttgcagatgctctacccatggtaccccaggaccagaaggcaaccatatttcagatttaccacttct

SEQ ID NO: 36591 - DNA, 2300 bp, Homo sapien
tccatcatagaaaacataataagtatgcttttttaaaaaggaaatattaaacattacagacaaactaaaatattcattaatttgcaaattatgggctacctggtactggcctgtgttgggtatatataaaagtagaatgtataggtgcagcctttaatgtgtctgaaatctagttgataaatattaatatacatacatggaagttaaatgacagaataagaatgaaattacgatacaagggccaggcgctgtggctcatgcctgtaatcccagcactttgtggggctgatgtgggcggatcacatgaggccaggagtttgagacaagcctggccaacatggggaaaccttgtctctactaaaaatacaaaaattaggccgggcgtggtggctcatgcctgtaatctcagcactttgggaggccgaggcaggcaaatcacctgaggtcgggacttcaagaccagcctgaccaacatggagaaaccctatctctactaaaaatataaaattagccgggccaggggtggcacatgcctgtaatcccagctacttgggaggctaaggaaggaaaattgcttgaacccaggaggcggaggttgtggtgagccgagattgtgccattgcactccagcctgggcaacaagagtgaaactccatctcaaaaaataaataaataaataaaaagagaaataaataagtaaataaataaataagctagccaggcatagtggtgcatgtctgtaatttagctactagggaggctgaggcaggagaattgcttgaacccaggaggtggaagttgcagtgagccaggatcacgtcaccgcactccagcctgagcgacagagtgagactctgtctccaaaaacaacaacaacaacaacaacaacaaaacaaaaagaaattacgatacaatatggaagtattaaagagattacaatatgatgaagtaccaaatgagtggttctgagaagaaaaactgagcatgggctggtgttgtcaggaagacttcattgcagaagaagggcttgagctgggtcagttcataagcactttttatattcatttccaaatattttattattatatttataagcatgtgaaaaacattagaaaaaaagagatcacttaattcttgattcctttcattgtcataagcttttgaatacaggatgggatttttaaaagaagaaataagagaagatggggcagtataaacagaggaaatcgtgggagttaagaagataggaatgcttatggtcctttggggagttagggtgccaggggtgggggactcatctcaggaaattccacaaattatacattcttgttttagttctagaaaatgtgatttttttccaaggttagggcaagaatgacaatgttgtttgagggtgttaacatctaaaagtgagcaatttgtacaatttttatttgtttattgttacttaggtattcttttttatttcatgtgcttttatttctcattttcctttcactgaaatgtccccttatgtaattctggaaagaaaatgtaagcttgtgtttctttttttttttttttttttgagacggactctcgctcttgtcacccaggatggagtgcaatggcgtgatctccgctcactgcaacctctgcctcccaggttcaagtgattctctagcctcagcctccccagtagctgggactacaggcgcctgccaccatgcctggctgatttttatatttttaatacagacagggttttgccatgttggccaggctagtctcgaactcctgacctcaggtgatctgcccacagcctcccaaagtgctgggattccaggtgtgagccactgtgcccagctgagcttgtgtttctaattagtgaaaaaaactacttgtgagaaaaaaattattctgtgattatatcagctccaatctgatataaaaatctttctaattaagccagtacaatttttttaaggccaactgagcaaagaataatttagttcctttaaagtgtaaatgtgacaatattaatgttttttggtttgaacaaaaatctttttttttttttgagatggagtttcgttcttgttgcccaggctggagtgcaatggcttgatctcagctcaccgcaacctctgcctcctgggttcaagcgattctcctgcctccgccaccctagtagctgggattacaggtatgcgccaccaagcctggctaattttgtatttttagtagagatgggatttctccatgttggtcagggtggtctcgaactcctgacctcaggtgatccgcctgcctcggcctcc

SEQ ID NO: 36592 - DNA, 2300 bp, Homo sapien
cacttgtaatccgagctacttgggaggctgaggtgggagaatcgtttgaacccgggaggcggaggttacagtgagcccagatcgcgccactgcactccagcctgggcaacagagcaagactccatctcaaaaaaaagaaaaagaaaagttaaatgagtagcagatgtaattagaatgtagtattctttcaaaatgttaattaagcttgtgcttcatgtttatatgcctacaatggttgataaagtctaaaactgttaattgacatattatcatctggactgtttaattcttttgaaataggctatattttgcagagttggaacaaagattatgatgttccattttatgtgcttcatggtttaaactttagttcagaaattagtttcaatttttttttttgcataagtacacaaattggtaaatatttaatatgtgggaacatctggaaacatcttctgattgctaatgttaggatattttgttaaacatgttttaaaaataccctggtctacaagatagattaggctatttcagtactatgctcattgacaaaatgcatagcaataggcaataaacattctcaatattgacatatacacaaacatttctacattcattttgtagtattgcctagtgtaaataataagtagaatttgtttttgatgaaagaaaaaaagtacaggaaacaggttccctttaatatgaagtaatatgacttttttttttttttttgagacagtcttgctctgttgcccaggctggagtgcggtggcacgatctcggctcaccgcaacctctgcctcctgggttcaaacgattctcctgcctcaacctcccgagtagctgggactacaggcgcgtgccaccatgctcagccaatttttgtatttttagtagagatgagggttcaccatgttggccagactggtcttgaattcctgatcttgtgatccgcccacctcggcctcccaaagtgctgggatttcaggtgtgagccactgtgcctgactgacttatttttatctgtagtgtagatttcatttaggtcgaaaatcatctatttcttttttttttttttttgagacagagtttcgccctcattgcccaggctgtagtgcagtggtatgatctcagctcactgcaacctctgcctcccaggttcaagcggttctcctgcctcagcctccctagtagctgggattacaggcgcctgccaccacccctgactaatgtttatatttttagtagtgacgggattccaccacataggccaggctggtctcgaactcctgacctcaggtgatccacccgcctcggcctcccaaagtactgggattacaggcttgagccaccacacctggccagaaatcatctatttctaatgattgtagaattttgtcattatggtataacttcctctggtgggtctccaatattatttagtatccccaagtttttctattaaatgtttgtttttgttaatattaaacagtagaatgagttttgtttgttaaaaatagaaaggaaagaatgtaattttcaagcttcatttaacctaaaggtaagaatttaattagaactttggtgagtttttctgcctaatttagttaagaatctttctattgcttcactttttttaaaaaatgtttttttaaatataggaatttcagttatatcacaacattatgactttggatacatattagttgttatttgtatatgtgctatatcacttaacattttggatatatattagttaatatttatatatgtgtatataaaagtagcttttattcaaaatatcctttatgaaactggctcacagctgataaatctaaattatactctgattattaatctcacatatcacttatcatttcagtgaagttgggggttgggctttataggtaaatgaatgctttgcaaagtaaccttttatgtcttttagtcctgtcagccctcctgttgtggatctcagaactatcatggaaatagaagaaagtagacaaaaatgtggagctacaccaaagtcacatttagggtgggttgaaaacattacaaaagatcatttcatgttgtatttctgccctaagaattggacagacttactgcatctttcttattatttttctgcatttgatgttatagttaattatacatccttttctgggcaatttagcctccataatattatttcttaaatatgtgctaaagatagagttgagttgataatccagctcttgtagaatacagtattacatcccagaaacttgactctaaaatgatcattgtggactatt

SEQ ID NO: 36593 - DNA, 2300 bp, Homo sapien
agaatctcttccatttcagtttttcacttaaactgatttctttctccagttaacttgaattattaagatttttataccataaatataatttgaatgttattaaatctggataaatgaaagcttttttagctctctggttcatggaatgtaatgcatatatgtttaatgcatatgtgtttaattttttttaatttcatgttttaggattattaaagtctggtaagaccaattctgtggaatctcttccagaactgttgacatcagactctgaaggaagctatgcaggagtgggtagtcctagagatttacagtcccctgatttcacaacaggatttcattcagataagattgaggtttgttttttgaagcactacctccttaccttcagattttagatttatagatggtttatctttaatatttccttatttttgccctaattttaaaacagtttccaggttggtatataagaatcacaaatatagtgttagttttcttaaatttgcacaacatttctatttttagagattgtaatggcagttttgagccctttatgatgttatttctagtctttgtgcaactaaaatataatgttgatgtaaaatataataacactatagacatgttgaaaaaatatatttgtagctaaattattgaaatttatcttgtgaaatgtcagttaacatcagttaaaaattgtcaaggcaaatgatttcgaaaataagcctactttgaaagttcgcagtctctttcctccagggtattaactggagcaaaacaatttggaaatgatttgagttcttctcctaatctagcacattaagctgcaggattcctagcctaatcagctctggggagggcatttcttagacactccttaacatttgattccatagctgttaacctattagagaaaaatgtgtaactgaatagagatagagtcacttttctgtaactcctacacatccacaaaacgtatcggaacttctaggaattcataagacaacagaagtttaccctttcttcttagagtcttttaggcctcaaggattgatttgatttttttttttgagacagggtctctcactctggttgcctaggctggagtgcagtggtatagtatcagctcactgcagctttgatttcccgggcttaggtgattctcccacctaagccggcagagtaactgggattataagcacgcaccatcacgtccagctaatttttttatatttttagtagagatggggttttgccgtgttgctcaggctggtctcgaactcctggactcaagcaatccacccacttcagcctcctagagtcctggcattacagatgtgagcaaccacaccccgccaggattgattttttttaaaatataggatagaagtttgggggcaatttatattcacactaaggttggtctgtaagacaattgaggtttaaaggaaggctcagggtatattgtgagtgatttacaataacagaagaatctatcctggaaatagacatatcattttaataacttccttgacatattacaatagcagtagttttagggttcctttcaaggtgtcagtattatttgactttaattttattcacagtactttacatcagagtgaattatatgacatttatacaaaactttcattttgtttcatattcaagccatggatattaattttaaaattactgcttcatgtcttatttgtacaacttttatatattacatgttaactatttgtgtagagatttaatatgcaaactagtttccctaaaaattattttcaaagctcataataattcagttatagtcaataatgtgatttgagagttggctaaggcacaaaactgtagaagaacatgatttgaaaatactagatggcttattgtcataagattttattcttcattataatgtaactaatatttattaagtaccagctatgtgttagttactgttctaggtgcctgttaactttttttattttttttctctccccaggcgaaagtcaaaccgtatgttaatggtacatctcctgtgtattctagggaagatttaaaaccatgggaaaagtcaccaatacttaaaatatctgctccacagcctattcccagtaacagaattgatactaccagctctgccagttgggttgctggttctttcaggtaggatttttattttattctataactgttagtttgagaaatgtcattcatttttaatgcaatttaattttttaatgatgaacatttaagaaatattaatataaatttctaatgcacagaaaattgcc

SEQ ID NO: 36594 - DNA, 2300 bp, Homo sapien
gaataatgtcaagaatagttttagataacataaagataaaaaaaggatagataatatgcctaaaatttatttatgaagcaatgaaaataggaatcaggagacctagtaaatgggaaagctattatcttaggacttttctaaatttaaaattctgtgactctgtgttctctgtgttgtatgaattaccgttagtgtttagaaggaggcaggggtggattgatggaaggatgaataatggatagacagtcttgaaagtaatgactttccagtcacctaaatgacttatggaaaagcagatatttggtttgttttaaataatgttattgttaccatatgtgttagaatcttagaatttcagagctagaagagacattagtaatgaaataatttatgtcccttactttaaacctaaggaaagaagctcaaaaaacataagtgatttgaagtagtgaccaaaagaaataaaatttgttctcttgattccaggtccgtattttcctggtgtactgttctttctgtggccaggatatctgtagtcaaagataactaaaaggtcagatttaattggaggccaaaaagacctgttaaggaagaaaatttgagtatgaggccaatttcatcaaagacagttgcgtaaaagcttaacatctgtgtcgatcttaaagttagacaaacggcattcagcaaaactgtttttgaccagaagtaattgttggccacattaattgtcctctttttttctggatttatttctaactgacttttgagagtgttctaatattagatgtattctcttcgatgaaaatttgccagccttaaaaatattcaaaaagaggcaagacgcagtggctcctgcctgtaatcccagcactttgggaggccaaggcgggcggaccacaaaatcaggagctccagaccagcctggccaatatggtgaaacgctgtctctagtaaaaatacaaaaaaaattagccgggcatggtggtgcatgcctgtaatcctagctacttggaaggctgaggcaggagaaacacttgaacctggaggtggaggttgcagtgagctgagatcatgccaccgcactccagcctgggcaatagagtaagactctgtctcaaaaaaaaaaaaaaattcaaaaagattgtgtggcaaaaaaaatgtttaaatgttctttccaaattgtagtgataacaataaaagaaacatttagcttgttaaggtgatttactttaaagagaacaatgtataagagatggtaggttttatttttaaatcaattatacagcttttagttacaagttagataacatctttattttatagcttattttggtacttcatttagattctaataaatttgaaatgtgtggaaatggacatgtgaatctaagcaaaagtttgaacctggataccaggtgtggcatgaggccaggcatttagcttgcctaagagaagaaatgatatatacatttcacaacaaccctcttgcttcaagcgagctctcaatagccagagatttcagggaaaaacacacttcaaacaggccacagttgtcttctgcgggagcctctgctatggggtcagtcagctggctaagtgagaggcaaaaaggccacagggttcctcccacatagaatgaagctacccccttgcttgggtgcggagaccactgtaccaagagacagatgagaaagggaaaagaggtctggattttaattattttccctttctcctttgtctcttatgcggacaaaaatattttaaatcactttttagagcagatcccaaagaactatcttcctcaggttcattacacaattggtgtgtgattgtaatgaataaaattattgttttagaatctcttccatttcagtttttcacttaaactgatttctttctccagttaacttgaattattaagatttttataccataaatataatttgaatgttattaaatctggataaatgaaagcttttttagctctctggttcatggaatgtaatgcatatatgtttaatgcatatgtgtttaattttttttaatttcatgttttaggattattaaagtctggtaagaccaattctgtggaatctcttccagaactgttgacatcagactctgaaggaagctatgcaggagtgggtagtcctagagatttacagtcccctgatttcacaacaggatttcattcagataagattgaggtttgttttttgaagcactacctccttaccttcagattttagatttatagatggtttatctttaatatttccttatttttgccctaattttaa

SEQ ID NO: 36595 - DNA, 2300 bp, Homo sapien
acgaaaacctgccaaaatatgtaaattattacatgccatcatttgtaagtgaattcttattttagaaatatgtgaaaatatatatgacttagaattgaaatgtaatatttgtattgaaatgtcataaaaccttgaagaataaagatggtgtcagatttatttgctaatttcaagggtgagagtttaaaagtgaaatttttgtactcttgccctgatcttggctttaggtgtttttagctacccattttctactatttgcagtgattttaaaaatttaactttcccattatatatctgaacaaagcacatctctttttttcttgaactcttctttcttgctctcttcattatcttagttaatttcatggctatcctcctgaacactgtactttgaaatccaaaatgagtttttctttattattttggccctgacactcaaattcattcagttgtcaaaacttattccttttaactatgttggtcacatttcccctacctttgggttctcactgttactatgcagttgaggtcactgttatctgttccttctgggtagtgtcacagtagtgttttaaatgctctttctcctgtctacttctgtttctttaagctttctgtaggaagtagttacatcttccccctgtttacatatttataattgcttactctagaataaaggttaactttccttagcttccacctgacagcctttttgactttctaatcttatatctgttctgctttactgctacttcaagaagtgtgaagggaattcctgtccattttttctagttcatacttgctaggagtttgtcttggctttggcattttagttctcacttttcttgagcactgtagactgtctactccttggttattaaatagagaacaacagccctgatctccttttaagcaagaaaagaaaaatattctaaaataaaggacacagcatacaacaggtataagacatacatataagtgatattttacacttgtacagttgcctttgctggtcttcttcctcagtgttctttcatggctctggctgcacagttgcctttattaattccttgatgttcctagaacctaggaaaaggaggctaccacctcctttggtctctgattattaggaatatgtggatacttgttcccatgtgaacaactctaaagaagtttttatatgatctaattttatcatttcttcaatttctctgttcatcattagttgaaaatgtagattagtcaggagtgagacagagaccattattgactgcagttgcaacttttgatagaatcacaggtgagaaagaaaaagaaatgcaagaagccagatgtagaaaacaactgtgtttccctattggctggtactgatagagtaattaagaaaaatagtggagggaacaggaagctgaaagttacctgttatgtaggtagaatattctgggagagtctctaggaaaatgggtactttatatataatgttactacaattgtaactaaatccagaatcttttgcacagtatatcagatttttcactggtgtgaagaatattatgataagattgtgatgtacgtattttcaaaatatgtatatatttatatacttacatgtatatatatacacccacatgaattctgatagataactcaatatattttatagaattatttcatcagtttttcttagttttatatcttttttagttttatggaagagggaataactgctatgtaaatggaaaggaaagttgttcattaataaaagctttttaaaaatattcagaaaatgttaggtggaagattgtcagttcttatgtgtttgcttttgggtggcactatgccccttctgtattctgttttgcttagaatatgcttgtgtgtgagcttatttttcctcatagccaatcttttgaaattactttggcatattgggatggaagagttacatatttgccccagtattaacttatttttggcaagaaacttttttttctttattccaaatgttcaaatcgtacagctttagacataaatgtattttattttgctgtggtaatgtgccttttatctaattttgcaaatcttttctttctttgtagttaccctgaagaatgctgctatgctactggaatttgcagcaatgtatagtgcaaaacagttgaaactgtcttgtttacagtttataggattgaatatggcagctttacttgaagcaaggtaggtgaggtgcatatgttgtaagattgttgcaaaaggagatatttatatataatagcagatattattagtgatttaaatgt

SEQ ID NO: 36596 - DNA, 2300 bp, Homo sapien
tagatcttattcattcatcttataactgtaattttgtactctttgaccaatatcttcccattaccctaatcccctgacctctagtaaccaccattcttattaagttattttttgtatttgttgtgagctatgggtccaagtttattcttttacatctgtatgtcctattttttgagtaccatttgttgaaaagacatttgttttcccattgaattgttttagcacctttgtcaaaaatcaactgacaataaatttaaagttttatttctgtactcttcagttctatttcactgaactctctttatgccagtacagcagtgtcttgattaccattgctttgttgtaagttgtgaaattgggaaatgtgagttttcctactgtgttctgctatttcaagattgtattggctattttgggtttcttgcattttcatgtgaattttaggattagtttgccaatttctgcaataaaggcagctgggattttaatacaaatcacatttaatttgtagatcagcttgaggattattgtcattttaatatttaaatcttataatccattaacaccagctgtctttccatttatttaagtctatatatttaagtctttaatttctttcaatgatttttgtagttttcagtgtacaagccttgctctttcttagttaaaaattattaagaatttttagtgctattttaaatggaaatttttttaattttatttttggattgtcctttgctagtgtttagaattacaattgatttttgtatattgatcttatatcctgcaaccttgctgaacttgttcactaattctagtagtttttttagtggattccttaggattttctatatgcaagatcatgtcatctgcaaatagagatggttttacttatgcctttccaatttgggtgtgctttatttctttttcttgcttaattgccctgattagatgaatctctagtactctgttgaatagaagtggcaacagtggttgtccttgtcttgtttctgatgttaggaaaaagcattcagcctttttaccattaattaggatgttacttgtgggttttttgtagttgccatttatcaggttgaggaagattatttctattcctggtttattgagtgtttttatcatgaaagggtgtgggatttttgtcaaatgtttttctgtttcttaagatggccgtgtgtttattatactttatttttgtgtattatattgattgatttttcatatgttgaatcatcctttcgttttggatttattctgttaggtcatgttgtataattcctttttatatgttactggatttagtttcttagcgttttttgaggatttttgcatctttaattgtaagggatattggtttagttttcctgtgatgtccctgtctgtttttagaatcagcataatattggcctccttgtctgagttgggaagtgttcttcatcttctactttttgaagagtttgtggagaattgtatcaatttatcttgtattaattcatcaattgtattattcatctttaaatattcagtcagattaaccaattaagccatctggtcctggactcttctttgtaggaagttttttgatcactaattcaatatctttactttacttattgctaattgtttgcccccgtataaaaggctgttgtcactgggcaagctttatgtcaggtcaaataaagataagcattctagtgggattttcagagaactagcagacaggtcaaataaggatactattgctctacaactgttctgtctcctgtggctactaggctgtcaatgtgattccctgtgattatggagctgttggtttcagtactgctgtggaggaggggagaggaagatctgaacaggaaaggctgcagtgtcctgaatcccactgttcttaacaagattcaactgcttttcttaagtaaacacttcctagattattataagcttttggctgatttccagaattctggaaaagttgattatgacaattttccacagttgtctgtttttttttagaggagaggattagaagctcttagtctgtcattcctagtgacttcatctttgtctcatattttaaagctgttttctgtgtcagatttttttcttcttaatctttttttccctttcctctcttcctctgttatttttttctttcaatttatgttgttattttggcagtggctcaggggcaaaaagccattagtagtactgaggaccaagaaagttgttttattttttatttttttgagatggagtctcactctgttgcccaggctggagtg

SEQ ID NO: 36597 - DNA, 2300 bp, Homo sapien
ttcattttatgcatgatgatgacactaataatagcaatcgtttattgactgattactgttttcagatgaagaaaatgaggtacagagaggttaagaaatttgatttgagatcaaataggtagtgacagaagtaagatttgaacccaggacagataaatgactccaaaggaatatgatactatatgtttggctactccccgaagggaaacattgattctgtatttttgtttttttttcaatgtacccgtgtatactttgatgagctccctttattcataccaaacaaatttgcacttggtaagggctcaaaaatcatttgttgaattgaattatttcactggaatgtcttactgggcttatgtattttgctcataaacttacaaccatatccttttaaactcatctaccctttgctgaaatgtagaatttacctatgatagatacagccatgtatcagtcatgtcatttcatgtcattttagatgtagtatcatcaaattctatttgcatatctgtataaatggttaatgtagtatactaaagttaattttattttgtaggtccctcggcttgtggaaggactgaatggtcataattgttcccaagtggcagctgctaaggatcatactgttgtattaactgaagatggatgtgtttatacatttggtctaaacatttttcatcaattaggaattattccaccgccttccagttgtaatgtacccagacaggtaagctttactcttttaaataataaggttttacatttgcaataaaacctgtatgaacaaaaaaatgtaagttattgacagagcaacttattttatttctgttatttaactttatcttcagtggtatatactgtctttattatttattattattattattattttttgagacagagtcttcctctgttgcccaggctggagtgcagtggtgcgatctcagctgactgcaacctctgcccctcgggttcaagcgattgtcttgcctcagccttctgagtagctgggattacaggcacacaccaccatgcctggctaattttttttttttttgagtattttttagtagagagggttttgtcatgttgaccaggctggtctcaaactcctgacctcaggtgatctgcccacctcggcctcccaaagtgctgggattacaggtgtgagccactgcacccagcctgttgtctttatttttaacaggagaaattaagcatagtacatattagcatttgtttggagtaagaaagaaagcacttgggaaattctgcacttgggagattagccaccaaactgcatcttttaagtcttcataagcaaagggaggtccagatattttggatttgaaacttaaacactttttaggccctccataagaaaaaatatgaaatttatcaataccaaatgggttcatgcaagtgaggaactcagagacttaagttttatttgcttcagtaaatctgcctctgcacagatatcacacgtgacaagttgatgttaggggacatgggtccaaaaaccagtattctttattctacttttttactctcatgtgcacagccatctccagaaggtgcacagtagtgcacaggacaatcgcacgacaaaaaaacatctagcccaaaatgtcaataatgccactattgagagaccatggaaatatctaatttagaagcactgtgttttctattaagaatgagactggctgctttgcatattgcttgttagaaaaagaaaaatagctaaaagtttaataatttgattcttacaccatgtcaattttctatatgttaaaactgctgactgaaagtggctgcatcacaatgttttgtgttccgagaaggattcaggtcttagtatgagtgctgagatctgttagtgacaactgccaattgcacttgagtggaccactaacagcaagtataccatatatttgctggtctgctggatctttaaaaaattgtactaggtcataaatatatagtaaattgcagttttatttgtctttaaatagatacaggcaaaatatctgaaaggaaggacaatcattggcgttgcagcaggcaggtttcatacagtcctatggactagagaagctgtttacactatgggactaaatggtggacaactgggtaagaaatccttaatgacaatatctggaaattaaattggactctttaaaaaattatcttttctttttaatttttattgattagaatgagattatgagtgattttttgtttgtttgtttgagacaaagtctcactctgtcatcctagctggagttcagggt

SEQ ID NO: 36598 - DNA, 2300 bp, Homo sapien
ttgacctcatggtccgcccaccccggcctcccaaagtgctgggattacagacgtgagccaccgtgctcggcccccaaacacatttttatttgttttatcttgttctttttgttgctgttgttcaaatcagtgttttaagggggagatgatttttatgaggactatatcaaattacagaatgtattagtagaacagatctggagctattaagttggtacaaaagtaattgtaggttttgccattaaaaataatcgccattacttttagagggttggttgttgtgttggtggtggtgatatagttttagggggtataggtttgggattggattcttaaaagtaattgccattaatttttttttttttttgatacagagttttgctcttgttgcccaggctggagtgcaatggtgtgatcttggttcaccacaaactctgcctcctgggttcaagcgattctcctgcctcagcctctcgagtagctgagattacaggcatgtgccaccacgcctggctaattttgtatttttaatagagatagggtttctccaggttggtcaggctggtctcaaactcccaacctcaggtgatctgcccgcctcggcctcccaaagtgctgggattacaggcatgagccactgcgcctggccattgccattacttttactagcaaaatctgcaactacttttgtaccaacctaatagagaagattataatcatctagtttccaggtggagaaatcaaagtagttaagatcagaaaactagttagatctcagatttctgactctttggtgtggtatgaagtgggagtggaaaaatacagatttagaatatttcatacttccctctgatgcatagaagctttccctatacatatagtaaactcaagtatgtccttctaaatagtcttcttatagccaattttctctgctcccaaagactacacattaaggaagatctaaaagaccatatatattgaggcaaatttttctccttttgtctttaaactttttaatgtaatttttaaactattgaattaatcttttatgactttcggatttcagatcctgcttagaaaggtgttttgtactttgtgattataaaaaaagagtcttttgtattttcatccagtgcttttgtagtttcgtttttttgtttgcctttgaaccatctagaatttatattggtataagatataaagtaagtaccgtatctaaagttgttttttaaagatagctatccagttgttttaatacctttgtttaattatcatctcttcatgtgatgaaggacttttcaggcagaggtaacaatattaacacagtgcctgggtacttagtaaaaacggagtaactgatgagagtgttggttattgttgtgttggtggtgatgatacagttttagggggtataggtttgggatgggattcttagaaagatggtagatttaagcgtattcatagcttgtggggacataactagtagagtgtaaaaatacagcatagaaggaatgaaggactggaaagaaagagaaactccagagtacaaccaatgtgggttaactttaaacatgagagtggaaaaatggagtaaggatgactgataaaaatataggtaccataaatatgaaaggtcgatagatttaagaaaaaaaaggaattaacccgtttatgccagaggttgcaaatgttttttgtgaaaaatcagatcttggcgatgaccttgagcattaggatataaataactcccgtaagcttagtgttccagtaatggaacactaagcataaatgggttaagggcatctaaatatggaggtagttgtgttctaaagtactcaaggagagcgagagacagattttgaatttttattttctcttctctttctcttataggtcacccttgcaattatggatatttaaaagggtcagacagtgtggagggggagttcccctcctcactcccccttggtgcttgactccaggaataatttataaactgtggaatttttttaaatgaagaacttgtatttgatatgaactttatagagctatttataatttttttgatttaagtgccaaaaaattgtataaagatatatagttttatactattgtcaggaggatttaaattatcctaaaaaggtaatttattctctgtaacttcctcaatagcacctttgtgtcctggctttttcattttttaaaattagttttcacgattctgaagtaagtggtataaaaacagttaggatgagttcacccatgcctgactgcacatcaaagtgtcgatccctgaagca

SEQ ID NO: 36599 - DNA, 2300 bp, Homo sapien
gcgtgatcttgactcactgcagccttgatctcctagggctcagggtattctcccacttcagcttcctgagtagctggaatcacaggcgtgcgccaccatgcctaattttttttttaatttttagtaaaggcggggtttcaccatgttgtccaggctggtcttgaaatcctgggctcaaatgatccacctgcctctgcctcccaaagtgctggtattacaggtgtgactcaccttgcctggccgtaacttttaaattaatgaatgcctgcttggactaattcagccactaaggaaatactttattcattagcactatttatgaagtattattgtgtgtgactaaggctctctgctaagtgctatatatctctatcattacattttcacaaccccaaaatacattatttctcccattttgcaaatgaggaaactgaggcttcagaaaagtgaattaacttgcccagatacaagagagagaagttacgaactcaggtcaatgcatttatttacactagcagctttatttgccattattggcttctttgttcatgaatatgaaagtcattatatgtagcttctttttttaaatatctggagatacaacttaagcttattttctttcttttttttttttttttttgagacggagtctcactgtcacccaggctggagtgcagtggctcgatctgggctcacttcaagctccgcctcccgggttcacgccattctcctgcctcagcctccccagcagctgggactacaggcacttgccaccacgcccagctaattttttgtatttttttagtagaggtggggttttaccgtgttagccaggatggtctcgatctcctgacctcgtgatccgcccgcctcggcctcccacattgctgggattacaggcgtgagccaccgcgcccggccaacttaagcttattttcaaaaccactcaattttgacattacaaactggtttttgttttgtagaaggacattaagaataaagagcaaagaaacaattatgtgctgggaagggcagtaggagggctgggtcctagtctccctttctctttcgctaagcagctgtgtggctttgggctagtaacctaccctcccacaaaaaaggcttcaaaagagagcaagcagagctcagtgggcattaagacatgcgcaactcctttcttttagagattagatgaggtcgactcagtggcttgtaaaactcaacgtggcagagctgtacagccaactcatgattcttagtgtcgtttgttttgagtcacactacacctccttgaacaatcatttactgagtgcttaccgtattaggcattcagcagcagtgtgtttcccattcagtaacctagtattgattattggctactgtccctcctagcatttttcacttgaccactttctaaatggcctttagattcagagttcaagtggaaaaagcctagtgtaagcctggtgtcaggcagtgagtggcgtgacccgggtcggcagctagtcctacggtggtgatctaagagggcagtgacgccttctgaccaagggagtgactgccagataatccgggtgtatggagatccagagaggggtgaggctgggtttacggagactacacctttggctttgcagtaaccccactgctaaggccatgggaggaaactcttctgtgcaggacgcctatgcacttggcttctgctgcgtagcgaccgggtgtccaaggcatcctgccaggtctccttctccactcgggtttagcctcccccgcgagtctccagctacctagagagacgtttctaactacgagatggctggcctgaaagggacactcccatcaccgttgttggcctagagttccccgctgcggcctttttcttttccccgcccctggcctgagtcagcggccccaaggccggcgaggtcaagttcctttggggcgccagggaaaaggccatggcagaggtgctgccacgcgaaaccttctgggcaggcaccagccaatcatcaagagacatacaggagccccagccaaccagcgcccgccttattactgggaaccgcccgctcgggcccttcctctacatccccgttcccgattcctgtagtagcggctgtattgcagccgcctgccgaactgacccgggtctggggactggcccctctggcgccgttcggtttctcttattgccttcactgaggatgagtccctttgtggctctatgtggaccctgcggaatccaccggcgcagtttcatctagcgactggtgagggagggcttggcgctgcccgaccgt

SEQ ID NO: 36600 - DNA, 2300 bp, Homo sapien
gcctaagtggaacagagtagaactttgcacaaactccttaatcttgcctagaggcagaatgtgggatgtactatatgggaggcaggcaaatctgggcctggttcccacctccatcactcatttgaacaagttatgtaatttatttttgcgtcaattttcttgtctgtaaaactggagtgagaggacctaacttgagtaccgaagtgaagagtcaatgagataatatctgtgatcagcacagtgcttggcaagtggaagacactcagtcaagctaacttaaagccccagttttttcatttgtacaacagaacaacaacaataatagcaacaagcaataatactaacaatatttatcttgcctctgagttgtcttgaaaatcagatgagtatatatattatgtttctaaattctaaagtgtatctcactctcctaacaaagcagttggtcttcagatcaggaccagagttaataccatgccagagcattattacaggttttttccaatgagtaattaattttatttttaaacttatcatacagtaaaattgactcttttggtttacaaagttctatgagttataacacgttgtataggtttatgtaaccaccaccacaatccggatacagaacatgactacagctttagagattctttttcaaagtgttttacattcatgttgcaaaacacttttaaaaataagaaaagagatgtagataaacgtgctgaagatgcaaattaatgaaaccagcttttgtgcacaaatctctgcagtttccagtgttttcagcttttgtctgagccatttttgctgtcggctttgcagactatctctttctataaaagtaatcaggcgtccgttggagagttggggtctttcttcacactaaaggcacatgtcccaggcacaagcctcaggatccttatttgatcttttttaatacgaccaggtcttaaatttccgaaccatgttttccctaattgccattttctctctaaaatgaagaagcctggaagaaccttcttatcccttcggggaaattatttaattgggacaaaggggatgtggagttacagagagcaacgatagggctttcagaacccaaaacctgtctggtataataacagatccttccggtaaccaaccattcaatttgtccctctccccaaccccatcctctccatcaccatctgccagatgccccctgggacaatcgactttgaaaccaaacttctctcccaggtcagctcctgcaatccccactcctcatccttggagctttctccacagaagtgacttgacacaccgcgctacatctggggaggggggcgggtccgctttccgggagactcaagtctttgctatttgccttttgtttctgggatgcctttggctgcctttctcttccatctgcttttaattttggtaagagaaaagctaatgaatcaggaatgaatctcctctccactaatcttttttttttctttctctctctctctctcttaaagttggcgcgctctcttcacaagttccatcactacccaagaagtgagggggcgggggggacaggcgggaaggcattaattacacctaaatctgaagtttgcggcctcaagtaccactttgatggggagagcttctgaagcttccatacaacctgccgtgcctttgctgctgccgcagtagattttcagctcatttctttctgctgctgcttcgcgctgctctgtcatgcctaaatctatctcgtcactgccaaaggtgcctgaatcagggtgaattccacgagattcaccagcggttttgctccagtccaaggtaaatacagtatgcaaaatgaggaaccacccaaggatgtcggggaggggggagagaaagggattccctcaccttttccggcacattcctcgttaatttccaccaggaggaggcgcgcagcccagctcccctagtctctcttcttaaatccccctacctacggctgccgaggttggccgcgcgtcgggaatctccccgacagtcctggccctcccccgccccccgggttggtttttcccagctgcggaggttgggaggttgggccaggggctggggtgcgaagagagtcggcgcccgcaacgcggagccgggaagtcgtcgctactctggtggaactcagagttggttctggaggcggcggacgcggaggtgagcagtgggagcccgcggcctgggagagacccgggaggcgtcgttggggcccctccccatcctcgggtggagagtagggttggttcgggttgccactgtaccccgagtcc

SEQ ID NO: 36601 - DNA, 2300 bp, Homo sapien
tcactctcctaacaaagcagttggtcttcagatcaggaccagagttaataccatgccagagcattattacaggttttttccaatgagtaattaattttatttttaaacttatcatacagtaaaattgactcttttggtttacaaagttctatgagttataacacgttgtataggtttatgtaaccaccaccacaatccggatacagaacatgactacagctttagagattctttttcaaagtgttttacattcatgttgcaaaacacttttaaaaataagaaaagagatgtagataaacgtgctgaagatgcaaattaatgaaaccagcttttgtgcacaaatctctgcagtttccagtgttttcagcttttgtctgagccatttttgctgtcggctttgcagactatctctttctataaaagtaatcaggcgtccgttggagagttggggtctttcttcacactaaaggcacatgtcccaggcacaagcctcaggatccttatttgatcttttttaatacgaccaggtcttaaatttccgaaccatgttttccctaattgccattttctctctaaaatgaagaagcctggaagaaccttcttatcccttcggggaaattatttaattgggacaaaggggatgtggagttacagagagcaacgatagggctttcagaacccaaaacctgtctggtataataacagatccttccggtaaccaaccattcaatttgtccctctccccaaccccatcctctccatcaccatctgccagatgccccctgggacaatcgactttgaaaccaaacttctctcccaggtcagctcctgcaatccccactcctcatccttggagctttctccacagaagtgacttgacacaccgcgctacatctggggaggggggcgggtccgctttccgggagactcaagtctttgctatttgccttttgtttctgggatgcctttggctgcctttctcttccatctgcttttaattttggtaagagaaaagctaatgaatcaggaatgaatctcctctccactaatcttttttttttctttctctctctctctctcttaaagttggcgcgctctcttcacaagttccatcactacccaagaagtgagggggcgggggggacaggcgggaaggcattaattacacctaaatctgaagtttgcggcctcaagtaccactttgatggggagagcttctgaagcttccatacaacctgccgtgcctttgctgctgccgcagtagattttcagctcatttctttctgctgctgcttcgcgctgctctgtcatgcctaaatctatctcgtcactgccaaaggtgcctgaatcagggtgaattccacgagattcaccagcggttttgctccagtccaaggtaaatacagtatgcaaaatgaggaaccacccaaggatgtcggggaggggggagagaaagggattccctcaccttttccggcacattcctcgttaatttccaccaggaggaggcgcgcagcccagctcccctagtctctcttcttaaatccccctacctacggctgccgaggttggccgcgcgtcgggaatctccccgacagtcctggccctcccccgccccccgggttggtttttcccagctgcggaggttgggaggttgggccaggggctggggtgcgaagagagtcggcgcccgcaacgcggagccgggaagtcgtcgctactctggtggaactcagagttggttctggaggcggcggacgcggaggtgagcagtgggagcccgcggcctgggagagacccgggaggcgtcgttggggcccctccccatcctcgggtggagagtagggttggttcgggttgccactgtaccccgagtcccactgctgctttgttcccagactctcccctcctctttggagatgacttgaacccctttgagatccgaggggctggcggggcgcgggctggggggcgacagttgtagctccacttcctgctaatgcgagaaggtacaaaaagagatcaaaaagtcctgtaacctgaaacttccctcgcatcctaaccgggacctggtggagaggtctgggcgggggcggagacacccggaggccgaccttccgccgaggcggtgcaggaaggaacgggagagggagaagtttggtagggaaggaattggggattaagcggtaagttagacgcgggagacgagtctcctcgggaaaggcggagggcgggaggccggtcgggtttatttagtgtgggccagggaagaaggaagactttgcggtctgggtgtcgga

SEQ ID NO: 36602 - DNA, 2300 bp, Homo sapien
atcaatagagttttaactcaggtccatctcacggtgggtccagtggatccctgaatgcttcctgtgattattcccgaattccagagtgcttaactcaaattaacacacttagcagctggcagaatccccacgttagttccccaaagtgtgtattgaggctattatggtagaaaagaccaagtggaagccattagaactgcctttatctgggaaaatagtacatcaaaaccaaaaacaaaccagaagtctttttcattgacttacaggtttgtagctattctgtagaattgaggaaacccagtgactaatttctatctaagtgcactatgcctgtgatgtgactaacttttataatcttccatatgtgtaagcagagtctctgggcattattttctaaaaagacacagaagcttcagaactatctccttgtagtgaccaatgctttgtcttctgaaactaagtagttttgggaaaatgtttacagaatattaattttaccagtatatttaatatttagtttggaatatcctaatttggagtcaacttgcccacaataaaattattagtgtattggggagagtcttaattttcttttttgtttctagaaaccaccaagttttatatgacagagataattattcagtcatctgagaggagttttcctatcataccaaggtacaaatagcaaattacatttatttatttgtaatttatttttttccccattcagacctttattttttattttttggttttgaatttattttttattttaataggtttttgggaacagatgatgtttgcttacatgaatagtgataatttctgagatttgggtgcatccatcacacaagcactgttcactgtactcaagtgtagtcttttatctcttacccctccccctgccttttctccaagtcctcaaagtccattgtattattcttatgcctttgcatcctcatagcttcgttcccacttatgaaggagaacatacgatgtttggttttccattcctgagttacttcacttagaataatagtctccagttacatccaggatgctgtgaatgccattatttcgttcctttttgtggctaagtagtattccatggcatatatttgtaattccaaatgtaggaaaaaggaagtacaattgatcatatgggaattcatttttattcatacctttctttatttggaaaaggaaagagaaagcctttttgatagttgaaccaaaccacacatataaaagttttgaggattttaaaaaatgttttgatcatatagtgctgtagacaaatgtgctcttataaatcttctaattctgaaagttttctatgcttatttctatgtgccagatatctagaatcttatcacccagtcaccaataagttttttgaataatttctggttttaatttgaattatttaaaatttgaaacatgggtcagtttcaaatgactcctatgttttaaaaacatggtacttagtcactaaatctattagtgtttttatttctttgactctttagtttgcaaacaagttaaccatgatatgtctttattccagtttatttgttgatatccaaaaattatagcaatctttgagtatagccttgaacttatccttatgtaaatactttgattctgtacctcagagctgacactttagggagatccaaatggaagaaaatgtagacaatactgtctgatgtttggaaggaaatttcttgccttcttttgtaagttagttattctctgtttaatatgctacagcacaaatggagtattgacttgttctaacatggtatttttttattcagtaggggtgaatagttaggtttggtgtggaaagtgtatcaaggattggagaataggttttaagaagaatggagcaaacctgaatacattaaaatatattaaaatccacatcagtgcagattctgagggaatgagcagtccgtagaaaagtctggcatgtggatatgtctgccttttaggtaccgtgtgtgtattttttgcttatcttgccagttagagttattatgagatacacattgtaaaaattgatttctgttcaaacaggtcttggtttgtccagagcgtgatcgcccagtgtctggtgcagctctcctctgctagaagcacttttagattcacgattcaaggtcaggatgacaaagtgtatatcttggtaagaaattattttatccagctttttgtagcctaggaatccaaggtctcagaattcttcagttttttcatccttttttcttaattctcaggtgtggaaaataagtgat

SEQ ID NO: 36603 - DNA, 2300 bp, Homo sapien
gagagactcaccagcccccgacccccgggcagcagtaaagcgagctgggcactgcgcctagaatcccagttcttaccccaggatcagaagcgcgctctgcagctgtccccgcacctccagaaacacgcgcgtctccgccgcagaagccgccatggcaggcttccagtcccagaccggaccaagctggaggttccgaggggcccgggtcaacaggaccaggagaggttccacgtgcggaccaaccagcggcagccccgctgcggcgcaggcgcctgtgccagatcgcagggctggcgccgcctaccagctcacagcgccacctgccggccggagagtgcaccaccgagaaggcgcgtgaccccggaggccggggcggggcgcgcattttcaaaaccaggctttggcccagagtgctgagaaaggtgggcggcgagaggctagctatcgccccactctgcttcttatgagcgtgacttggcgcgttagcatccctggaaatgaccataaaaatcagacccagggttcacacctttggctagctcgaagggagggagatgatggaggcaagtgttacaggtgggctttgtccccaggagatgcaagaacagaattcccggccccaaacccactttatcttggtctctttatgaacaagggtcgtttgttagcctctatctaaagcgacaaaattttcaagaattgacttgccattgcttctcaacttagacaggatagctccaaaattgaaacaggtgcaaaaatataaggaagttctttgttacctaatgcagaagagtgtggctgaagtctatcaggactaaccattttttagggggtaaaaaaggaagatgagaatgattacgtatgtacagctccactattcactttcacaaaagtaaaaactaagagaagttggagaagtttactaccagaagatagttttgaaaagtttgacacagtaaagaacctggtataatgtaaatacttataatgaagaactattaaaatataagaccgggtagaattacaatagggcttcttaaaaacaaggagctgcttttatttatttattttttttcggagtctcgctctgtcgccaaggctggagtgcagtggcgcgatctcggctcactgcaacctctgcctcctgggttcaagcgattctcctgcttcagcctcccgagtagctgggattacaggcgcacgcgccaccatgcccggctaatttttctgtttttggtagatccgcccaccttggcctcccaaagtgctgagattacaggtgtgagccaccatgcccagcctaaaccataaataaattctaaataaataaatcctgtcatatattttaagataatagcttgacaatttttctaaaatcagtatttggggtgattaaagtttattatgttgatgcacaaattattatatctatcacaataatttgaagttatagatggaagcaacaactcacttaaaaaaataaagtttactattatttggtctcaaataattcatctatttgaaggatgatgatttcaactcttcatatcttccacctttagtacccgaggctattgaatgcttaaatattgacacattatattgaaatatacaacttccgtagcacaacttactctttataattgttttgttagcttaaaagatttttatatatttagttacgtatttgtaaaaactttcatttttttacggtatggtgttggcaaaacggtgcaatttaccttggagtaactagatatgattgatagagctctagactcaaaatagttccaaatctgacaccaactacttgtctcctaacttcacaagtctcctaacctctctgggatgcaggttactcatatgaaatattgagaaactattcaaataatatttaaaagctgttttcagttcctattatctcttcaaatgaaaacatctgctaaccccctttctagccactcctgaaattggtagccatggccgcttcccgcgacagtccacttgagggcgctgtggcaacagctagcgccgggaggcaggaagccgatcgggggcggggatcgaaggcctcagacgtcgacgccggcgtgggcgcgagcacggtgcactctgggagctgtcactaggcccttcggctcccggtctcggtgtagctgccgtggttgccaggagagctgcgccggcgagaagcggccgagccagcagcaggtaaaagcgtccctgcccccagtgcggccgctaggctggtagccggctccgagcatccttctcggcccggctaggtcctgagccgc

SEQ ID NO: 36604 - DNA, 2300 bp, Homo sapien
cagcttcgcagctcctggcggggccggagcggcaacacccccgacgccacagcagtcagactcgcaaggcgtccccgcggctcaggacctagccgggccgagaaggatgctcggagccggctaccagcctagcggccgcactgggggcagggacgcttttacctgctgctggctcggccgcttctcgccggcgcagctctcctggcaaccacggcagctacaccgagaccgggagccgaagggcctagtgacagctcccagagtgcaccgtgctcgcgcccacgccggcgtcgacgtctgaggccttcgatccccgcccccgatcggcttcctgcctcccggcgctagctgttgccacagcgccctcaagtggactgtcgcgggaagcggccatggctaccaatttcaggagtggctagaaagggggttagcagatgttttcatttgaagagataataggaactgaaaacagcttttaaatattatttgaatagtttctcaatatttcatatgagtaacctgcatcccagagaggttaggagacttgtgaagttaggagacaagtagttggtgtcagatttggaactattttgagtctagagctctatcaatcatatctagttactccaaggtaaattgcaccgttttgccaacaccataccgtaaaaaaatgaaagtttttacaaatacgtaactaaatatataaaaatcttttaagctaacaaaacaattataaagagtaagttgtgctacggaagttgtatatttcaatataatgtgtcaatatttaagcattcaatagcctcgggtactaaaggtggaagatatgaagagttgaaatcatcatccttcaaatagatgaattatttgagaccaaataatagtaaactttatttttttaagtgagttgttgcttccatctataacttcaaattattgtgatagatataataatttgtgcatcaacataataaactttaatcaccccaaatactgattttagaaaaattgtcaagctattatcttaaaatatatgacaggatttatttatttagaatttatttatggtttaggctgggcatggtggctcacacctgtaatctcagcactttgggaggccaaggtgggcggatctaccaaaaacagaaaaattagccgggcatggtggcgcgtgcgcctgtaatcccagctactcgggaggctgaagcaggagaatcgcttgaacccaggaggcagaggttgcagtgagccgagatcgcgccactgcactccagccttggcgacagagcgagactccgaaaaaaaataaataaataaaagcagctccttgtttttaagaagccctattgtaattctacccggtcttatattttaatagttcttcattataagtatttacattataccaggttctttactgtgtcaaacttttcaaaactatcttctggtagtaaacttctccaacttctcttagtttttacttttgtgaaagtgaatagtggagctgtacatacgtaatcattctcatcttccttttttaccccctaaaaaatggttagtcctgatagacttcagccacactcttctgcattaggtaacaaagaacttccttatatttttgcacctgtttcaattttggagctatcctgtctaagttgagaagcaatggcaagtcaattcttgaaaattttgtcgctttagatagaggctaacaaacgacccttgttcataaagagaccaagataaagtgggtttggggccgggaattctgttcttgcatctcctggggacaaagcccacctgtaacacttgcctccatcatctccctcccttcgagctagccaaaggtgtgaaccctgggtctgatttttatggtcatttccagggatgctaacgcgccaagtcacgctcataagaagcagagtggggcgatagctagcctctcgccgcccacctttctcagcactctgggccaaagcctggttttgaaaatgcgcgccccgccccggcctccggggtcacgcgccttctcggtggtgcactctccggccggcaggtggcgctgtgagctggtaggcggcgccagccctgcgatctggcacaggcgcctgcgccgcagcggggctgccgctggttggtccgcacgtggaacctctcctggtcctgttgacccgggcccctcggaacctccagcttggtccggtctgggactggaagcctgccatggcggcttctgcggcggagacgcgcgtgtttctggaggtgcggggacagctgcagagcgcgcttctgatcctggg

SEQ ID NO: 36605 - DNA, 2300 bp, Homo sapien
atgaggtcagttaggtttgatatctttcactgtcataattttctcagctatgattttgcaaaggctcttaggcagagacgagcaccaagcagacaagagatgcagctataagataggcagaggccaggtcttagagggccttgagctgttcgagggcttttgttgtttaggagcaccgggaaggccctgaaggggaaaaggcaaatggcataattacgtttgtatattagaaaagttactctggctgcagtatgaaatgtagaggagaaacaaaaacagatgtgggaagacctatagtagcgcaggtgagaggtggtgataacttgtgccaacaagatacgaggagtaaaaatagaaatggatggattagcaatatatttaggaggaaaaatagacttagtaatagattgataagggtaatgatcactaacacttaatgagtgtttactaagtgctagttattttgccatgtgctttatatataccgttatgtaatcctcatagcaattgtaaaatgtaggaattactgtctctcaattatacacattaggaaatggtggtttggagaagttaaataacttgccaggtatcacataactagtgaatggcagagccctagttgactcaaggcctgcacccttaacccctctactgatatgaaagtggggaaggggaggaggggtgacgaaggtaccaagaatgacccctaggtttctgtcttcctgactcaaggaaaagtgtcattcactgaggcaaggaacattgcgtgaagcccagctttgggcaacagggctttagttcatgatgctattatattctgactcagtcacccaaggaattcttacatataacttttacttaaactaagccagaaaatatgcttgatatttatacttactctatcctattgtagggagtaaaaggctaatatactccagttctactccaggaatggttcatttgtttgtttactgtaattctctcatcttcccctctagattataaaatattccttttatttctactacctaatacagtgtctggcacatgataggagttcagtaactattcactgaaagaaagtaagattaatagcaaagatttaattagtactatacacatttcaataaaaatttcacattcatgtggccctgaacagatgacctattagattttatttgtagttattaaaatgtcattttttaaccttacatatctcattcttggcattgtttagacattaggaaagtgatttcatgaagtagatgaaatagtcatttgaaaacaaggatatagatcctagagacttgtatatatgtatttttgtcctcaagaatctaaccttatgtatgctgtgtgtgtagtgcatagtaaatacttggtgaatgaataaatcagtgtggggctgctttaagagtcaacagaatgggcagattaagttgtgaatagtctaaaacatctcaaaagtggtcatttctaattcctaatatgtacactttgctactcagccttttgttttcttaaaaatctctaacaggtatcatcagtttctcatgaaaatcctactgaagtgtttgaagatggagaaaatccaccaagtagtcgatcatcagagagtggattcactgagtttatacaatatcaagcagaccgaactgatgatattgacagagaactgagtgagggccagggggcagctgccatcccaattggtagcacatcctctgagacagaaacagcatccactgtgggatctgaagaaaccatcatccagaccccttccgtagtcactcaggggacagcaacccgaagtaggaagacagcccaaaagactgcaatgcagtgctgcttggagtatgtccaacagtttcttaccagacttatcaacctctacatcattcagaataactctttttctcagtctttggctacagaacatcaaggggatcttggtcgagaacaaggagagacttcaaaatgggacagaaattcacaaggagatgtaaaagagaaaaacataagtaaacaaaaaacttctaaagaatacctgtctgccttccttgctgcctgtcagctcttcctagagtgctcaagtttcccagtttacattgctgaggggaaccatacatcagagttacgttctgaaaaattggagactggtaaggtcatctcagttttgcttatatttcagtattgtctgtagtatgttttttctttttaaaagaggcactcaaaactggggtttttttagccagttactttttttaatgttttaatttgcaagtttttttaaaaatgaa

SEQ ID NO: 36606 - DNA, 2300 bp, Homo sapien
ttattaaaataaagtgatacatgaatacaacagtaattgttgaaagaactgcatgtgagattttctccatgggcttattttctcccctcctcatgcactagcaatgctgtgtggaccatgtcagaatgtactttgtcaatgaccatcttagaggatgtgggtctctcagttgactctttcagggcaggaatcaggcacagctctgattagagacattcttcaattttgatggaaatatctttagagcttagttagcaattctggtcctacaggctctgtagatacttcattgggaatttatagtaaatctgtaatgcacattttgtatttcatgagtcattttcctcatcttttaagagaagaataatgctcaactttcaaggttttattatgaccatcagatgtagtcatgtttgtgacatgcctaaatattcactattactatattactacaaagtccatactttatagttgagtgatgccttctatacagtgatattgtccccttagattaatttatttcatttaagggacaaagactctcacatatgtcatttgtctcttgacaaaccctgtggtggtaatgaaaagatcattttactgagcaggttgctgatgcctagaaggctatggctttctcagagtctcatggctattaagtgatgaagctgaaaccaaactgtcatagtcctacttcatctctagtgtgtttctacagagtcttggttcctctctctggcttcttttctattccttcttctgaatcttgtaagaatttgcattaccctgcttattgccagaatgtctttgtgttaatgctttatctaactgtctgctgaattctcacctcccctctgagatcagtgccagacctcatcaatggtatcatgattctttccctaaatttgctagcatttggtatgtactactttgtatgtcactaagccttccaccttttctaaaagaagaccgtcattattgtatgccccctaaaaaatacagaaatgaattatgtatttgtggtttgctgctaattttaaagtctttagagagcttagaaacagcataactaaagtgaggtattaaggaggaaaaaacaaaactttcacctgcaataaaataaaatgtaattttaggaaaatataagtagatgatgacactaatgattaaaaattttgatcagtctacatttctacatttcaattattttaatgcattttgtatttttcttcttttactgtttttctcatatatcagtgagccaagtacaactcatcacatcaaaaggaaatggtgaaaagccacttaccatggatgaaatagagaactttagtctcactgtgaatccattaagtgacagactttccctcctaagtaccagcagtgagacaattccaatggttgtgtctgattttgatcttccagaccaacagatagaaatacttcagagttctgactcgggatgttcacagtcctctgctggggacaacttgagttacgaagttgatcctgaaaccgtgaatgcccaagaggattctcaaatgcccaaggaaagctccccagatgatgatgttcaacaggtagtatttgacctgatatgtaaagttgtaagtggcctcgaagtggaatctgcatcagttacatctcaattagaaattgaagctatgcccccaaagtgcagtgatatagatccagatgaagagacgattaaaattgaagatgactccattcaacagagtcagaatgctttgctgagtaatgaaagttctcagtttctgtctgtgtctgcagagggaggccatgagtgtgtggcaaatggaatctccaggaatagctcctcaccttgtatttcaggaaccacacacactcttcatgactcttctgttgcttccatagaaaccaaatctagacaaaggagtcacagtagtattcaattcagcttcaaagaaaaattatcagaaaaagtttcggagaaggaaacaatagttaaggagtcaggtaaacaaccaggagcaaaacctaaagtaaaacttgccagaaaaaaggatgatgacaagaaaaaatcttcaaatgaaaaactcaaacaaaccagtgtattcttcagtgatggtctggatttagagaactggtatagctgtggagagggagacatttctgaaattgagagtgacatgggttctccaggatctcgaaaatctcccaatttcaacattcatcctctctatcaacatgtgctcctgtatctccagttgtatgattcatccaggactttgtatgctttctctgccatcaaagccatc

SEQ ID NO: 36607 - DNA, 2300 bp, Homo sapien
aaatatgaattgtctaacctttgtagctccaagattaatagtggtaagagatgcggatgcggcaatagtcatcttttctgaagaatcagcttgatgcagtatgctccaaagcagtgtcacagaggacatgatcatatgaaggattgagaggattccactgcgtgcttcaaacaagtgtttctggtctacactgaccaaaagctattaacagttgggggaaaagaaacatattacttactgagatttacaaatggaaatttattagacctcacagtctttcaaaagaagtcaaatatttgtgcagtcttacttggtgatactgtgtagttggatccaacaaacagtaatggataatggctgtaatcccttccaaaagagtaagaatcatatctggtggaataattgatgccatccacagaggcctgaagtaaaatgcattcatttaaacacaagttttatgatagtatagttcatattttatcactagtaaatactcacaatgtgtcaggtacacagaagatgtgcaataaatactagattaacaaatggctaaaagaataaatcaggggcttttatttcctaatctataaaataagtgagttggactaaatgtactagagttctttttggctaaagaattctatacaaaataaacaaatgatggctagtgactctctagccactgaggaatggcaggcatattaatattaaacaatacaggcagttttcttattattttacatgtagaaactaaggttattctgaagaaaaatgacagtctactggaactaatttttcagacttcattttgagcatagagactcagatcgaattttgtcactaaaccatgaaaatccaaaacaagaaataaaattggatggaaaagatttgtaaatttaaattattttcagtctgaaattgatttgcacttagataaaacagacaaaacctgggaaacccttttctaagcttcccattagttttgccagctcaggcaagaagagaagagcattgaaattaattttagatcttggtagaaaataagcctgtttaaatattccttcccttttccattctagattcttttactgatactcttcctcaagtcaaattttcttttttgtggaaagtaatacactatttgtaacctaccaaaaaccattactttatttactcaagttgtgaccaactttccagacattaagcagtcatatatgtgaaaaatgtcagtaccaataaagttaaaaatcacctcttacctactatcagataatcctgtttcgtatttgtactgctgaattagattatctaaatttctgcacagttgtagtgtcacagaaacaaccactctctgcagaacttttcccatgtaaggcagagtagatgtgattaaaccaatccattgtgggtgcatcttacatgcacagtgctgatgcaaagctcgtatcactgcacagaggaacatgccttgacatgtgattggctgagcatgcaaatactgaagagaagtcatgggttgatggggactgatgtgttctaagtcagatacaacaaaatcaaaacctgtttcattctcttcaggaatagtcattactctgtgttctagaacaatcagcctctgaagcaccttaagaagttgtgactgcaacgtgctgccattgtcaaattcatcctctgagaaattaataaggctgtcctctgagaaaccttcttccacagcaaccaggttcttacctgccattttttcactatgccatttctgagcactaaagatagatgacagcaaacaatgaagaatcactttctgaactttgcacttagataacatatcagaaataaaactagggaaacccttcgctgagctttctattacttttgccagctcagtgaagagtagtgtcagaatttctatgctcatcatttgcatgtttcgattgcctattaaatcttgtgcagtaaccttgacatgagttgggtaatggctacgcatgtaatataagcagagagaaataagaatttctatgtacatagaactccggaagttatgatttgagtccactggaatgtgactataaaaatctttgcccataacagaaatccggtgtctggccaatagattctgaaggagagacaactgaggagtatatgcattatttacactagtagttgaaatggcatttacaaaagctatagggttagttttcaagatggctttgatggcagagaaagcatacaaagtcctggatgaatcatacaactggagatacaggagcacatgttgatagagaggatgaatgttg

SEQ ID NO: 36608 - DNA, 2300 bp, Homo sapien
ctaaaaaagcacaaattgataaacgtcagtggtcatcaatatcattctctggcctcttgttaatttccaagggcaggtgttttatttttattatatattacactcaacactatctttaatttagtggctatatttaaagctcttaggaattgatcacaaatttgaactacactaattgaacagatatgtgtaataagactcaaatacacatttcattaaaaatctcaacctcattctgatagcaccaagcataagctacctaaaatagtgttgatacttatagagtacatgaatcatttaaaagtgagtggtggactatcaacttctgatatatggaaggaaaaattgacagtctttccattccttccatctgttttcaacttttaaaatagctcatgtgttctgaatttttcctactgagtggaagagaactgcatggctcattaatgaaaaattgatgattttgttctttcaatttttttaattaaaaattggcagtaagatacagagtagttgcaacaatgaaaaagcaaaggcagtattcttcttcactacaaaattgatttcttttatttatagaaacatctttctttggaagtctgcatgcttcagtttttctatgcttatattcaaaggtaagattactgatattgatctgtccttactatgttgctagaaacagagaaacattatttatggatatattaatataagtaatgagtgtcttaacgacccagccatgtatatcctacaaacctaaagacctaaggatattgaagattcctagatagtaaaacactgaattgtgataaaatcatttaaacataaatgaaaagttgaacctactctcgaaactatgcatattgccactgaatccattattttggtataggtgaacatacagtaattcattctgcttttttaatgttaggaatgattacatgaaatatcttcttactatcatattccattttgcgtttaactgacctgtgaacagaagttatgatttgagtttttataacttcttactcaagaacctgactcttcatcctcctttataagataattccattttattcaccaaactcagcctccatttgtaatctatgactagcattataaggtcaggctattgagtgtatttaaactggttgtgacctagagcaagcactgcctaaaatctgaacttatatacagagaggtgttagggttaaggtcagactgaaacaaagatagtcttcattatttttacaggttaaagactaatgttcagttgacagccctccataatatgaggtagagacgtacaaggtgaaggaaaaagaactaagagggaaatggagagaccaggctagggagtacatgactgtggtatcagtagttaaactgagaattactgcagttgtattttacttttgagatcccatgtgataaatgggatttcaatagaaaaatttctagattaagaaattgcaggctaggggcggtgactctcgcctgtaatctcagcactttgggaggccgaggcgggcggatcacgaactcaggagatcaagaccatactggccaacatggtgaaaccctgtctctactaaaaatacaaaaattagctgggcatggcagcgcacgcctgtagtcccagctactcaggaggctgaggcaggagagaattgcttgaaccggggaggtggaggctgcggtgagccgagatcgcgctactgtgctccagcctgggcaacagagtgagactccatctcaaaaaaaaagacaaaaaaagaaaaaagaaattgcactggggccagatgcagtggctcatgcccataatcccaacactttgggaggccaaagcaggtggatcgcttgatcccagaagtttgagaccagcctgggcaacatggtgaaattccatctctgttttaaaaaaaagaaagaaattgcattgatatttcaactgtgttggtttactaattaacgttagtaaaaatgtaaagtttttaggaattttgttctatcattgtctataaaaatttagagaatgttccacaaactagtagaaaaccatagtttattgtggcttttgtataaactatattatcttgcagaattccagtgcccaatttagtggatagctgggcgtcactgttgatacttctgaaagactctatacaactgagtcttccagctccagggcagtttcttatacttgggtaagcaatttcacttaatattatttcaaataaaaggataatgttaattgtcctagttgccaagtattagtaatagatattttaggtgacagt

SEQ ID NO: 36609 - DNA, 2300 bp, Homo sapien
gtagcttctacctaggatcacagattcagctactcagtgtatacatatatattattaatttttttttaaccaaacctcgatgaaattaagtaaaaataactggttgtcaggccaggcacggtggctcatgcctgtaatcccagccctttgggaggccaaggagggcggatcacgaggtcaggagatcgagaccctcctggctaacagggtgaaacctcgtctctactaaaaatacaaaaaattagccgggcatggtggcgggcacctgtagtcccagctactcgggaggctgaggcaggagcatggtgtgaacccgggaggcagagcttgcagtgagccaagatcacgccactgcactccagcctgggtgacagagcgagactctgtctcaaaaacaaacacaaataactggttgtctcattgacaaaggacatacatgtgggttagttggggttggagtgtcgtttggctatggaaaagcagtactcagggtagaggaaagcgattcaattatttgagtgtcttgcacacactggacactttatataccttgctgtgtaatccttacagtaacacagggagaggtgttactgtaatttccattttataagtgaagaaacagagatttatcttcagttatatcttataccaaagctcatatttctccattttaccttgatgctttctatcaatcattgtggggtaatatctcaaaagggatctatttataaaaagaaaaatgagtgatggaatgttaggctgagccttagagttatccagtctaatttcattttataaataaggagtactaaaggcaagtttctcaagagctagtttcagtattctttgttatacctttcattgtcttccacagagatcttcacctcattgttcgtattttatccatccacaaaaacacttcatttaatcatgctgcatgtgagaaagcacatgatataggctgagtatcccttatccaaaatgcatgggactagaagtgttttgggttccagattcactggattttgggatatttgcatatatataatgtgacatcttgggtatggcactcaagtcggaaacactaaattcttttgtttcatgtatgttacataagattaaaggtggttttatagaatactgtaaatttagtgcatgaaacaaagtttgtgtctactgaaccatcagaaagcaaaggtgtcactctgtcagccacccgttggacaatctgtggttgtctggcatcaccatcattcctaaaactctgaatttatatgctatcaatcaataagcaatcaatcatttttttacacttattcacacacaagtattttaatagtaaaaaatatgatacatatctggcatgcatggaaacgatgtatcatagctgaaggaggctgagagggtctttttcccttggggatgctgaatgaactgcgggcctgcctttagtgggttttttttgttgttgttgttgttttgttttgagatggagtctcgctctgttgcccacgctggagtgcagtggcgcaatcttggctcactgcaacctctgcctcccgggctcaagcaattctcctgcctcagcctcccgagtagatgggattacaggcgcccactaccacacctagctaatttttgtatttttagtatagatggcgttttaccatgttggccaggctggtttcaaattcctgacagtgaggtcaggagtgcatttgttttttattaagagacaaggtcttgctatgttgcccaggctggagtgcattggctgttcacaggcattatcacagcacactgcagcctcaaactcctagcttcaagtaatcatcccatctcagcctctcctgagtagctgggactgtaggtgtatgccaccacacctggcagttgtatacccacattttgacctgtcacaggaggccaggtgtggaatttttcacttgtgattattttggcactcagcatgtttcagattcaggttgttcaacctgtactgtgattggttttctaagaaaaaacatccatttccaagatttgcttgtgttaagtggtttcttccatttgtttccccatttgcaggcagctggtgatgctatttctgacatgctggtgattgaagcaatcttggctctgaagggcttgactgtacaacagtgggatgctctctatacagatcttccaaacagacaacttaaagttcaggtgtgagagaaactttaaagtaacttttttgaatattagctaagtaaaacctattatcccaattctcattatatctcactgacatatgtttc

SEQ ID NO: 36610 - DNA, 2300 bp, Homo sapien
ccgagatcgcgccactgcactccaggctgggcgacagggtgagactccgtctcaaaacaaacaacaacaaaaaatcggcccttagcccactaatactgttttctctgggatactcccattaagtggaacttggggtttccaacctcagtcagtagttttccttcagtagtccatatactacatttcctgggtcaattaattcccaattagcccagagatgaggagcagtccgccagctgctagcctcataattttgttttctttattgtccttcattgcttcaatgaacagaacttgcaagaaatggtgaaaaatacttgcttttgtccagttggaaaaagctggcattcagtaaactaatttagttcaagacagtgatcagatctctttcctaaggatgaatacatatttgtaaaaactgagcagtcagttatgtgtcatgattattcataagagtgtaaaccagtcctgttaactccaaaaagccattaaaaaaaaaaaggtccagataatatgagttcatcctttcatgcgttttaggccctacaactactttcaatgcctctgcgaatgcctttattgaaagcatatttgccaaatccagcgtccacgcaaaaagttaagagtatccccctactctccattcaatcttcaaatctccttggtgcctctctcccgcctaccctcgaatcaccgcacaagggtgattcccggcactccaccctgaggtccccgcctaggtccacgtaccagagccccggcaggagacccgcggcccgtcccgaccagcccgcccgcggggcgcaggggcctgtaggtgtgtcccgcgcgctccgccgctcggtcagtcgcccgccagaccactagcccctccgtcgggccgagaatctgacctgtcccgctcccaccgagcccttgccgaccggtagtctcccttctcaactccgagcctcggggcccggcttacctcggtcaggaagcccccttcacctacacgcagcggagaagcgcccaagcaacaacgtctgcacccaaacccagtcctcagaaccgcagacgtggccctgcgtggcttccggctcgtcgccacgccccctggccaatcacggcagaggactatccgccagccccgcccccgcctcgccgcaggtcgcgcgcagctggcgcctgaggaactgcggctgcggttccgagcggggtctggggctgttaccattgagtgaccagaaagggtgaggcccccgcggtggcccgggggttggggccgagggtcgcgggccctcagagcactgcggccgcggaggcacagcctccgcctccaaatccgggcctctgggggcggcaggccctgcgttcctgggaagccggggttcctagtggtcttggctaggggcgggggtggggaatcagccccgtcgctgggcctcggacagggcgacctcgcccacagtgagcgccgccggcggcccgcatccccctctccgacgtcgaggtcatctcccaaacctttgaatctgggaagccttctccggctgccgtctccccgggtacccccttcccccagctcactgtaaacatcttttatttaatgacctctgagacaccccctacccttatcctgggtccctcggggcagaggccagtgaatcgtaaacgtccggagccctggaatgcggcccaagcgaaaaggccaccgcggtgttgggggggggcggtccgcgagtccaggaccgaggggtggcgactggcgctggggaactcggagcccatcctgctggcactgcggcctctctcgccgcagcgtctggctccgcccaagcccgagccccgggtgggattggaagccgggccccagcctttcccagaattcaggcttgcagagcgtctgcaggtgtctgcctgccacctgcagcgggacagttccaaacacctgttgaaagtgcagattcccctatctagtgcggggtgcgggaggcgggaacccggagcccgggtacgcagaatatgggtttttacggagtgttttagaggatgttgtgcatactagattttggagtcaggaaataaagaagagtgcaagtgtctggtttgtgcccctagctctcggtgcaaagcgttcctgcagaattgcttccacgtaaagggaccttcgggaaatttcgctggataccggctggcattgacaaacccagcgtccctgagccttgtgaggtttccaggcaggctgattgcgaggcaacatgtctgcttcggtgaaagaaagccttcagcttcagctactggagatggaaatgctgttt

SEQ ID NO: 36611 - DNA, 2300 bp, Homo sapien
ccagggcctagtgaaggagacacacattaaacaaataattacatatagcaagtatttaatttcaattgtgaaaagcattaccatggaaaagtggagggttccattgaagtgtgtaaccagcgggacagaatccagtctggagaaccagaaagtctcctctgagggaataacaactgaaggatgagtaggaaatagctacaacagtggttctcaaatgcccagtccacgtattacctatgctatgctaatgttgctggagataaatggatcagaagatggaggtaaattcatttttagtctttagatttttccatccatatttgctttctgtgttatggtgccatcaaaaaatccactcattcactccttaaaagacagttatgttacaggagatatttagatttatgaaaatcatgatacatgtgaaaggtagtccaactggatgggtgaacaaaataataatggcataagactgcaagatagcgtcaataaaaactccaggtatatttgttaaaaaggtgtatatgtttacataaaattaaagatatttactgaagacaatttatagagcattccgtatctttcaaacaaggaaatatgcacctggaatatttctatctttccttgacagaaagctcatgttctagatgtttcaattaaaaactgggcacctggcaaacacttaaatcagggtacctaccttgggctcttcaatctggagtgtaattacaaattcgatttttggtggcagcgcctcccttgtgccttccaaatacctctttatattcgtcagggcatttacatcttcaagttttacttctccttggttaggaaacatagaaaacagcatttccatctccagtagctgaagctgaaggctttctttcaccgaagcagacatgttgcctcgcaatcagcctgcctggaaacctcacaaggctcagggacgctgggtttgtcaatgccagccggtatccagcgaaatttcccgaaggtccctttacgtggaagcaattctgcaggaacgctttgcaccgagagctaggggcacaaaccagacacttgcactcttctttatttcctgactccaaaatctagtatgcacaacatcctctaaaacactccgtaaaaacccatattctgcgtacccgggctccgggttcccgcctcccgcaccccgcactagataggggaatctgcactttcaacaggtgtttggaactgtcccgctgcaggtggcaggcagacacctgcagacgctctgcaagcctgaattctgggaaaggctggggcccggcttccaatcccacccggggctcgggcttgggcggagccagacgctgcggcgagagaggccgcagtgccagcaggatgggctccgagttccccagcgccagtcgccacccctcggtcctggactcgcggaccgcccccccccaacaccgcggtggccttttcgcttgggccgcattccagggctccggacgtttacgattcactggcctctgccccgagggacccaggataagggtagggggtgtctcagaggtcattaaataaaagatgtttacagtgagctgggggaagggggtacccggggagacggcagccggagaaggcttcccagattcaaaggtttgggagatgacctcgacgtcggagagggggatgcgggccgccggcggcgctcactgtgggcgaggtcgccctgtccgaggcccagcgacggggctgattccccacccccgcccctagccaagaccactaggaaccccggcttcccaggaacgcagggcctgccgcccccagaggcccggatttggaggcggaggctgtgcctccgcggccgcagtgctctgagggcccgcgaccctcggccccaacccccgggccaccgcgggggcctcaccctttctggtcactcaatggtaacagccccagaccccgctcggaaccgcagccgcagttcctcaggcgccagctgcgcgcgacctgcggcgaggcgggggcggggctggcggatagtcctctgccgtgattggccagggggcgtggcgacgagccggaagccacgcagggccacgtctgcggttctgaggactgggtttgggtgcagacgttgttgcttgggcgcttctccgctgcgtgtaggtgaagggggcttcctgaccgaggtaagccgggccccgaggctcggagttgagaagggagactaccggtcggcaagggctcggtgggagcgggacaggtcagattctcggcccgacggaggggctagtggtctggcgggcgactgaccg

SEQ ID NO: 36612 - DNA, 2300 bp, Homo sapien
attattttgttcacccatccagttggactacctttcacatgtatcatgattttcataaatctaaatatctcctgtaacataactgtcttttaaggagtgaatgagtggattttttgatggcaccataacacagaaagcaaatatggatggaaaaatctaaagactaaaaatgaatttacctccatcttctgatccatttatctccagcaacattagcatagcataggtaatacgtggactgggcatttgagaaccactgttgtagctatttcctactcatccttcagttgttattccctcagaggagactttctggttctccagactggattctgtcccgctggttacacacttcaatggaaccctccacttttccatggtaatgcttttcacaattgaaattaaatacttgctatatgtaattatttgtttaatgtgtgtctccttcactaggccctggacttcatgaagggcaaaaatagtgtctggtttattcacttttttatcccagcacaagggcacctggcacacgtagttgttcaataaatattgaaataatgcataaaaggaagcaatcatgtatgtaaagtacctggtacatttaatagtagcaataacatttctcaaaatcatgcagttgctattgataaactagcttatgtgatgttatggtatttaaatctatttgattttcattttaaggtgaaaattgatttgcaagtgaccatgcctcacagctacccctatgtagcattgcagctgtttggacggtcatctgaacttgacagacatcagcagctacttctcaacaaaggtctcacttcttacatagggacttttgatccaggtgagctctgtgtatgtgcagcaatccagtggctacaggacaacagtgcatcttatttcctgaacagaaagcttgtatatgaaccatctacacaagcaaagccagtcaagaacacattcctccgaatgtggatctacagtcaccatatatatcagcaggacctaaggaaaaagattttggatgttgggaaaaggttagatgtgactggattttgcatgacaggaaagcctggtataatctgtgtggagggtttcaaagagcactgtgaggagttctggcacacaattaggtaccccaattggaagcacatttcctgtaagcatgctgaaagcgtggagacagaaggaaatggtgaggacctgcgccttttccattcttttgaagagttactccttgaggctcatggtgactatggattaaggaatgactatcacatgaatctgggccaattcttagaatttctcaagaagcacaaaagtgagcatgtttttcagatactatttggtattgaaagcaaaagttcagactcataaaaagcgattaagaggcctatgcctgtaatttcactaagtcagtatttctgttaataagaccaaattaaaaaggctagtggctgtgtagcatcctcagtgcaaaacccagctccagaattttcacctggtaacgaatttcaactgacagtgaaatgaataggcctttaaactttataacattgcaattgtgatgttatctctaggtttttgtgtgaagtcattcaaaaactatttcattgtaaattaataaaaacaatccatttaacttgtgaagctgatttgattgaagaggaatccaaagcccataactaacatcaaaaatcaaactgcaattatgaattgagaaatatgaatagcatttgtttcacattgctagcacacatgtgacacacccacttgtctttcattattggaaatctaaatcaagtttaaaatgagaacaggaaggacatgtttacttccttttttgagacggtgcgatctcggctcactgcatcctcagcttcccaggttcaagcgattctcctgcctcagcctcccaagtagctgggactacaggcgtgcgccaccacgcccagctaattgttatatttttagtagagacagggtttcatcatgttggctaggatggtctcaatctcttaacctcgtgatctgcctgcctcggccttccaaagtgctgggattacaggtgtgagccaccgcgcccagcccgtttacttcatttcttactttaaactcctatttcgagtgttttagtaaaactagatcctaatagcagtggcaaaggactcatagacatgaagtcccacgagttaaaagatgacacacaatgctatgtgttctggctgtttatatcagttcatgatactagcaatcctgataccagtattagtttaattcttatccagaaaagataa

SEQ ID NO: 36613 - DNA, 2300 bp, Homo sapien
cataacctcttaaaaacgcatgtggtagggatatgatagatcatttagtacactgattctcaaaactggctaatcatttcttttttttattttttatttttttgagacagagtctcgctgtcgcccaggctggagtgcagtggtgtgatcttggcttactgcaagctctgcctcctgggtttatgccattctcctgcctcagcctcctgagtagctgggactacaggctcctgccaccacgcccagctaattttttgtatatttttagtagagacggggtttcaccgtgttaaccaggatggtctcgatctcctgacctcgtgatccgcccgcctcagcctcccaaagtgctgggattacaggcatgagccactgcgcctggcctacagcagattattaataggagaaaatataccaaaactttaagtgctggaattatgatttttttcttcttcacaaaaattttaattgcaacaacaactagcatagagctcttactataaaccaggtacagtcctgagtgttttacatgcattacatttcatttaccccacaaacaacctgatgaggtagaagtccttattatccttatttacagatgaggagacaagcacaaagaggttcatatgtttcaaattttttaataattcagtatattgcttttaaaaacagagcctgtctctactaaaaatataaaattagccgggcacatgcctgtaatcccagctacttggaaggctgaggcaggagaatagctttaacccgggaggcggaggttgcggtgagccgagatcgcgccactgcactccagcctgggcaacatgagcaaaaactctgtctcaaaaaaaaaagacaaacaaaacaaaattaaaaacaacaacaacaacaacaacaacaaaaaaaaacagagcctggcatggtggctcacgcctataatcctagtgactcaggaggctgaagcgaaaagatcactcctgaggccagaagttcgagacaaccctgggcaatatagcgagacccccatctctaaaaaaaaatgataaattagccaagcatggtggtgcatgcctgtagttccagctactagagaggcttaggtgggaggatcccttgaccccaggagttcaaggctgcagtgacctctgatccacagcactccaacttgcatgacaaaatgagacctcatttcaaacaaacaaaagcaacagaaataaaatgataataccctttaaagaaagaaaattgtactatcttcattattaacaatttgcaaagactatgacatactatttgttaagtttttgcccggggtgattctgtgctatattgaaaaggctttgagttctagtacaatctcttgccttgagcaagtcccttaaaacctctgaacatgtttccgcatatgtaaaatgactatacttatacttgtcctgcttctcagaattgttgaggggatcaaatgaaatatgtgaaaacaacttgtaagtcatcaagtaccatataaaattaggcagtgatccattatgtagtcaaatctttaaaatttgcagctagaatattataattagatgtttactagataacacatggcgcattcataatcagaacattaaaaacaaaaacatataaaatgcatacttactgagaaaatctaacaatgacataaatatgacttcaaattcttttcttagtcagtagcataaattggtagggctaaagctgaagccaactccaaattctgagacctgctataaaacacaatgtgtgacgaacaatataattatttaaattatattttgcatggccatttgttaatgctagttctcacatgtctgtaaaattaggatttttaatatcaattaaatgaaggactttgttttgttcactgttacatctccattgcctagaacattgacatataaatatttgttaaacgaatgaatgaaataacattctgacaattgaagaagagattttaagaatagctgtaacacatcatacataaaaatgttaagcataaatatttgtaatatatgtaccgaaatttattgaccctcacatgtttggcagattcttaattttttcttactggctttacttagggacgtgcttccttaacacaagagaaagagaagtttgcccatgaacatgaagaaatgaagaacctagaagccattgttcaagaaataaaaccaactgccctcataggtaagcattttctcctctcccttctcccctaccccttattttgacctgattgttttttttactaccaatttttgaggtataatttagccttt

SEQ ID NO: 36614 - DNA, 2300 bp, Homo sapien
ttcctacgtttttggaaataaaacctaaccttatgagattattatttaaaaaagactgaaaattttgatattctagctaacatttatgtagaaaaataggttctttctagtattcttggaactacatatgaatgtactaaatggcttcttcagctaggccttatcctgtttcattcaagatgacggcggttattttaataattaaaataaacatacagatgaaagatgtgaactttacctactactggcaggatattgtaatccccttgtaatgttgcctttgagggagaggccatatactctttgtgggttactccctgtacttataacacttttcctatctgtagatattaaatctcagaaacaggaacaggtaggtagtatatctaaattcatgtaataagtactttattataataagggtctgttgtactaacatttttgtttcttcttaagcagcttgaattggctcccatgccagctgttaaactgtttcctctcacataaaacaccctaactgtaatgtgtctcagttaattcaggagagtgagttgtgtaaagtacacctttttcttagatgttgtaggattgagtatttatggagtatagaattaacaatgaaaggtgtcatttaacttcaaggatttttttcaaaaagaactttgtgatgcctagaaaatattctctataaaaacaacgaattctagataattcaggcgaggtcaaagaagcttctaaatgtaaatacggacaaaatacaattactgtaagaaatctttctgataaggcaaagttaacataactagaaatgaaaacactgtgattggatgtgtgtctagtatatggagatataaaatcagcaaataatctcaaacactatcctttgtaatatcagtatgcagagacaaatgggacagaaactagcaatcctatttaactgaaaaggaaactggggcacagaaggctttagtgtctgttgctattaatttatttttatcagacaggcactccttttggctatgatctgactattcctccagtccatgaacctccaagcataaatatcaataaaacaataaaaaaatggcccggcgcggtggctcacacctataatcccagcactttggaaggcggaggcgggcggatcacctgaggttgggaggaaggcctgaaagactgcttactcatcattattcagagagagcagtggttcttgaacatcaggtttctagaactcccagagaaataatatacaagataaacaggactgttcattgggcctttgcaccctaacaccttgactcttatcttattgacattcaaatacaattccggtggaaaatctgtagaaactgacaggtgtggcgcctgagctctcctctctgggcttcctcccagttcccttgggcctcggcattctgggtcaaggttggttccctccggcctcagggccccgggcatggccggcatcctggatggcacggcgaaggttgtggatctgtagaaagagggcttccaagacgctaacaagacaggagagacgagtctgattctcctcagcctgtcgaggtgttctgtcaacagttctggggacccctcacgagtccttccgtcctgtaatccccctaggtgtctgagcgaccgccggctctgcctgaaccgctcaggttcgcaccttctggcatcttctcgcactttctccagccttcccgggcagggggatcctggcctgacgctccccgctccctgcccccgccctgggtctctggggtcagcagagccacccagtgcactgcgtttaggcatgcccacatggagagaggcgaccacagcggtgatcataagcccatggtgggcagaggccctatggagccaagggctccggccgccacccccgctccgccaccagcagcgctgccaggactcgctcttcctcctcctcctcacacgccggctcggatgatctcctgccatgactcagcgcttctcgcaggctgccctgctggggacaccggcttcgctcgggcccctcccgacgcgtccaccccctctcgccacccacgcccgcccccagccgctgggcctttcccagtgcggccgccgccgccacagctgcagtcagcaccgtcaccccagcagcatccgccgcctgcaccgcgcgtgcggcccgccccggcctgaccccgccgccgaacccggcgccagccatggagcccgaagccccccgtcgccgccacacccatcagcgcggctacctgctgacacggaaccctcacctcaacaaggtaaacccgcaggcc

SEQ ID NO: 36615 - DNA, 2300 bp, Homo sapien
cacaaaagaaattatttaaaaagctgggtgagatggcatgtgcctgtgtacctgggaggtggaggtgggaggattgcttgagcccagaatttgaagctgcagtcagctatgatcctgccactgcactccagcctgggtgacagagtgataatttaaaaaccctgtctctaaaaatttaatgaattaaaattttttaaaaataagaagccagaaacctagaactagagaaatagtaaatacgaagcatcaggaccagatgaagtaaagcgataaattttgaaaacagtcaaattaatgataagacaacctggaatagatccagaaatagggtacaaaagggcttggggtcaaaggctcaagaaggggggcatgaaaatgaaagagccctggaagtttgctttctgtgatgctagtggagaatgctgaataaagtgaaggaagcagacctgggtccacagtgaatccttctggatttatacagtgttagaatcccaaaaatgtttgagagctgcaggccttggaactcctccagctcaaccatctcaatttacagatgaaaaagcggaggcccagggcacacagctatttagtgtcaggcggaattcccattctgagttctggactttctctgtgacttctccacactccatctgactagcaaactttttagttccacgtctaatgcagcagctactatatgccaggccctgtggtagatggtggtgattcaaagatgcatatgactattatgatctaattggtgacagagagcttcagaactaattctaactggtaaaaattaccaatagattttaatatatgggtaaatgcttatgttaacaatgctaaatgagaaaacagcaatgaaattgtatatatagttggcccttggacacatatttgaactgcacaggtccacttatacacagattttttttttcacccaaaagcggatagaaaacagtattttcaggcagaaatgcttaaacagagggcagacttttcctatacgcgggttccccagggcccacagctggacttggacttgaatatgggatgattttagtatgggggggcggaggggaagagggcctggaactagtccgttgagtataacgagggacaatgctaagtatgttataatctcattaaaagtacacagaacttgagatacgcaataacctactaacgaaccaagtgttacaagacatgctaagaccttgtgttgtaagtacttgtgcacttactcgatctccctgctttagggccaggaccgagtttttttgtttttgtttttgtttttgtttatgtattctctcgttgtatcagttcatcttgccccagacctgtcacccactagaatttgttgttaaacaaatgaagcttcctttctcatgtggcccccacccctctcctaaaggagaataaaaggtcgagagaacggatgaggttagaatgctggtgggactgagatgggaaaggaccttaaaggttactcgcccaaagaggaaaaccagccttttccctgcagacggaaactgacgcgctccccctggaggcagcgcaggatgctcccgggggtccaggcgtcccagcctgaggtccccatcctcgtgtgcagcctgggcgcctggtacaagtcggggtaaccctgaggcttgtgcatccagagaagctaggtccccggtggagactagcttgggataaggttggggagacgccctccgttcttctagatgcctggggtctcaacagcaagcagtgaggaatgagactcttaactgaacaactcctgagactgttaaaggagtgcatactattacagggacaggcatcccctgtgaacctactcatgaatttttcctaatgcttaattcagcttgggggcagaaatgctggggtgagacacggccaggtccgccccgttcctccagggaactcccctctccgccctccctctccgtctcctcttgcccacctcctcctcctcccctccccccactccatcccaccgcgcccgcccctcgtcatcgccccctttcccctcccatctcccggccgtggtgcggcgcagctctctccccctccgcagtctcagtggcgagctctgggtgctgtggcccggccttggcggggcggcctccggctcaggctggctgagaggctcccagctgcagcgtccccgcccgcctcctcgggagctctgatctcagctgacagtgccctcggggaccaaacaagcctggcaggtaaagatgaagctccccaaacccaacaaccttagaacttagaaatttccc
